United States Patent Application Publication US 2023/0026259 A1 - sequence listing, part 93

SEQ ID NO: 202664 - DNA, 2238 bp, Homo sapiens
  Payload ID: 19966
  Gene Name: zinc finger protein 480
  ENST ID: ENST00000490272
  CDS Start-End: 65-250
aaacccggaagcggatcgcgtggagtgaaggtcacgccgcggcgcgattgacttctaaagagtcatgctgtgtgatgaaaaagcccagaagagaaggaagaggaaagcaaaggagtcagggatggctcttcctcagggagcagctatgcattgggaagcaatgcagaagacaaaccaattaaaaaacaacttggagtatcctttcacttacatctgtctgaactggagctatttccagatgaaagggtaataaatggatgtaatcaagttgaaaactttatcaaccacagttcctctgtttcctgtcttcaagaaatgtcttccagtgtcaaaacccccatttttaataggaatgattttgatgattcttcatttctcccacaagaacagaaagtacaccttagagaaaaaccttatgaatgtaatgagcatagcaaagtctttagagtatcttccagccttactaaacatcaagtaatccatactgtagagaaaccttacaaatgtaattcatgcggcaaggtctttagtcgcaattcacaccttgcagaacattgtagaattcatactggagagaaaccttacaaatgtaatgtctgtggcaaggtttttagttacaattcaaactttgcacgacatcaaagaattcataccagagagaagccgtatgaatgtaatgaatgtggtaaagtcttcagtaataattcttaccttgcacgacatcaaagaattcatgctgaagagaaaccttacaaatgtaatgaatgtggtaaaggcttcagtcataagtcatctctagcaaatcattggagaatttatactggagagaagccttacaaatgtgatgaatgtggcaaggccttctataggattgcgctccttgtacgacatcagaaaattcatactggagagaaaccttacaaatgtaatgaatgtggaaaggtctttattcaaaattcgcacctagcacaacattggagaattcatacaggagagaaaccttacaaatgtaatgaatgtggaaaagtatttaatcaactttcaaatcttgcacgacatcgaagaattcatactggagagaagccttacaaatgtaatgaatgtggtaaagcatttagtgagtattcaggcctttcagcccatcttgtaatccacactggagagaagccttacaaatgtagtgaatgtggcaaggcattcagacacaagttatcactaaccaatcatcagagaatccatactggagaaagaccttacaaatgtaatgaatgtggcaaggtcttcaatcgaattgcacaccttgcacgacatcggaaaattcatactggagagaaaccttacaaatgtaatgagtgtggcaaggcctttagtcgcatttcatacctagcacaacattggacaattcatatgggatagaaactacaaatgcaacaaatgcgtcaaagaatttagtgtgcactcaagccttactacccatcttttattccatactgcaaagaaattttgcaaatgtaaagaatatgacaaggtcttcaaacacaagtttttctaataactcattagagaatttatactggagagacttcacaattataataaatgtgtggaaaagtcttcaaaaaaatttcacaccttgcaaaaggagatctaaaaaacacaatcagaaatgacaaaggggacattaccaccaaccccacagaaatacgaaaaaccctcaaagattactataaacacctgtatgcacacaaactagaaaacctagaaaaaattaataaattccttgaaagatataaccccccaagattgaaccaagaagaaattgcatccctgaacagaccaataatgagttccaaaatttaatcactaattaaaaatctatcaaacaaaactctggaccagacagatttatagttgaagcctacgagatgtataaagaaaagctgttaccaatcttactgaaactgttcaaaaacatggatgcagagggactcctccctatctgattctatgaggccagcatcattctaataccaaaacctgacaggcacaatgaaaaaagaaaacttcaggctggtactcctgacgaatataggtgccaaaatcctcagcaaaatactagtaaaccaaatccatctgcacatcaaaaagctaatccaacattatcaagcaggctttagtgttgggctgcaaggttggttcagtatacacaaatcaataaatgtgatttatcacatacac

SEQ ID NO: 202665 - DNA, 4738 bp, Homo sapiens
  Payload ID: 19966
  Gene Name: zinc finger protein 480
  Uniprot ID: Q8WV37
  ENST ID: ENST00000595962
  CDS Start-End: 67-1674
acaaacccggaagcggatcgcgtggagtgaaggtcacgccgcggcgcgattgacttctaaagagtcatgctgtgtgatgaaaaagcccagaagagaaggaagaggaaagcaaaggagtcagggatggctcttcctcagggacacttaacattcagggacgtggccatagaattctctcaggcggagtggaaatgcctggaccctgcacagagggctttatacaaggatgtgatgttggagaactacaggaacctggtctccctgggaatctctcttcctgacctgaatattaactccatgttggagcaaaggagggagccctggtctggtgagagtgaagtgaaaatagcaaaaaattcagatgggagggagtgcatcaaaggtgtgaacacagggagcagctatgcattgggaagcaatgcagaagacaaaccaattaaaaaacaacttggagtatcctttcacttacatctgtctgaactggagctatttccagatgaaagggtaataaatggatgtaatcaagttgaaaactttatcaaccacagttcctctgtttcctgtcttcaagaaatgtcttccagtgtcaaaacccccatttttaataggaatgattttgatgattcttcatttctcccacaagaacagaaagtacaccttagagaaaaaccttatgaatgtaatgagcatagcaaagtctttagagtatcttccagccttactaaacatcaagtaatccatactgtagagaaaccttacaaatgtaattcatgcggcaaggtctttagtcgcaattcacaccttgcagaacattgtagaattcatactggagagaaaccttacaaatgtaatgtctgtggcaaggtttttagttacaattcaaactttgcacgacatcaaagaattcataccagagagaagccgtatgaatgtaatgaatgtggtaaagtcttcagtaataattcttaccttgcacgacatcaaagaattcatgctgaagagaaaccttacaaatgtaatgaatgtggtaaaggcttcagtcataagtcatctctagcaaatcattggagaatttatactggagagaagccttacaaatgtgatgaatgtggcaaggccttctataggattgcgctccttgtacgacatcagaaaattcatactggagagaaaccttacaaatgtaatgaatgtggaaaggtctttattcaaaattcgcacctagcacaacattggagaattcatacaggagagaaaccttacaaatgtaatgaatgtggaaaagtatttaatcaactttcaaatcttgcacgacatcgaagaattcatactggagagaagccttacaaatgtaatgaatgtggtaaagcatttagtgagtattcaggcctttcagcccatcttgtaatccacactggagagaagccttacaaatgtagtgaatgtggcaaggcattcagacacaagttatcactaaccaatcatcagagaatccatactggagaaagaccttacaaatgtaatgaatgtggcaaggtcttcaatcgaattgcacaccttgcacgacatcggaaaattcatactggagagaaaccttacaaatgtaatgagtgtggcaaggcctttagtcgcatttcatacctagcacaacattggacaattcatatgggatagaaactacaaatgcaacaaatgcgtcaaagaatttagtgtgcactcaagccttactacccatcttttattccatactgcaaagaaattttgcaaatgtaaagaatatgacaaggtcttcaaacacaagtttttctaataactcattagagaatttatactggagagacttcacaattataataaatgtgtggaaaagtcttcaaaaaaatttcacaccttgcaaaaggagatctaaaaaacacaatcagaaatgacaaaggggacattaccaccaaccccacagaaatacgaaaaaccctcaaagattactataaacacctgtatgcacacaaactagaaaacctagaaaaaattaataaattccttgaaagatataaccccccaagattgaaccaagaagaaattgcatccctgaacagaccaataatgagttccaaaatttaatcactaattaaaaatctatcaaacaaaactctggaccagacagatttatagttgaagcctacgagatgtataaagaaaagctgttaccaatcttactgaaactgttcaaaaacatggatgcagagggactcctccctatctgattctatgaggccagcatcattctaataccaaaacctgacaggcacaatgaaaaaagaaaacttcaggctggtactcctgacgaatataggtgccaaaatcctcagcaaaatactagtaaaccaaatccatctgcacatcaaaaagctaatccaacattatcaagcaggctttagtgttgggctgcaaggttggttcagtatacacaaatcaataaatgtgatttatcacatacacagaactaaaaacaaaaaccacatgaccatgatcatctctttagatgcagaaaggtttttaataaaattcaacatcccttcattttaaaaaccctcaacaaattacacattgagggaacatacttcaataagaaccatctatgctggactcacagccaaattaatactgaacaagcaaaagctggaagcattccccttgagaactggaaaatgacagggatgaccactctcaccactccgattcaacatagtactggaagtcctaagcttagtgatcaggcaagataaagatatgaaaggcatatataaataggaagaggggaagtcagtttctcttgcagaagatataattctgtatttagaaaacctgttgtctctgcccaaaggctcctagatctgataaacaacttcaaaaaagtttcaggatacaaaatctgtgtacaaaaattagttgcatttctatacaccagtaatgtccaagctatgaaccaaatcaagaatggaatcccattcacagtagccacaaaaagtataaaatacctaggaatacagccaaccaggtaagtgaaagatttctacaatgagaattacaaagcagtgcacaaagaaatcagaaacaataaaaattgaaaaatatctcatgctcatggataggaagaatcagtattgttaaaatactgcccaaagcaatttacagagccaatgctatttctatcaaactaccaatggcatttttcacagaatcagaagaaaacattctgaaatttatttggaaccagaaaagcccaacctaaatagcaaaagcaatcctaagcaaaaagagcaatgtttgaggtatcacactacccaactttaaaccatactacaaggctacagcaactaaaacagcatggtactggtataaaaaaagacacatagatcaatggaataggtaagagaacccagaaataaaggcatatacctacaaccatgtgatcctcaacaaaactgacaagcaatgaagtaagaacttcattcaataagtggtgctggcataactggctagccatatgcaggatattgaaactggacccctatccttcacgatatacaaaaatcaactcaagatggattaaagacttaaatataaaacctaaaagtattaaattcctagaagaaaacccaggaaatgccattctggacataagtgctggaaaagacttaatgatgaacaccccaaagcaattgcaacaaaaacaaaaattgacaagtgggacctaattaaactaaataacttctgcacagcaaaagaagctatttgcagactacagaatgggagaaaatgtttacaaactgcatctgacaaagatctaatccagaatctataaagaactcaaacaaatcaacaatgagaaaaacaaccccattaaaaactgggcaaaggccatgaatagacctttctcaaaagaatacatacatgtggcaataagcatatgaaaaaaatggttaatatcgctaatcattaaggaaatgcaatcaaagccacaatgagataccatctcagacctgtctgaatgggtattatcagaatgggtattattaaaaaatcaaaacatagatgctagtgaggctgcagagaaaagcaaatacttatacactgctggtgggaatgtaaattaattcagccattgtggaaagcactgcagcgatttctcaaagacataaaagaacatagcattcaacccagcatcccattactgggtgtatacctaaaggaatataatcattccaccataaagacaaacacttgtatgttcattgcagcactattctcaatagcaaagatgtggaatcaacgtaaatgcccatcagcagtagaccagataaagaaaatttggtacatatacaccatggaatactatgcagccataaaaaagaacaagactgtgtcctttacagcaacatagatggagctgaggctcttatcctaagtgaattaatgcaggaacagaaaatgaaatatcccatgttctcacttataagtgggagctaaacattgattacacatggactcaaagaagggaacagtagacacgggcttatgggtggaggttgggaagaggatgaagattgaataactgcctgttgggtactatgctgattacctggggacaaaattaactgtacaccaaactcctgcaacatgcagttgacccatgtacacatactccttgaacctaaaataaaacatgaaaaaaagcaaa

SEQ ID NO: 202666 - DNA, 559 bp, Homo sapiens
  Payload ID: 19966
  Gene Name: zinc finger protein 480
  ENST ID: ENST00000598016
  CDS Start-End: 65-559
aaacccggaagcggatcgcgtggagtgaaggtcacgccgcggcgcgattgacttctaaagagtcatgctgtgtgatgaaaaagcccagaagagaaggaagaggaaagcaaaggagtcagggatggctcttcctcagggacacttaacattcagggacgtggccatagaattctctcaggcggagtggaaatgcctggaccctgcacagagggctttatacaaggatgtgatgttggagaactacaggaacctggtctccctgggaatctctcttcctgacctgaatattaactccatgttggagcaaaggagggagccctggtctggtgagagtgaagtgaaaatagcaaaaaattcagatgggagggagtgcatcaaaggtgtgaacacaggctggagtgcaatggtgcaatctcggctaactgcaacctccacctcctgggttcaagcagttctcctgcctcagcctcctgagcagctgggattacagggagcagctatgcattgggaagcaatgcagaagacaaaccaattaaaaaacaacttggagtatcctttc

SEQ ID NO: 202667 - DNA, 3655 bp, Homo sapiens
  Payload ID: 19967
  Gene Name: zinc finger protein 483
  Uniprot ID: Q8TF39
  ENST ID: ENST00000309235
  CDS Start-End: 159-2393
cgttggtgctgtttgcggatgctgatgcagtttctgcaggactgtaaactggattcctggaacctttgatattcctggctgtgtatagtgcctgttggtggactgtactgatactcaactagagtgtgaagggactggattcctgcccctgagacacaatgcaagctgtagtgcccttgaacaagatgacagccatctcaccagaacctcaaactctggcctcgactgaacaaaatgaggtcccaagagtggttacttctggggaacaagaagctattttaagaggaaatgctgctgatgcagagtctttcagacagaggtttaggtggttttgttactcagaagtagctggacccaggaaagctctgagtcaactctgggagctctgcaatcagtggctgagaccagacattcacacgaaagaacagattttagagcttctggtgtttgagcagttcctgaccattttgcctggggagatcaggatttgggtaaagtcacaacatcctgagagtagtgaggaagtggtgaccctaatagaagatttgacccagatgcttgaagaaaaagatccagtctctcaagattctactgtttcccaagaggagaactcaaaagaggataaaatggtcactgtttgtcccaatactgagtcctgtgaatctataacattgaaggatgtagctgtgaacttttcaagaggagagtggaagaagctggagccttttcaaaaggagctatataaggaagtgctactggaaaacctcaggaacctagaatttctggactttccagtttcaaaattagagttgatttcccagctaaagtgggttgaattgccatggctgctggaagaagtctcaaaaagctcccgactagatgaatcagctttagataaaataatagaaaggtgcctcagggatgatgatcatggcttgatggaagaatcccagcaatattgtggcagctcagaggaggatcacggtaatcagggaaattcaaaaggaagagtcgcacaaaacaaaactcttgggagtggcagtaggggtaagaaatttgacccagataaaagcccctttggacataatttcaaagaaacttcagacttaattaaacatctgagagtctacttgaggaagaaatctcggaggtataatgaaagcaagaaacccttcagttttcattcagaccttgttctgaaccgcaaggagaaaaccgccggagaaaagtcacggaaatctaatgatggtgggaaagtcctgagtcactcttcagctcttactgaacatcagaaacgtcagaagattcatttgggggataggtcccaaaaatgcagtaagtgtgggataatctttattagaagatcaactctttctaggagaaaaacccctatgtgtgagaaatgtcggaaagattcatgtcaagaagcagccttaaataaagatgagggaaatgagagtggagaaaaaactcataaatgtagtaagtgtggaaaagcctttggctatagcgcctcactcaccaaacatcggagaattcacactggagaaaaaccctatatgtgtaatgaatgtggaaaagcttttagtgatagttcatcgctcacaccacatcatagaactcatagtggagagaaacccttcaaatgtgatgactgtgggaaaggtttcaccctaagtgctcacctcattaaacatcagagaattcatactggagaaaaaccttataaatgtaaagactgtgggagaccctttagtgacagttcatctcttattcaacatcagcgaattcatactggagaaaaaccctatacatgtagcaattgtggaaaatccttcagtcatagctcatccctttccaaacatcagagaattcatactggagagaaaccctataaatgtggcgaatgtggaaaagcctttaggcagaattcatgccttacccggcatcagagaattcacactggagaaaaaccatatttgtgtaatgattgcggaatgacttttagccattttacgtctgtgatttatcatcaaagacttcattcaggagaaaaaccctacaaatgtaaccagtgtgagaaagccttcccaacccattcactgctaagtcgtcatcagagaattcatactggtgtaaaaccttataaatgtaaagaatgtgggaagtccttcagtcagagttcatctcttaatgagcaccaccgaattcatacaggagagaaaccctatgagtgtaactattgtggtgcaacctttagtcgaagctcaatccttgtagaacacctaaaaattcataccggaaggagagaatatgaatgtaacgaatgtgagaagacatttaaaagtaattcaggcctcattagacatcggggatttcactctgcagagtaatcctggaactacattaaagtggggggaatttaattcaaattgtcagttactgaaaccctgggatgtaaacttacagtattgatcagtagctgcagctttcgtaaattggcagttaggaaaaatatccttttgcccattcatccctcttcttttcaaggatggcaacgactggtaaacagtaattagttggtaaagtcactggaaagggaagaatgcaaaatgattctgaggccagacgaattggaaaagctcttttcttcaggggatttctctctgatttcttctactaccatgtagtgtgatggagagaacttgactgcagtcacataacttggattctgtcccagtttgccaaccaacttgctgtatacaccttggacaagtcatttgacctttcagaattttattttcgtcaccagcagaatgaagggatgggattaatgatttttgccttttttggttttttagttttttattggtatcctgataatctctgaagctgtggacataagttatttttttttatttgtcattactttcaagtttctctagtaaaaaatacaataccactattcaggatgctggacttcttttcttttttttttcttttttttttttcaatttttcttttttgggatggagtctcactatgttgcccagactggtcttgaactcctgggctcaagtgatccttccatctcactttcctgagtagctgacattacgggtacactccatcaagcctggttcctaggatgctggacttctagcttagtgagaatgcagtatactttttgaaaacttcgtgcaggaatccctcaaatgctgtaactaggaatgggtcagtgaagttcaaacgacttttccttgagggagtattttaatcggacaagggaactctttttcttttgggcattggccaacaggactgagaagccagagagcttgcacctgagccatctcagccgtgagagtaacagtcctaggaaaatagatgggggctgggggtaaggaaatgtgctgaagacagagctattctggatggattttggtttgcaaaaattctactttaaaacaattttgcctgtagcaagtacatttttttgcaattggagtgtaaacattctgtgtggcaacagttaaaagctgttataacaatttgcttgggtgtgtgtgcatgtgtgtgtgtgtgtgtgtgtgtgtatacattgttgccactatctaaaattagggcatttcatactaaaaacaaagcttgtctt

SEQ ID NO: 202668 - DNA, 2433 bp, Homo sapiens
  Payload ID: 19967
  Gene Name: zinc finger protein 483
  Uniprot ID: Q8TF39
  ENST ID: ENST00000358151
  CDS Start-End: 233-1003
gcaggcgcagtggttcccgcaggcttgcgcgcgcactcgctgcgggacaagcttctggaagctctttgcggtggcgttggtgctgtttgcggatgctgatgcagtttctgcaggactgtaaactggattcctggaacctttgatattcctggctgtgtatagtgcctgttggtggactgtactgatactcaactagagtgtgaagggactggattcctgcccctgagacacaatgcaagctgtagtgcccttgaacaagatgacagccatctcaccagaacctcaaactctggcctcgactgaacaaaatgaggtcccaagagtggttacttctggggaacaagaagctattttaagaggaaatgctgctgatgcagagtctttcagacagaggtttaggtggttttgttactcagaagtagctggacccaggaaagctctgagtcaactctgggagctctgcaatcagtggctgagaccagacattcacacgaaagaacagattttagagcttctggtgtttgagcagttcctgaccattttgcctggggagatcaggatttgggtaaagtcacaacatcctgagagtagtgaggaagtggtgaccctaatagaagatttgacccagatgcttgaagaaaaagatccagtctctcaagattctactgtttcccaagaggagaactcaaaagaggataaaatggtcactgtttgtcccaatactgagtcctgtgaatctataacattgaaggatgtagctgtgaacttttcaagaggagagtggaagaagctggagccttttcaaaaggagctatataaggaagtgctactggaaaacctcaggaacctagaatttctggactttccagtttcaaaattagagttgatttcccagctaaagtgggttgaattgccatggctgctggaagaagtctcaaaaagctcccgactagacatacatggagcagtaaaaaagatgcagatgttctctgaggctgaataagaccatgctctgccttcttgtttcaactgttacacagagatgaccagaggatggggccactgcagtgcagttcaagaggctctggttcggggaagagctggatggagtatgaatcccaactctgggggtattagctagtggagtggccataggcaagttacttaacacttctgaacctccttttgtctttcataaaataaaagctactaggatgagttgttttaaggatttcagattatagtctatgtgagatatgtgcaaacatgtacatatttcccctagaagcaatggttttcagccttggtggtgaccttatagaacataaatattgtgaataatgaaaatccactgaatctaataagggacttgtatcggtaagatgtaaagaactcttggccaggtgtggtggctcatgcctataatcccagcactttgggaggccaaggcaggtggatcacctgaggtcaggagttcgagaccaacctggccaacatgacgaaactccgtctctatttaaaatacaaaaattagctgggcatggtggtgcatgcctgtaatcccagctactcgggaggctgaggcaggagaatcacttgaactcgggaggtggaggttgcagtgagccaagatcgcgccactgcactccagcctggatgacagagcaaaaaactgtctcaaaaaaaaaaaaatcttacaacctcacaaataacctagttcaaaaatgggcaaagattttgaacagatatttctccaaagaagatatacaaatggcaaatacatacgttgaaagatccttaatattgttagccatagggaaatgcaagtcaaactcaaatcagaatgaaatatcacttcaaacctactaggatggttataataaaaaagacagacaatagcacgtgttggtgagtatgtagagaagttggaaccctcatacactgcttgtgggaatgtaaagtactgtagccactttgcaaaacagtttgacagctcctcaaaatgttaaacatgaaattatcatatgacccagcaattctactcataggtatatacttaaaagaaatgaaaaatccacacaaaaacctctgcatgaatgttcatagtaacattatacttcatagccagaaagtataagctaatacccatcaggctgggtgtggtggctcacgcctgtaatcctagcactttgggaggccgagttgggaggtttgcttgagcccaggagttccagaccagcctgggcaacatggcgaaaccccatctctactaaaaatataaaaattagttgcgtgtggtggcacatccctatagtcccagctacttgggaggctgaggtggaaggattgcttgagcgagggaggtcgaggctgcagtgagccacgatcacaccactgcactccagcctaggtgacagagtgagatcctgtctc

SEQ ID NO: 202669 - DNA, 800 bp, Homo sapiens
  Payload ID: 19967
  Gene Name: zinc finger protein 483
  ENST ID: ENST00000374374
  CDS Start-End: 176-712
gaagctctttgcggtggcgttggtgctgtttgcggatgctgatgcagtttctgcaggactgtaaactggattcctggaacctttgatattcctggctgtgtatagtgcctgttggtggactgtactgatactcaactagagtgtgaagggactggattcctgcccctgagacacaatgcaagctgtagtgcccttgaacaagatgacagccatctcaccagaacctcaaactctggcctcgactgaacaaaatgaggtcccaagagtggttacttctggggaacaagaagctattttaagaggaaatgctgctgatgcagagtctttcagacagaggtttaggtggttttgttactcagaagtagctggacccaggaaagctctgagtcaactctgggagctctgcaatcagtggctgagaccagacattcacacgaaagaacagattttagagcttctggtgtttgagcagttcctgaccattttgcctggggagatcaggatttgggtaaagtcacaacatcctgagagtagtgaggaagtggtgaccctaatagaagatttgacccagatgcttgaagaaaaaggtgagatttatagatggagggaggaagcgggagacattgcctcaaagtccgaaagtaaattcctcaaaagaaggcaatttactgctaaagaggagtctgaggttagaagttgggactgggtttgaatcagccctgccatttactgtgtgattttgggcaagctgtgtaaactctcagaatgtaaatatttttatctgttaaaaagggatttta

SEQ ID NO: 202670 - DNA, 1239 bp, Homo sapiens
  Payload ID: 19967
  Gene Name: zinc finger protein 483
  ENST ID: ENST00000355824
  CDS Start-End: 203-937
gcgcactcgctgcgggacaagcttctggaagctctttgcggtggcgttggtgctgtttgcggatgctgatgcagtttctgcaggactgtaaactggattcctggaacctttgatattcctggctgtgtatagtgcctgttggtggactgtactgatactcaactagagtgtgaagggactggattcctgcccctgagacacaatgcaagctgtagtgcccttgaacaagatgacagccatctcaccagaacctcaaactctggcctcgactgaacaaaatgaggtcccaagagtggttacttctggggaacaagaagctattttaagaggaaatgctgctgatgcagagtctttcagacagaggtttaggtggttttgttactcagaagtagctggacccaggaaagctctgagtcaactctgggagctctgcaatcagtggctgagaccagacattcacacgaaagaacagattttagagcttctggtgtttgagcagttcctgaccattttgcctggggagatcaggatttgggtaaagtcacaacatcctgagagtagtgaggaagtggtgaccctaatagaagatttgacccagatgcttgaagaaaaagatccagtctctcaagattctactgtttcccaagaggagaactcaaaagaggataaaatggtcactgtttgtcccaatactgagtcctgtgaatctataacattgaaggatgtagctgtgaacttttcaagaggagagtggaagaagctggagccttttcaaaaggagctatataaggaagtgctactggaaaacctcaggaacctagaatttctggactttccagtttcaaaattagagttgatttcccagctaaagtgggttgaattgccatggctgctggaagaagtctcaaaaagctcccgactaggaagtgtgatttgataaaggttcaataagagaatgaggctgggtgtggtggctcatgcctgtaatcccagcactttgggaggccaaggcaggtggatcacctgaggtcaggaattgaagaccagcctgaccaacatggagaagccccatctctactaaaaatacaaaattagctgggcgtggtggtacatgcctgtaatccaggctacttgggaggctgaggcaggagaatcgcttgaacctgggaggcagagattgcggtgagccaagatcgcacattgcatccagcctgggcaacaagagcaaaactccgtctc

SEQ ID NO: 202671 - DNA, 2867 bp, Homo sapiens
  Payload ID: 19968
  Gene Name: zinc finger protein 484
  Uniprot ID: Q5JVG2
  ENST ID: ENST00000375495
  CDS Start-End: 150-2708
tacctctaggcctgggaggcattgagaaaaaggaagtgggtcctgttctggttcttgcgactatagtcacctcccgaggcaaatgaccactgtcctgagaggacgtgggtgaggggcagatttctgcccctttgtccgaagagccaaaaatgaccaagtccctggaatcagtgtcattcaaggacgtaactgtagacttcagtagggatgagtggcaacaattagaccttgctcagaaaagcctgtacagagaagtgatgctggaaaactatttcaacttgatctcagtgggatgtcaagttcccaaaccagaagtcatcttcagcttggaacaagaagagccatgtatgttggatggtgagatccccagtcagagccgtccagatggggacattggttttggacctttacaacagaggatgtctgaagaagtttctttccagtctgagattaatattaatctcttcacaagagatgacccatattccattttagaagaattgtggaaagacgatgaacacacaagaaaatgtggagaaaaccagaacaaacctttaagtcgtgttgtcttcattaacaagaaaacactagctaatgacagcatctttgaatataaggacattggggaaatagttcatgtaaacacacacctggtttcctcaagaaaaagaccccataactgtaactcgtgtggaaagaatttggagcctatcataaccttatataatagaaacaatgcaacagaaaattctgataagactattggagatggtgatattttcactcatttgaattctcatacagaagtgactgcttgtgaatgtaaccaatgtgggaaacctctgcatcataagcaagctctcattcaacaacagaaaattcatactagagagagcctctatttgttttctgactacgtaaatgttttctccccgaagtcacatgcctttgcacatgagagtatttgtgctgaagaaaagcagcatgaatgccatgaatgtgaggcagtcttcactcagaagtcccagcttgatggcagtcagagggtttatgcaggaatatgcactgaatatgagaaggatttttccctcaagtcaaaccgtcagaaaactccttatgaggggaattactataaatgcagtgactatggaagagcctttatccagaagtcagatctgttcagatgccagagaattcattctggagaaaaaccttatgagtacagtgaatgtgagaaaaacctccctcagaattcaaaccttaatatacataaaaaaattcatactggagggaaacactttgaatgtactgaatgtggaaaagctttcacaaggaaatcaacactaagtatgcatcagaaaatccatacaggagaaaaaccttatgtatgtactgaatgtgggaaggcctttatccggaagtcacattttatcacacatgaaagaattcatactggagaaaaaccctatgaatgcagtgactgtgggaaatcctttattaaaaaatcacaactccatgtgcatcagcgaattcacacaggagagaatccctttatatgttcagaatgtgggaaggtcttcactcacaagacaaatctcattatacaccagaaaattcatacaggagaaagaccctatatatgtactgtgtgtggtaaggcctttactgacaggtcaaatctcattaagcaccaaaaaattcatactggagagaaaccttataaatgcagcgactgtggaaaatcattcacctggaagtctcggctcaggatacatcagaagtgtcatactggagagagacattatgaatgcagtgaatgtgggaaagcattcattcagaagtcaacattaagtatgcaccagagaattcatagaggggaaaaaccatatgtttgcactgaatgtggtaaggccttcttccacaaatcccattttattacacatgagagaattcatactggagagaaaccctatgaatgcagtatttgtgggaaatccttcactaagaaatcacagctccacgtacatcagcagattcacacaggagagaaaccctataggtgtgctgaatgtggaaaggcttttactgacagatcaaatctctttacacaccagaaaattcacactggagagaaaccttataaatgtagtgactgtgggaaagccttcactaggaagtcaggtctccatatacatcagcaatcccatactggagaaaggcattatgagtgcagtgaatgtgggaaagcctttgcaagaaaatcaacactaattatgcatcagagaattcatacaggagagaaaccctatatttgtaatgaatgtgggaaatccttcatccagaagtcacacttaaatagacacaggagaattcatactggagagaaaccctatgaatgcagtgactgtggcaagtctttcattaagaaatcacaactccatgagcatcatcgaattcacacaggagagaaaccatatatatgtgctgagtgtggaaaggccttcaccatcagatcaaatcttattaaacaccagaaaattcatactaaacagaaaccctataagtgcagtgacttggggaaagccttaaactggaagccacaactcagtatgcctcagaaatctgacaatggggaagtagagtgctccatgccacaattatggtgtggggactcagaaggtgaccaaggccaactttcttctatctagttagaattatgaacatctggatcatatagctgatgtgtagttacacatatggggagacacttttgagagtgtttaagcaatgtatagtggccatctttggttacttgatattggtgttgtcaagctcctgcaaataatagtaaatgtgcaaggagatga

SEQ ID NO: 202672 - DNA, 2836 bp, Homo sapiens
  Payload ID: 19968
  Gene Name: zinc finger protein 484
  Uniprot ID: Q5JVG2
  ENST ID: ENST00000332591
  CDS Start-End: 227-2677
agcgctgtaagaagtacctctaggcctgggaggcattgagaaaaaggaagtgggtcctgttctggttcttgcgactatagtcacctcccgaggcaaatgaccactgtcctgagaggacgtgggtgaggggcaggaatcagtgtcattcaaggacgtaactgtagacttcagtagggatgagtggcaacaattagaccttgctcagaaaagcctgtacagagaagtgatgctggaaaactatttcaacttgatctcagtgggatgtcaagttcccaaaccagaagtcatcttcagcttggaacaagaagagccatgtatgttggatggtgagatccccagtcagagccgtccagatggggacattggttttggacctttacaacagaggatgtctgaagaagtttctttccagtctgagattaatattaatctcttcacaagagatgacccatattccattttagaagaattgtggaaagacgatgaacacacaagaaaatgtggagaaaaccagaacaaacctttaagtcgtgttgtcttcattaacaagaaaacactagctaatgacagcatctttgaatataaggacattggggaaatagttcatgtaaacacacacctggtttcctcaagaaaaagaccccataactgtaactcgtgtggaaagaatttggagcctatcataaccttatataatagaaacaatgcaacagaaaattctgataagactattggagatggtgatattttcactcatttgaattctcatacagaagtgactgcttgtgaatgtaaccaatgtgggaaacctctgcatcataagcaagctctcattcaacaacagaaaattcatactagagagagcctctatttgttttctgactacgtaaatgttttctccccgaagtcacatgcctttgcacatgagagtatttgtgctgaagaaaagcagcatgaatgccatgaatgtgaggcagtcttcactcagaagtcccagcttgatggcagtcagagggtttatgcaggaatatgcactgaatatgagaaggatttttccctcaagtcaaaccgtcagaaaactccttatgaggggaattactataaatgcagtgactatggaagagcctttatccagaagtcagatctgttcagatgccagagaattcattctggagaaaaaccttatgagtacagtgaatgtgagaaaaacctccctcagaattcaaaccttaatatacataaaaaaattcatactggagggaaacactttgaatgtactgaatgtggaaaagctttcacaaggaaatcaacactaagtatgcatcagaaaatccatacaggagaaaaaccttatgtatgtactgaatgtgggaaggcctttatccggaagtcacattttatcacacatgaaagaattcatactggagaaaaaccctatgaatgcagtgactgtgggaaatcctttattaaaaaatcacaactccatgtgcatcagcgaattcacacaggagagaatccctttatatgttcagaatgtgggaaggtcttcactcacaagacaaatctcattatacaccagaaaattcatacaggagaaagaccctatatatgtactgtgtgtggtaaggcctttactgacaggtcaaatctcattaagcaccaaaaaattcatactggagagaaaccttataaatgcagcgactgtggaaaatcattcacctggaagtctcggctcaggatacatcagaagtgtcatactggagagagacattatgaatgcagtgaatgtgggaaagcattcattcagaagtcaacattaagtatgcaccagagaattcatagaggggaaaaaccatatgtttgcactgaatgtggtaaggccttcttccacaaatcccattttattacacatgagagaattcatactggagagaaaccctatgaatgcagtatttgtgggaaatccttcactaagaaatcacagctccacgtacatcagcagattcacacaggagagaaaccctataggtgtgctgaatgtggaaaggcttttactgacagatcaaatctctttacacaccagaaaattcacactggagagaaaccttataaatgtagtgactgtgggaaagccttcactaggaagtcaggtctccatatacatcagcaatcccatactggagaaaggcattatgagtgcagtgaatgtgggaaagcctttgcaagaaaatcaacactaattatgcatcagagaattcatacaggagagaaaccctatatttgtaatgaatgtgggaaatccttcatccagaagtcacacttaaatagacacaggagaattcatactggagagaaaccctatgaatgcagtgactgtggcaagtctttcattaagaaatcacaactccatgagcatcatcgaattcacacaggagagaaaccatatatatgtgctgagtgtggaaaggccttcaccatcagatcaaatcttattaaacaccagaaaattcatactaaacagaaaccctataagtgcagtgacttggggaaagccttaaactggaagccacaactcagtatgcctcagaaatctgacaatggggaagtagagtgctccatgccacaattatggtgtggggactcagaaggtgaccaaggccaactttcttctatctagttagaattatgaacatctggatcatatagctgatgtgtagttacacatatggggagacacttttgagagtgtttaagcaatgtatagtggccatctttggttacttgatattggtgttgtcaagctcctgcaaataatagtaaatgtgcaaggagatga

SEQ ID NO: 202673 - DNA, 3960 bp, Homo sapiens
  Payload ID: 19968
  Gene Name: zinc finger protein 484
  Uniprot ID: Q5JVG2
  ENST ID: ENST00000395505
  CDS Start-End: 199-2763
atgcgcaaacccaggcagcgctgtaagaagtacctctaggcctgggaggcattgagaaaaaggaagtgggtcctgttctggttcttgcgactatagtcacctcccgaggcaaatgaccactgtcctgagaggacgtgggtgaggggcaggtgagtagagggatggcagcatctgtggactgagcaagaagaatctctgatgtctgtcctgagccttccggaatcagtgtcattcaaggacgtaactgtagacttcagtagggatgagtggcaacaattagaccttgctcagaaaagcctgtacagagaagtgatgctggaaaactatttcaacttgatctcagtgggatgtcaagttcccaaaccagaagtcatcttcagcttggaacaagaagagccatgtatgttggatggtgagatccccagtcagagccgtccagatggggacattggttttggacctttacaacagaggatgtctgaagaagtttctttccagtctgagattaatattaatctcttcacaagagatgacccatattccattttagaagaattgtggaaagacgatgaacacacaagaaaatgtggagaaaaccagaacaaacctttaagtcgtgttgtcttcattaacaagaaaacactagctaatgacagcatctttgaatataaggacattggggaaatagttcatgtaaacacacacctggtttcctcaagaaaaagaccccataactgtaactcgtgtggaaagaatttggagcctatcataaccttatataatagaaacaatgcaacagaaaattctgataagactattggagatggtgatattttcactcatttgaattctcatacagaagtgactgcttgtgaatgtaaccaatgtgggaaacctctgcatcataagcaagctctcattcaacaacagaaaattcatactagagagagcctctatttgttttctgactacgtaaatgttttctccccgaagtcacatgcctttgcacatgagagtatttgtgctgaagaaaagcagcatgaatgccatgaatgtgaggcagtcttcactcagaagtcccagcttgatggcagtcagagggtttatgcaggaatatgcactgaatatgagaaggatttttccctcaagtcaaaccgtcagaaaactccttatgaggggaattactataaatgcagtgactatggaagagcctttatccagaagtcagatctgttcagatgccagagaattcattctggagaaaaaccttatgagtacagtgaatgtgagaaaaacctccctcagaattcaaaccttaatatacataaaaaaattcatactggagggaaacactttgaatgtactgaatgtggaaaagctttcacaaggaaatcaacactaagtatgcatcagaaaatccatacaggagaaaaaccttatgtatgtactgaatgtgggaaggcctttatccggaagtcacattttatcacacatgaaagaattcatactggagaaaaaccctatgaatgcagtgactgtgggaaatcctttattaaaaaatcacaactccatgtgcatcagcgaattcacacaggagagaatccctttatatgttcagaatgtgggaaggtcttcactcacaagacaaatctcattatacaccagaaaattcatacaggagaaagaccctatatatgtactgtgtgtggtaaggcctttactgacaggtcaaatctcattaagcaccaaaaaattcatactggagagaaaccttataaatgcagcgactgtggaaaatcattcacctggaagtctcggctcaggatacatcagaagtgtcatactggagagagacattatgaatgcagtgaatgtgggaaagcattcattcagaagtcaacattaagtatgcaccagagaattcatagaggggaaaaaccatatgtttgcactgaatgtggtaaggccttcttccacaaatcccattttattacacatgagagaattcatactggagagaaaccctatgaatgcagtatttgtgggaaatccttcactaagaaatcacagctccacgtacatcagcagattcacacaggagagaaaccctataggtgtgctgaatgtggaaaggcttttactgacagatcaaatctctttacacaccagaaaattcacactggagagaaaccttataaatgtagtgactgtgggaaagccttcactaggaagtcaggtctccatatacatcagcaatcccatactggagaaaggcattatgagtgcagtgaatgtgggaaagcctttgcaagaaaatcaacactaattatgcatcagagaattcatacaggagagaaaccctatatttgtaatgaatgtgggaaatccttcatccagaagtcacacttaaatagacacaggagaattcatactggagagaaaccctatgaatgcagtgactgtggcaagtctttcattaagaaatcacaactccatgagcatcatcgaattcacacaggagagaaaccatatatatgtgctgagtgtggaaaggccttcaccatcagatcaaatcttattaaacaccagaaaattcatactaaacagaaaccctataagtgcagtgacttggggaaagccttaaactggaagccacaactcagtatgcctcagaaatctgacaatggggaagtagagtgctccatgccacaattatggtgtggggactcagaaggtgaccaaggccaactttcttctatctagttagaattatgaacatctggatcatatagctgatgtgtagttacacatatggggagacacttttgagagtgtttaagcaatgtatagtggccatctttggttacttgatattggtgttgtcaagctcctgcaaataatagtaaatgtgcaaggagatgattggcagtctttcttgtttcactttttgggcaaacagttttataaattcatggctgttgagtttttcatgttctgggtaccacaactattcaatattgacccgcaaaaattcataatgagtagtatgatgagataattttacattgtctaagcagcctaaggacactgagatcaaggcaaagagagggcaatttaggtctataatgaaagtgaatcagcagtttttgtgaaaacactaaagacagaaagaaaggactctactttttttaaaattttctttgggaagtcaccattatttattgttatatctgttggcgtatgctggggcagcagttagccaagaggtctgaaattgctctttgcctatttctcaaaagtctatattattaccttagaactggccctacgatcatggaacttagatacagggacccaggtctagatagcagcactttagatcctcagctttcaccacagaaacctgcacttttttgatgttgttgttaccaactcctgtttgaaaaataggacaaattaagaaaatggatatcaaatcctaaaattttttcccactaattttgttagtacattctctacatgttcgttacttgctagattaccatgagacacaagcatcttgaattttagtttgtgtccttagaagataaaatgtagttgaacatttggaagacttctccttttatctcctcacaatctctacaaactaatcttaattaattttgtttttcaaattctctgtatttgaatagacttttttgtcttttcttctatcaaatactgaaagaactgtgttgtaattttacaaataattgtgaatttgtctcctttagagctactaatttttgctttatatattttgtctttgattttacatacaatttagaattgttgtaatcttcctggttaattgacacattatcattattagatgtttctttttatctctagtaattttttgccttaaatgtactatgtcagatactaatatacatatggattaaaagctaatgtaaatta

SEQ ID NO: 202674 - DNA, 4031 bp, Homo sapiens
  Payload ID: 19968
  Gene Name: zinc finger protein 484
  Uniprot ID: Q5JVG2
  ENST ID: ENST00000395506
  CDS Start-End: 384-2834
atgcgcaaacccaggcagcgctgtaagaagtacctctaggcctgggaggcattgagaaaaaggaagtgggtcctgttctggttcttgcgactatagtcacctcccgaggcaaatgaccactgtcctgagaggacgtgggtgaggggcaggtgagtagagggatggcagcatctgtggactgagcaagaagaatctctgatgtctgtcctgagccttccgatttctgcccctttgtccgaagagccaaaaatgaccaagtccctgacttctttctcaactaccaatggcaggaatcagtgtcattcaaggacgtaactgtagacttcagtagggatgagtggcaacaattagaccttgctcagaaaagcctgtacagagaagtgatgctggaaaactatttcaacttgatctcagtgggatgtcaagttcccaaaccagaagtcatcttcagcttggaacaagaagagccatgtatgttggatggtgagatccccagtcagagccgtccagatggggacattggttttggacctttacaacagaggatgtctgaagaagtttctttccagtctgagattaatattaatctcttcacaagagatgacccatattccattttagaagaattgtggaaagacgatgaacacacaagaaaatgtggagaaaaccagaacaaacctttaagtcgtgttgtcttcattaacaagaaaacactagctaatgacagcatctttgaatataaggacattggggaaatagttcatgtaaacacacacctggtttcctcaagaaaaagaccccataactgtaactcgtgtggaaagaatttggagcctatcataaccttatataatagaaacaatgcaacagaaaattctgataagactattggagatggtgatattttcactcatttgaattctcatacagaagtgactgcttgtgaatgtaaccaatgtgggaaacctctgcatcataagcaagctctcattcaacaacagaaaattcatactagagagagcctctatttgttttctgactacgtaaatgttttctccccgaagtcacatgcctttgcacatgagagtatttgtgctgaagaaaagcagcatgaatgccatgaatgtgaggcagtcttcactcagaagtcccagcttgatggcagtcagagggtttatgcaggaatatgcactgaatatgagaaggatttttccctcaagtcaaaccgtcagaaaactccttatgaggggaattactataaatgcagtgactatggaagagcctttatccagaagtcagatctgttcagatgccagagaattcattctggagaaaaaccttatgagtacagtgaatgtgagaaaaacctccctcagaattcaaaccttaatatacataaaaaaattcatactggagggaaacactttgaatgtactgaatgtggaaaagctttcacaaggaaatcaacactaagtatgcatcagaaaatccatacaggagaaaaaccttatgtatgtactgaatgtgggaaggcctttatccggaagtcacattttatcacacatgaaagaattcatactggagaaaaaccctatgaatgcagtgactgtgggaaatcctttattaaaaaatcacaactccatgtgcatcagcgaattcacacaggagagaatccctttatatgttcagaatgtgggaaggtcttcactcacaagacaaatctcattatacaccagaaaattcatacaggagaaagaccctatatatgtactgtgtgtggtaaggcctttactgacaggtcaaatctcattaagcaccaaaaaattcatactggagagaaaccttataaatgcagcgactgtggaaaatcattcacctggaagtctcggctcaggatacatcagaagtgtcatactggagagagacattatgaatgcagtgaatgtgggaaagcattcattcagaagtcaacattaagtatgcaccagagaattcatagaggggaaaaaccatatgtttgcactgaatgtggtaaggccttcttccacaaatcccattttattacacatgagagaattcatactggagagaaaccctatgaatgcagtatttgtgggaaatccttcactaagaaatcacagctccacgtacatcagcagattcacacaggagagaaaccctataggtgtgctgaatgtggaaaggcttttactgacagatcaaatctctttacacaccagaaaattcacactggagagaaaccttataaatgtagtgactgtgggaaagccttcactaggaagtcaggtctccatatacatcagcaatcccatactggagaaaggcattatgagtgcagtgaatgtgggaaagcctttgcaagaaaatcaacactaattatgcatcagagaattcatacaggagagaaaccctatatttgtaatgaatgtgggaaatccttcatccagaagtcacacttaaatagacacaggagaattcatactggagagaaaccctatgaatgcagtgactgtggcaagtctttcattaagaaatcacaactccatgagcatcatcgaattcacacaggagagaaaccatatatatgtgctgagtgtggaaaggccttcaccatcagatcaaatcttattaaacaccagaaaattcatactaaacagaaaccctataagtgcagtgacttggggaaagccttaaactggaagccacaactcagtatgcctcagaaatctgacaatggggaagtagagtgctccatgccacaattatggtgtggggactcagaaggtgaccaaggccaactttcttctatctagttagaattatgaacatctggatcatatagctgatgtgtagttacacatatggggagacacttttgagagtgtttaagcaatgtatagtggccatctttggttacttgatattggtgttgtcaagctcctgcaaataatagtaaatgtgcaaggagatgattggcagtctttcttgtttcactttttgggcaaacagttttataaattcatggctgttgagtttttcatgttctgggtaccacaactattcaatattgacccgcaaaaattcataatgagtagtatgatgagataattttacattgtctaagcagcctaaggacactgagatcaaggcaaagagagggcaatttaggtctataatgaaagtgaatcagcagtttttgtgaaaacactaaagacagaaagaaaggactctactttttttaaaattttctttgggaagtcaccattatttattgttatatctgttggcgtatgctggggcagcagttagccaagaggtctgaaattgctctttgcctatttctcaaaagtctatattattaccttagaactggccctacgatcatggaacttagatacagggacccaggtctagatagcagcactttagatcctcagctttcaccacagaaacctgcacttttttgatgttgttgttaccaactcctgtttgaaaaataggacaaattaagaaaatggatatcaaatcctaaaattttttcccactaattttgttagtacattctctacatgttcgttacttgctagattaccatgagacacaagcatcttgaattttagtttgtgtccttagaagataaaatgtagttgaacatttggaagacttctccttttatctcctcacaatctctacaaactaatcttaattaattttgtttttcaaattctctgtatttgaatagacttttttgtcttttcttctatcaaatactgaaagaactgtgttgtaattttacaaataattgtgaatttgtctcctttagagctactaatttttgctttatatattttgtctttgattttacatacaatttagaattgttgtaatcttcctggttaattgacacattatcattattagatgtttctttttatctctagtaattttttgccttaaatgtactatgtcagatactaatatacatatggattaaaagctaatgtaaatta

SEQ ID NO: 202675 - DNA, 2054 bp, Homo sapiens
  Payload ID: 19969
  Gene Name: zinc finger protein 485
  Uniprot ID: Q8NCK3
  ENST ID: ENST00000361807
  CDS Start-End: 195-1520
cacttccgcttccggtccagcctgtctccgcgtggtgcgagcgctgcaccagcccctggctggtggttactgtccgaacggcgtggtgtggtcgctgactctctgggcgtgcagctccgcagccctgccggctcggttcgattgacttacgcaggattctcagcccttgcctgggagaacagttcaggagacagatggccccaagagcccagatccagggaccgctgacatttggggatgtggctgtggcctttacccggattgagtggagacacctggatgctgctcagcgggccctgtacagggatgtgatgctggagaactatgggaatctggtgtctgtggggcttctctcttccaaaccaaaactaattactcagttggagcaaggggcagagccctggactgaggtgcgagaggctccatcaggcacacatgcagtcgaggattactggtttgaaacaaagatgtcagccctaaagcaaagcacttctgaagcatctgttctgggagagcgaacgaaaagtgtcatgatggaaaaaggcctggactgggagggcagaagctccacagagaagaactataagtgcaaggaatgtgggaaagtcttcaaatacaattcgtcctttattagccaccagagaaatcacaccagtgagaaaccacataaatgtaaagaatgtgggatcgcctttatgaacagttcatcccttttaaatcaccataaggttcatgcaggcaaacagccttatagatgtattgaatgtgggaagttcctgaagaagcactcaacgtttatcaaccatcagagaattcattctagggagaaaccccacaaatgcattgaatgtggaaaaactttcagaaagaactcaatccttttaagtcatcagagaattcatactggccagaaaccctacaaatgtaatgactgtgggaaagccttcgctcagaatgcagctcttactcgtcatgaaagaatacatagtggagagaagccttttaaatgtaacaagtgtgggagagctttcagggataattcaactgtgttggaacatcagaaaatccatactggtgagaagccatatcagtgtaatgaatgtggaaaagcctttaggaagagctcaactcttattagtcaccaaagaatgcatactggggagaaaccctatcactgcagtaaatgtggaaaatctttcaggtatagctcatcctttgctggtcatcagaaaactcacagtggaaataaaccgtatcagtgtcgtgactgtgggaaggcctttacaaagagctcaacccttactggacatcagagaattcatactggagaaaaaccctatcactgtaagaaatgtgggaaagcctttcggcacagctcaggccttgttgaacatcagagactccatactggggaaaaaccttataaatgtaatgaatgtgggaaagcttttccccgaagttcagcccttaagcaacataagaaaattcataataaagaaagagccatgaaatgtagttagtgtggcaaattgtgcagagtagtttattccttctgaccatcatagaggagacattaaataaattatgcatttaacagaaatactctgtacttctgagagaacacatcacttgtgaggatattcattgtgaggttctactagtgaaatatttgaagaaactaaatgtatgtcagtatggaagtagttatagcatactgtgtgctaattgaaaagaatgaggtggagctgtaaatactgtacaaagccaggcatggtggcatatgcctgtagtcccagttacttgggaggctgagacaggattgcttaagcccaggagtttgagtctgtaatgcactatgattgtgcatgtgaatagccactgcactccagcctgggcaacatagcaagactccatctctaagtaaaaaaatacaacagtagaaatatacccatgataatatacccaatatacccttgttaaagaagcaagtttcaggaaatctatattatatgcattcaaaaagacctggacaaataaagaccaatcttaacagc

SEQ ID NO: 202676 - DNA, 2052 bp, Homo sapiens
  Payload ID: 19969
  Gene Name: zinc finger protein 485
  Uniprot ID: Q8NCK3
  ENST ID: ENST00000374435
  CDS Start-End: 193-1518
gcctgtctccgcgtggtgcgagcgctgcaccagcccctggctggtggttactgtccgaacggcgtggtgtggtcgctgactctctgggcgtgcagctccgcagccctgccggctcggttcggttcgtgagcggccgggattgacttacgcaggattctcagcccttgcctgggagaacagttcaggagacagatggccccaagagcccagatccagggaccgctgacatttggggatgtggctgtggcctttacccggattgagtggagacacctggatgctgctcagcgggccctgtacagggatgtgatgctggagaactatgggaatctggtgtctgtggggcttctctcttccaaaccaaaactaattactcagttggagcaaggggcagagccctggactgaggtgcgagaggctccatcaggcacacatgcagtcgaggattactggtttgaaacaaagatgtcagccctaaagcaaagcacttctgaagcatctgttctgggagagcgaacgaaaagtgtcatgatggaaaaaggcctggactgggagggcagaagctccacagagaagaactataagtgcaaggaatgtgggaaagtcttcaaatacaattcgtcctttattagccaccagagaaatcacaccagtgagaaaccacataaatgtaaagaatgtgggatcgcctttatgaacagttcatcccttttaaatcaccataaggttcatgcaggcaaacagccttatagatgtattgaatgtgggaagttcctgaagaagcactcaacgtttatcaaccatcagagaattcattctagggagaaaccccacaaatgcattgaatgtggaaaaactttcagaaagaactcaatccttttaagtcatcagagaattcatactggccagaaaccctacaaatgtaatgactgtgggaaagccttcgctcagaatgcagctcttactcgtcatgaaagaatacatagtggagagaagccttttaaatgtaacaagtgtgggagagctttcagggataattcaactgtgttggaacatcagaaaatccatactggtgagaagccatatcagtgtaatgaatgtggaaaagcctttaggaagagctcaactcttattagtcaccaaagaatgcatactggggagaaaccctatcactgcagtaaatgtggaaaatctttcaggtatagctcatcctttgctggtcatcagaaaactcacagtggaaataaaccgtatcagtgtcgtgactgtgggaaggcctttacaaagagctcaacccttactggacatcagagaattcatactggagaaaaaccctatcactgtaagaaatgtgggaaagcctttcggcacagctcaggccttgttgaacatcagagactccatactggggaaaaaccttataaatgtaatgaatgtgggaaagcttttccccgaagttcagcccttaagcaacataagaaaattcataataaagaaagagccatgaaatgtagttagtgtggcaaattgtgcagagtagtttattccttctgaccatcatagaggagacattaaataaattatgcatttaacagaaatactctgtacttctgagagaacacatcacttgtgaggatattcattgtgaggttctactagtgaaatatttgaagaaactaaatgtatgtcagtatggaagtagttatagcatactgtgtgctaattgaaaagaatgaggtggagctgtaaatactgtacaaagccaggcatggtggcatatgcctgtagtcccagttacttgggaggctgagacaggattgcttaagcccaggagtttgagtctgtaatgcactatgattgtgcatgtgaatagccactgcactccagcctgggcaacatagcaagactccatctctaagtaaaaaaatacaacagtagaaatatacccatgataatatacccaatatacccttgttaaagaagcaagtttcaggaaatctatattatatgcattcaaaaagacctggacaaataaagaccaatcttaacagc

SEQ ID NO: 202677 - DNA, 529 bp, Homo sapiens
  Payload ID: 19969
  Gene Name: zinc finger protein 485
  ENST ID: ENST00000430885
  CDS Start-End: 178-529
cggtccagcctgtctccgcgtggtgcgagcgctgcaccagcccctggctggtggttactgtccgaacggcgtggtgtggtcgctgactctctgggcgtgcagctccgcagccctgccggctcgattgacttacgcaggattctcagcccttgcctgggagaacagttcaggagacagatggccccaagagcccagatccagggaccgctgacatttggggatgtggctgtggcctttacccggattgagtggagacacctggatgctgctcagcgggccctgtacagggatgtgatgctggagaactatgggaatctggtgtctgtggggcttctctcttccaaaccaaaactaattactcagttggagcaaggggcagagccctggactgaggtgcgagaggctccatcaggcacacatgcagtcgaggattactggtttgaaacaaagatgtcagccctaaagcaaagcacttctgaagcatctgttctgggagagcgaacgaaaagtgtcatgatggaaaaaggcc

SEQ ID NO: 202678 - DNA, 3837 bp, Homo sapiens
  Payload ID: 19970
  Gene Name: zinc finger protein 486
  Uniprot ID: Q96H40
  ENST ID: ENST00000335117
  CDS Start-End: 58-1449
agaggcccaccctctgtggccctgtgtcctgtaggtattgggagatccacagccaagatgccgggaccccttagaagcctagaaatggaatcattgcaatttagagatgtggctgtagaattctctctggaggagtggcattgcctggacactgcacagcagaatttatatagggatgtgatgttagagaactacagacacctggtcttccttggtattattgtctctaagccagacctgatcacctgtctggagcaaggaataaaacctctgactatgaagagacatgagatgattgccaaacccccagttgtgtgttctcattttgcccaagacctttggccagagcagagcataaaagattcttaccaaaaagtgatactgagaaaatttgaaaaatgtggacatggcaatttacactttaaaaaaggctgtgaaagtgtggatgagtgtaagttacacaaaagaggttataatggacttaaccaatgtttgacaactacccagagcaaaatatttcaatgtggtaaatatgtgaaagtctttcatcaattttcaaattcaaagagacataaaagaagacatactgaaaaaaaacctttgaaatatatagaaggtgacaaagcttttaaccagtcctcaacccatactacacataaaaaaattgatactggagagaaaccatacaaatgtgaagaatgtggcaaagccttcaaccggtcctcacaccttactacacataagataactcatactagagagaaaccctacaaatgtgaagaatgtggcaaagtctttaagtacttctctagctttactacacataagaaaattcatagtggagagaaaccctacatttgtgaagaatgtggcaaagcctttatgtacccctatacccttactacacataagataatccatactggagagcaaccctacaaatgtaaagaatgtgacaaagcttttaaccatcctgcaactctttcttcacataagaaaattcatactggagagaaaccgtacacgtgtgataaatgtggcaaagcctttatttcatcctcgatccttagtaaacatgagaagattcatacgggagagaaaccctacaaatgtgaagaatgtggcaaagccttcacccgctcctcacaccttactatgcataagataattcatactggagagaaaccatacaaatgtgaagaatgtggcaaagcctttacatggtctgcaggcctccataaacataggagaactcatactggagagaaaccctacaaatgtgaagaatgtggcaaagcgtatactacatcctcaaatctaactgaacataagacaactcatactggagagaaaccttacaaatgtaaagaatgtggcaaagcttttaactggtcctcagaccttaataaacataagagaattcatattggacagaaaccaagaacgtgacaaaggattattttattattattatttttttgagaggtaattctgctgttgtttcccaggctggagtgcaatggcataattttggctcaccacaacctccaccttctgggttcaagtaactctccttagtagctaggattacagggctgcaccaccacacctggctaattttgtatttttagtagagatggggtttctccatgttggtcaggctggtctcaatctcctaacctcaggtggtctgcctgctttggcctcccaaagtgttggggttacaggcatgagccactgtgcctggctgacaaagctttttaaggaagttctcaacccttattacacataattcatactggacagaaaccctacaagtgtgaagaatgtggcaagcctgtaacaagttctcaattcttttatttttatttgtttatttattttttgagatgcagtttcactcttgtgacccgggctgtagtgcaatggcatgatcttggcttactgtgacctctgcctcctgggttcaagccattctcctgcctcagcctcccaagtagctgggattacaggtgccaccaccattcccagctaatttttgtatttttagtagagatgggcttttgccatatttgccaggctggtctcaaactcctgacctcaggtgatccactcgcctcggcttcctaaagtgctgggatgacaggcatgagcctcaattcccagccataagctcttaattcttaagagacatggcgataattcatggtgaagaggaactttacaaacctgaaagatgtgacagtgcttttcccaacacctccaacttttctatgcataaaaaaaattatactacaccatagaaatgtatgaaatgtgacaaagcctttatatggttgccacactttattgtaggtaattcatacttccaaaatacctacaagtatgaagaatgtggcaaaacttttaatcagtgcttacaccgtatttcacaggaaagctattatccttgagaaaaattgtacaaatataaagaatatggaaaagccattaatgtccatcacatcttactcaacagaagaaggttcataaaagagcaattactgtgacaaaaatctttcagaaaatataagcctttaaggtgaagaagagtattgattctgaagacaagcattacaaatataaagaggtttgtagtacctttgcttgtattacagatcttattgcccgcgttttgtattagaaggaaaccctaaagcggttgccaaactttgtgcaacatcagggaatgtatattgaagaagattcctgcaaatgtaatgagtttggaaacacttcttagataaattatttgtggctgggcacagtggctcatgcctgtaatcccagcactttgggaggccaaggtgggaggatcacctgatgtcgggagtttgagatcagactgaccaaaacggagaaacccagtctctactgaaaatataaaattagccatgcatggtggcacatgcctgtaatcccagctactcaggaggcttgaaccctggaggcagaggttgtggtgagtcgagatcattgcactccagcctgggcaataagagtgaaactctgtctccaggaaaaaaaaaaatttatttgtgtataactttaaaagcagatttttggaagcattgtaattacattaaaagtatacttgttccagctgcgtgtggtggctcatgcctgtaatcccaacactttgggaggccaaggcaggtggatcacgaggtcaggagttcaagaccatcttggccaagatggtgaaaccctgtctgtactaaaaatacaaaaattagccatgcatggtggccggcgcgtataatcccagctgcttgggaggctgaggcagagaattggaattgcttgaacctgggaggtggaggttgcagtgagccgaggttgcaccattgtccagcctgggcaacagagcaagactccatctcaaaaaaaaaagtgtatttgtttccttaaaaaaatttttctgaaaagtgggtaatgacataatacagctttcaaattactttatgctgttattttattcttattgtattcacatgtgaaagcatgtgatcaatttttgctgcatcagagatattagagatagttttttattaattgggcatttatgaccttttctataaaagtaaggacattaaaatgtaagatgcatgatgaaaatataagtggagaggctctttgtagttaacctatatgaagtaatgtataaggtaggtcagagtaatacttttctacattatagtgcaagaaataattattgataaaagtatattaaactaaattcgtatattttacttattgtacttttatgtaataaaatgcagtgcatttaaaaattgt

SEQ ID NO: 202679 - DNA, 734 bp, Homo sapiens
  Payload ID: 19970
  Gene Name: zinc finger protein 486
  ENST ID: ENST00000597083
  CDS Start-End: 104-490
ctggagctctaggtcgcctcttcgctactctgtgtcctctgctcctagaggcccaccctctgtggccctgtgtcctgtaggtattgggagatccacagccaagatgccgggaccccttagaagcctagaaatggaatcattgcaatttagagatgtggctgtagaattctctctggaggagtggcattgcctggacactgcacagcagaatttatatagggatgtgatgttagagaactacagacacctggtcttccttggtattattgtctctaagccagacctgatcacctgtctggagcaaggaataaaacctctgactatgaagagacatgagatgattgccaaacccccagggccaggcatggttgtggctcccatctgtaatcccaggattttgggaggccaacacaggaggatccctggagcccaaaagtttgagaccagcctgggaaagatatggagacccctctttataaaaataatttaataattgccaggcatggtggtatgcagctgtggtacctgctacttgggagatggagggggagtcaaaattgtgccactacactccagcttgaatgacagagtgagaccctgtctccaaaaaacaaaaaaaagctgttcatttcaggcatgttaagtatattctcattgttatgtaaaatacttctagacactttacatcttgtaaaactaaaactcaatacccattaaataacaactgctcattt

SEQ ID NO: 202680 - DNA, 568 bp, Homo sapiens
  Payload ID: 19971
  Gene Name: zinc finger protein 487
  ENST ID: ENST00000315429
  CDS Start-End: 1-568
cgcggccccgcccccggacgcccagccgcggtcccagcgaccttcgctttcgtggggaagccggactgcgccgtgtcttcctgaagaaggctgggggatcagtgtccttcagtgatgtggctgtgggcttcacccaggaggagtggcagcatctggactctgctcagaggaccccgtacagagacatgatgctggagaactacagcctcctcctctcagtgggatattgcattaccaaaccagaggtggtttgcaagttggagcatggacaggtgctgtggatattagaggaagagtccccaagtcagagccacctagactgctgcatagatgatgacctgatggagaagagacaggaaaatcaagaccagcatttgcagaaagttgattttgtcaacaataaaacactgactatggacagaaatggtgtattaggaaaaacattttctcttgacacaaaccccattctatcaagaaaaatacgtggcaactgtgactcatctggaatgaatttgaataatatttcagaattaattattagtaatagaagctcctttgtaaggaaccc

SEQ ID NO: 202681 - DNA, 2111 bp, Homo sapiens
  Payload ID: 19971
  Gene Name: zinc finger protein 487
  Uniprot ID: B1APH4
  ENST ID: ENST00000437590
  CDS Start-End: 228-854
agtttccatggtgagatggtcaacaagcctgtaagttcctcagctacgactaccaggtacctcgggttcctccctcctccgagagaccgccgaggtgcgggctgtgagagggggagcgtggagcctccgaggccgagggatcagtgtccttcagtgatgtggctgtgggcttcacccaggaggagtggcagcatctggactctgctcagaggaccccgtacagagacatgatgctggagaactacagcctcctcctctcagtgggatattgcattaccaaaccagaggtggtttgcaagttggagcatggacaggtgctgtggatattagaggaagagtccccaagtcagagccacctagactgctgcatagatgatgacctgatggagaagagacaggaaaatcaagaccagcatttgcagaaagttgattttgtcaacaataaaacactgactatggacagaaatggtgtattaggaaaaacattttctcttgacacaaaccccattctatcaagaaaaatacgtggcaactgtgactcatctggaatgaatttgaataatatttcagaattaattattagtaatagaagctcctttgtaaggaaccctgctgagtgtaatgtacgtgggaaatttctcctctgtatgaagcgtgagaatccttatgccagagggaaacctttggaatatgatggaaatgggaaagccgtctctcagaatgaggacttatttaggcatcagtatattcaaactcttaagcagtgttttgaatacaatcagtgtgggaaggcttttcatgaagaggcagcctgcagtacccataagagagtgtgctcatgggagaccctgtgaatataatgaacatgtgagagccttttccgatagaccaatattcattgttcatcagagaactcacataaggaagagtcaccatgaattcaatgaatgtgagaggaggtctggtgagaggccacctgtaaataaacaccacagggttatggagatgaaatactatgagtgtaatgcgagtgagaatagttttggcaagaaatcactcctcattctacaaagttacagaggagagaaaacttgactgtagtagacatttggaagtattctgcaagaagccaaatttcactcaacatcaagaaacacatataggaaagaatgcctataaaattaatcagtatgctagtacattttgctgtaagccaaagcattctgtatatcagaaaacagatacagaagaaaaactctatgaatgtagtgaatgtgggaaaaccttcagccataaatcctcttttatcctacagcagaggatacacagaggagagaaaccctatgaatgcactgaatgtgggaaaacttttggatataggtcatgccttgcagtacatcaaagaacacacacgggacaaaacctatgaatgtaatgaatgtggaaaaaacttctgtgagaagtcaaatcttcatgtacatcagagaacacacacaggagagaaaccctatggatgtaatgaatgtcagaaagcctttggtgataggtcagctctaaaagtacatcagagaatacatactggcgagaaaccctatgagtgtaaggaatgtgggaaaactttctcccagaagccaaacttcattaatcatcagtgaactcacacaggagagagaccctttgaatgcaatgaatgtcaaaaatccttctctgtgaagtcaaaacttagagaacatcagagaattcacacaggggagaaaccctatgaatgtaatgaatgtgagaaaatgttctaccacaagtcatccctcacagtacatcagagaacccacacaggagagaaaccctatgcatgtagtgaatgtgggaaaaccttctaccagaagtcatccctcacaacacatcagagaacacacacaagggagcaaccctatgaatataatgaaagcttttaccagaatcccaacttcactaaatgtcagagagacaacatagaggaaacccttgtcaacatcctgaaggctcagaaaccttcaccttcttggactcgttccatagcagaaacaacccaggttggggtgagaacacccaataaagatgagaaatcttttgcc

SEQ ID NO: 202682 - DNA, 240 bp, Homo sapiens
  Payload ID: 19971
  Gene Name: zinc finger protein 487
  ENST ID: ENST00000451167
  CDS Start-End: 221-240
aagttcctcagctacgactaccaggtacctcgggttcctccctcctccgagagaccgccgaggtgcgggctgtgagagggggagcgtggagcctccgaggccgagaatgaaaacaaatgtactgttctagggatcagtgtccttcagtgatgtggctgtgggcttcacccaggaggagtggcagcatctggactctgctcagaggaccccgtacagagacatgatgctggagaactacag

SEQ ID NO: 202683 - DNA, 567 bp, Homo sapiens
  Payload ID: 19971
  Gene Name: zinc finger protein 487
  ENST ID: ENST00000456416
  CDS Start-End: 228-567
agtttccatggtgagatggtcaacaagcctgtaagttcctcagctacgactaccaggtacctcgggttcctccctcctccgagagaccgccgaggtgcgggctgtgagagggggagcgtggagcctccgaggccgagggatcagtgtccttcagtgatgtggctgtgggcttcacccaggaggagtggcagcatctggactctgctcagaggaccccgtacagagacatgatgctggagaactacagcctcctcctctcagtggactgctgcatagatgatgacctgatggagaagagacaggaaaatcaagaccagcatttgcagaaagttgattttgtcaacaataaaacactgactatggacagaaatggtgtattaggaaaaacattttctcttgacacaaaccccattctatcaagaaaaatacgtggcaactgtgactcatctggaatgaatttgaataatatttcagaattaattattagtaatagaagctcctttgtaaggaaccctgctgagtgtaatgtacgtgggaaatttctcctctgtatgaagcgtgagaatc

SEQ ID NO: 202684 - DNA, 3496 bp, Homo sapiens
  Payload ID: 19972
  Gene Name: zinc finger protein 488
  Uniprot ID: Q96MN9
  ENST ID: ENST00000585316
  CDS Start-End: 163-1185
ggaggaggctgtgctgcaccagcacctcttgctccacatctccagagagcccagggccctgtggccgagtgtgtccagcccagtgtcatggggagcttccatatctcatggctccttgctgggccaagccctccagaaccccaaacccccaaagactgatgaatgccagagtggccaccttgcttatctgtggccccggccctggtgatcaccatggcagctgggaagggagccccgttgagcccatcggctgaaaacagatggcgacttagcgaacctgagctgggccggggctgcaagccagtgctgctcgagaagacgaaccgcctgggccctgaggctgctgtgggcagggcgggccgggatgtgggcagtgcggagctggcactgttggtagccccaggcaagccccgacctggcaagccgctgcccccgaagacacgtggagagcagaggcagagcgccttcacggagctgccgaggatgaaggaccggcaggtggatgctcaggcccaggagagggagcacgatgaccccacaggccaacctggtgccccacagctgacccagaacatccccagaggcccagctggcagcaaagtcttctctgtgtggcccagcggagcacgaagtgagcaaagaagcgcctttagcaaaccaaccaagcgaccagcagagaggcctgagctaacctcagtcttccctgcaggggaatctgcagatgccctgggggagctgtctggactcctcaacactacagacctcgcttgttggggtcgactttcaactcccaagcttttggttggtgatttgtggaacttgcaagcattgccacagaatgctccactctgtagcacttttctgggtgcccctacactgtggctggagcatacccaggcccaggtgcccccaccctcatcatcctccaccacttcgtgggccctcctgccacccaccctcacctccctgggcttgtccacccagaactggtgtgcaaagtgcaacctgtcctttcgcctaacgtccgacctggtctttcacatgcgatcccaccacaaaaaggagcatgcggggcctgacccacattctcagaagcggagagaagaggcccttgcctgccctgtgtgccaggagcacttccgggagcgccaccacctctcccggcacatgacttctcacagctagcaggtgaccgcagaatgacctgctgggtgcagcagccagcctttggcagaggggggctccctgggcctgcgttgagggggctgtcatggtcctttgcagagctgctgcttttggcattcatagataaacagctcaggcataatttgaaaaagccacacctgcatgatgtgttttgaaggaaatgaagtcctgaaataaagtgatgggctttgcaaatccagggtagaggccctaacaggcacagagagcaggggcaactcctggcacacatcatgggctttggaggcacacaagcctggattcgaatctgggctctttcacatactagctgtgaccctggacaaagagctttaacctgctgagtccccattttctcatctgtgaaatggagatgataacactgtgtcttaggttggcattcaggtcacatgaaaggtgtgtggaaagtggccagcattctgcctgcagaccctgagcactgagtcaacaaggtttgtgatgatgtctgtactagttagctattgttattaacaagatctccatggcagacaagctaaagcatctgcctaagtcgtgagtctgtgggttggctcaggttaagctgagcttggctgggcttggcagcaagtctcagatttgatcaagtcatattcgttttcttcttcggctggtgggctacccagagcgagcacgcttctctcgtggtcatgccaagaacacaggagggtgagtctaacaagcacacctcaagcctctgcttgggtcacattgccaatgtcctctcagcccatacaagtggcaggaccaggcccaatattaaggagtggaaaagtgtaggctgcccttggtgaagctgtgacaagggagtgaccatccatcccctccacaggagggtgaggaattgggacaggtaattccagccaatacctggtccatagttcttcacattgtgagtatatgaatacggggaaatagaaccccctccccaccacctacacacatgctgttttaccttccaagaataggacatgtgcaaaaactaggcttccagatcgtgaggctggggagcattctaggtaccatttattatctactgcgtttcggtcagtagctgttgtaggtacccgcatcagcccttgttcctaaggatgtgtggagcccaggctgtactctttgacattccacaggtcagtctgcgtgaaagccctttgtggggagtttccaagccagtgtcgtttttgcactggtttccacctcactgtcagatattgttcttttgatatgcagtttccagccctccaatgagtccccagcacagatctcaggcttgtggctgggaataagcccagctgagcaggtggggatctcagccagcctcccagactgcacctcttctattgctctcctctgtccaccgttccaggcagcagcactcccacctggctgctctgatgtcctcgctccctccattcctgcctctcaccatgcacgcatccattgtccacacacacacaaccagataatcttctgaaagtgtaactcagatgatgcctccaaccctgtggctgcccttcacacttacaggcctaaccccagcaggacctgccagctgcttcatgaacaagtccctgcctcatgttaattgcaagcactcatttcactctccctgtgtgccaggcaatagcataagcactggaagaatacagatgttatagtgagtcctacaatagccctggaaggcaagagctgtttcctttccatttctacaatgagtcaattgcagatgatgctataacacttccagtgtttctgacacttccctgaagctatacctgctaccttcatgggccgagcttgcccttatgaggcccacaggtggcagtgggcagaggggaccccgctataccacctcgctgctgttccactgtctgctcccgtgttctgaccacagctctggtgccgtttctcaagcctgggcttcattcaacattttctatctagctcttcatggtgctgctcctgctatggttccacagggcttcttctcgcaggtcagctccttagagaggtctcccagattccccgtaaagcagccctgcagcctctgcctctctcagccgcatcaccctgttgcttccttcacagcatgtctcaccatctgcaaccatctttctgtttgtcgtcttgttgatttgctgcctccacactgtcagctccttgggaacagagattggtttgtttactgtgcatccctggtgcccagaacagggcatggcatattgttggtgcataataaatattgtggaaataa

SEQ ID NO: 202685 - DNA, 3372 bp, Homo sapiens
  Payload ID: 19972
  Gene Name: zinc finger protein 488
  Uniprot ID: Q96MN9
  ENST ID: ENST00000591025
  CDS Start-End: 366-1067
gctgcaccagcacctcttgctccacatctccagagagcccagggccctgtggccgagtgtgtccagcccagtgtcatggggagcttccatatctcatggctccttgctgggccaagccctccagaaccccaaacccccaaagactgatgaatgccagagtggccaccttgcttatctgtggccccggccctggtgatcaccatggcagctgggaagggagccccgttgagcccatcggctgaaaacagatggcgacttagcgaacctgagctgggccggggctgcaagccagtgctgctcgagaagacgaaccgcctgggccctgaggctgctgtgggcagagcgccttcacggagctgccgaggatgaaggaccggcaggtggatgctcaggcccaggagagggagcacgatgaccccacaggccaacctggtgccccacagctgacccagaacatccccagaggcccagctggcagcaaagtcttctctgtgtggcccagcggagcacgaagtgagcaaagaagcgcctttagcaaaccaaccaagcgaccagcagagaggcctgagctaacctcagtcttccctgcaggggaatctgcagatgccctgggggagctgtctggactcctcaacactacagacctcgcttgttggggtcgactttcaactcccaagcttttggttggtgatttgtggaacttgcaagcattgccacagaatgctccactctgtagcacttttctgggtgcccctacactgtggctggagcatacccaggcccaggtgcccccaccctcatcatcctccaccacttcgtgggccctcctgccacccaccctcacctccctgggcttgtccacccagaactggtgtgcaaagtgcaacctgtcctttcgcctaacgtccgacctggtctttcacatgcgatcccaccacaaaaaggagcatgcggggcctgacccacattctcagaagcggagagaagaggcccttgcctgccctgtgtgccaggagcacttccgggagcgccaccacctctcccggcacatgacttctcacagctagcaggtgaccgcagaatgacctgctgggtgcagcagccagcctttggcagaggggggctccctgggcctgcgttgagggggctgtcatggtcctttgcagagctgctgcttttggcattcatagataaacagctcaggcataatttgaaaaagccacacctgcatgatgtgttttgaaggaaatgaagtcctgaaataaagtgatgggctttgcaaatccagggtagaggccctaacaggcacagagagcaggggcaactcctggcacacatcatgggctttggaggcacacaagcctggattcgaatctgggctctttcacatactagctgtgaccctggacaaagagctttaacctgctgagtccccattttctcatctgtgaaatggagatgataacactgtgtcttaggttggcattcaggtcacatgaaaggtgtgtggaaagtggccagcattctgcctgcagaccctgagcactgagtcaacaaggtttgtgatgatgtctgtactagttagctattgttattaacaagatctccatggcagacaagctaaagcatctgcctaagtcgtgagtctgtgggttggctcaggttaagctgagcttggctgggcttggcagcaagtctcagatttgatcaagtcatattcgttttcttcttcggctggtgggctacccagagcgagcacgcttctctcgtggtcatgccaagaacacaggagggtgagtctaacaagcacacctcaagcctctgcttgggtcacattgccaatgtcctctcagcccatacaagtggcaggaccaggcccaatattaaggagtggaaaagtgtaggctgcccttggtgaagctgtgacaagggagtgaccatccatcccctccacaggagggtgaggaattgggacaggtaattccagccaatacctggtccatagttcttcacattgtgagtatatgaatacggggaaatagaaccccctccccaccacctacacacatgctgttttaccttccaagaataggacatgtgcaaaaactaggcttccagatcgtgaggctggggagcattctaggtaccatttattatctactgcgtttcggtcagtagctgttgtaggtacccgcatcagcccttgttcctaaggatgtgtggagcccaggctgtactctttgacattccacaggtcagtctgcgtgaaagccctttgtggggagtttccaagccagtgtcgtttttgcactggtttccacctcactgtcagatattgttcttttgatatgcagtttccagccctccaatgagtccccagcacagatctcaggcttgtggctgggaataagcccagctgagcaggtggggatctcagccagcctcccagactgcacctcttctattgctctcctctgtccaccgttccaggcagcagcactcccacctggctgctctgatgtcctcgctccctccattcctgcctctcaccatgcacgcatccattgtccacacacacacaaccagataatcttctgaaagtgtaactcagatgatgcctccaaccctgtggctgcccttcacacttacaggcctaaccccagcaggacctgccagctgcttcatgaacaagtccctgcctcatgttaattgcaagcactcatttcactctccctgtgtgccaggcaatagcataagcactggaagaatacagatgttatagtgagtcctacaatagccctggaaggcaagagctgtttcctttccatttctacaatgagtcaattgcagatgatgctataacacttccagtgtttctgacacttccctgaagctatacctgctaccttcatgggccgagcttgcccttatgaggcccacaggtggcagtgggcagaggggaccccgctataccacctcgctgctgttccactgtctgctcccgtgttctgaccacagctctggtgccgtttctcaagcctgggcttcattcaacattttctatctagctcttcatggtgctgctcctgctatggttccacagggcttcttctcgcaggtcagctccttagagaggtctcccagattccccgtaaagcagccctgcagcctctgcctctctcagccgcatcaccctgttgcttccttcacagcatgtctcaccatctgcaaccatctttctgtttgtcgtcttgttgatttgctgcctccacactgtcagctccttgggaacagagattggtttgtttactgtgcatccctggtgcccagaacagggcatggcatattgttggtgcataataaatattgtgg

SEQ ID NO: 202686 - DNA, 4237 bp, Homo sapiens
  Payload ID: 19973
  Gene Name: zinc finger protein 490
  Uniprot ID: Q9ULM2
  ENST ID: ENST00000311437
  CDS Start-End: 124-1713
cgcttccgccggtgggacggaactggtgccctccgtggacaattgtgttgaagcagaaattgttccggatctcgggtcggacacggaagtcttcctgcagtgtttctggatgcggggacagggatgcgcaggaattccagtctcagtttccagatggagcgacccctcgaggagcaagtccagagcaagtggtcgtctagtcaaggccgcacaggaacaggagggtctgatgtcctccagatgcagaacagtgaacaccatggacaaagcatcaagactcaaactgactccatctcccttgaggatgtggctgtgaacttcaccctggaggagtgggctttgctggatcctggccagaggaatatctacagagatgtgatgcgggcaaccttcaagaacctggcctgtataggggaaaaatggaaagaccaggatattgaagatgaacacaaaaaccagggaagaaatctaagaagtcctatggttgaagcactctgtgaaaataaagaagattgtccatgtggaaaaagcactagccagattcctgatcttaatacgaacctggaaactcctactggattaaaaccatgtgactgcagtgtgtgtggggaagtcttcatgcatcaggtctcccttaataggcacatgagatctcacactgaacagaaaccaaatgagtgtcacgaatatggagagaagccacataaatgcaaagaatgtgggaaaaccttcactcgcagctccagtattcgaacccatgaaagaattcacactggagagaaaccctatgaatgtaaggaatgtggcaaagccttcgcatttctcttttcctttcgaaaccatataagaattcatactggagagacaccctatgaatgtaaggaatgtgggaaggcattcagatatctcactgctcttcggcgccatgaaaaaaatcacactggagagaaaccctacaaatgtaaacagtgtggaaaagcctttatatattaccagccttttctaacccacgaaaggactcacactggagagaaaccttatgaatgtaagcaatgtgggaaagccttcagttgtcccacgtacttacggagtcatgagaaaactcatactggagagaaaccttttgtatgtagggaatgtgggagagccttcttttctcactcaagccttcgaaaacacgtgaaaacccacaccggagttcaaccttatacatgtaagaaatgtggggaagccttcaagtcatctagttcctgtgaagtgcacgaaagaactcattttggagaaaaaccctatgaatgtaaacaatgtggtaaagccttcaattcttcaagttaccttcagttgcacgaaagagttcacactggcgagaaaacttacgaatgtaaagaatgtggtaaagcctttctttattccactcactttcgaatccatgaaagaacccatactagagagaaaccctatgaatgcaaacagtgtggtcgggtcttcatttacttcagtcaccttcgaaggcacgaaagaagtcacactggagtgaaaccatgtgagtgtaagcagtgtggcaaagctttcacttgtttaaattccctgaaagtacacaaaagaattcatactggagaaagaccctttcagtgtagacaatgtggtaaagccttcagttactcaaagtctttgcacgtgcacgaaaggactcatagtagacagaagccctaagaaagtaaagtgtggtaatgctgtcagttgtattagttccttttggatgtatgagagtacttacgctggagagaaattcaaggaatgtaaacggtgtgattaagccttcagttgtcctaattccctttgaagacgtgactcatgcggcaatgaaatatttaacaaatgggggaggaacttgcactctcctgcgggattgcagatatgtgaatggactccatggacagaaaagctacgaatgtatggagtgtaggaaagccttcacttcacgtaatcttttaaagacacctgagaatatatactggagagaaactataaagaaaattctatatccatcccatcttttgtggggtttgttttttgtttttgtttttgttgagatgtaattttgctcttgttgcccaggctggagtgcagtggtgcgatcgcggctcaccgcaacctccgcctcccggattcaagcaattctcctgccgcagcctcccaagaagctgggattacaggcatgcgccaccacgcctggctaattttgtaattttagtagagatggggtttctccatgttggtcaggctggtctcaaactcctgacctcaggtgatctgcctgcctcggcctcccaaagtgctgggattacaggtgtgagccacagcacccaacctttttttccccgccgcaccccaagatggtgtctcactctgttgccccaggctggagtgcagtggtgtgatcctggctcactgtaacctctgggttcaagcaattcttctgcctcagccttccaagtagctgggattacaagtgcccaccaccatgcccagctaatttttatatttttagtagagacagtgtttcaccatgttgaccaggctgatcttaaactcttgacctcaaatgatccacccaccttggcctcccaaattgttcgttttacttttttttttttttttttttgagctggagtcttactctgttgcctaggctggagtgaaagtggcgcaacctctgcctcccaggtcaaagcaatcctgcctcaggccccctagtagctggcattacaggcacatgccaccacgcccaactaatttttatatttttagtagagacggggtttcaccatgttggccaggctggtcttgaactcctgacctcaggtaatccacctgccttggcctcccaaagtgctgggattacaggcgtgagccaccacacccggcccccagttctttttttttttttttgagacggagtccttgcccaggctggagtgcagtggcgcgatctcagctcactgcaagctccgcctcctgggttcacgccattctcctgcctcagcctcccgagtagctgggactacaggcgcccgccaccacgcccggctcattttttgtatttttagtggagacggggtttcaccgtgttagccaggatagtcttgatctcctgacctcgtgatccgccctcctcggcctcccaaagtgctgggattataggcgtgagccaccgcgcccggcctccagttcattttaaaaccatgaaaccacccacactggagagccaccttcttaaatgtaagcaatatgggaacatcttcaatgacatctgcaaccattgtcgagattcttcgtaggaagaattaaaggaatggggaagaaggacttgggccccagcaggccttttgtggcatccagtcagaagttaggaaacaccctctagggcagtgcctgccctcagctctcacacatgactggagagaagtgagaagactcccagaatctgccttttaagtttccatcagtgtcctcgggtcagactgtgggaatgctgtacttctaagacaaaggttcgcatcttacagtttttccccaagtgggatctgcctatgcacatcctaattcacagacattgtcagcattgcattattccagggctgttttgaggtcatctccagctccatttcccatctcaaacctacactttggacacttgtttaaacattcacatctgaatttctctgtggcaaccgcaggtggctctgaggtgagagactgaagaagcagagcctgtatcatgggacacacaccccttgaccacacagcatccactctcctgcggttaccagccctgcaccaaccaccacagtcagaataatctcaaaactgctagtggagtcacagacacactctgccatgtcttagctgtaggacactcagaattcttacctcccctaacttgctttccctgttttctggcacattctaccctgagatattcagcggcatatgcactgatgatgctccggccttctcacgtcagtgcatgtcacatgcatcctgctccaggactggtttcctagcctcccgctaagactagcacttagctcttcttggaaaaggacccaccctgcagcgctccagctctgttgtgtatgggaggtgctggtgtcagggttcacaagccatggaactaccttgcttcacatcacaaggcaaggtgaactcaactcccaataaactgcttgctgga

SEQ ID NO: 202687 - DNA, 996 bp, Homo sapiens
  Payload ID: 19973
  Gene Name: zinc finger protein 490
  ENST ID: ENST00000414906
  CDS Start-End: 124-306
cgcttccgccggtgggacggaactggtgccctccgtggacaattgtgttgaagcagaaattgttccggatctcgggtcggacacggaagtcttcctgcagtgtttctggatgcggggacagggatgcgcaggaattccagtctcagtttccagatggagcgacccctcgaggagcaagtccagagcaagtggtcgtctagtcaaggccgcacaggaacaggagggtctgatgtcctccagatttatggttacaaatgcacttgtgttacgtggatatatttcatagtggcgaagtctggcttttagtgcacccatcacccaaagagtgtatattgtacccaatagatgcagaacagtgaacaccatggacaaagcatcaagactcaaactgactccatctcccttgaggatgtggctgtgaacttcaccctggaggagtgggctttgctggatcctggccagaggaatatctacagagatgtgatgcgggcaaccttcaagaacctggcctgtataggggaaaaatggaaagaccaggatattgaagatgaacacaaaaaccagggaagaaatctaagaagtcctatggttgaagcactctgtgaaaataaagaagattgtccatgtggaaaaagcactagccagattcctgatcttaatacgaacctggaaactcctactggattaaaaccatgtgactgcagtgtgtgtggggaagtcttcatgcatcaggtctcccttaataggcacatgagatctcacactgaacagaaaccaaatgagtgtcacgaatatggagagaagccacataaatgcaaagaatgtgggaaaaccttcactcgcagctccagtattcgaacccatgaaagaattcacactggagagaaaccctatgaatgtaaggaatgtggcaaagccttcgcatttctcttttcctttcgaaaccatataagaattcatactggagagacaccctatgaatgtaaggaatgtggg

SEQ ID NO: 202688 - DNA, 553 bp, Homo sapiens
  Payload ID: 19973
  Gene Name: zinc finger protein 490
  ENST ID: ENST00000440366
  CDS Start-End: 161-553
agctctgaatgcgcgtgtgaacatccttattctagcggttcgctaggattgcgtcccagcctcggactgtctgtggctctgcgtatgctttgtctcactgggacctgcaggtagtgagggatccgtagggaggactcctggagcctccgtaagccgagaaatggactccatctcccttgaggatgtggctgtgaacttcaccctggaggagtgggctttgctggatcctggccagaggaatatctacagagatgtgatgcgggcaaccttcaagaacctggcctgtataggggaaaaatggaaagaccaggatattgaagatgaacacaaaaaccagggaagaaatctaagaagtcctatggttgaagcactctgtgaaaataaagaagattgtccatgtggaaaaagcactagccagattcctgatcttaatacgaacctggaaactcctactggattaaaaccatgtgactgcagtgtgtgtggggaagtcttcatgcatcaggtctcccttaataggcacatgagatctcacactgaacagaaaccaaat

SEQ ID NO: 202689 - DNA, 2471 bp, Homo sapiens
  Payload ID: 19974
  Gene Name: zinc finger protein 491
  Uniprot ID: Q8N8L2
  ENST ID: ENST00000323169
  CDS Start-End: 332-1645
aatccggggaagcagaaggccgcactcagagtctctgcactcctttgttgctggggtccgttgcgttctgcatccagtccttgctgctccgagaggccccaggtgcctccgccacggctcctgtgacgctgtcacctgcgctgtgacctgctccggagtcataaagaggacgccgggacaccaagaagcagggaaatggacccagtggcctttgaggatgtggctgtgaacttcacccaggaggagtgggccttgttgaatcctttccagaagatctctacagagatgtgatgcaggaaaccttcacgaacctcatctgtatagaaattttatgggagagagactctttgagagtgcagaaggtagtcagtgtggagaaactttcacccaggttccggaagacatgctgaacaagaaaactcttcctggagtaaaatcatgtgaaagtggtacatgtggagaaatcttcatgggatattcatcctttaataggaacatcagaactgacactggacaccaaccacataagtgtcagaaatttttagagaagccatataaacataaacaacgtaggaaagccttgagccatagccactgctttcgaacacatgaaaggcctcacactagagagaaaccttttgattgtaaggaatgtgaaaaatctttcatttctcctgcaagcattcgaagatatatggtaacgcacagtggagatggaccttataaatgtaagttttgtgggaaagccttggattgtctcagtttataccttacccatgaacgaactcacactggagagaaacgatatgaatgtaaacaatgtggtaaagccttcagttggcacagttctgttcgaatccatgaaagaactcacactggggagaagccatatgaatgtaaggagtgtgggaaatcattcaatttttccagttcctttcgcagacatgaaaggacacacacaggagagaagccgtacaaatgtaaggaatgtgggaaagccttcaattgtcccagttcttttcacaggcatgaaaggactcacacaggagaaaaaccctatgaatgtaaactatatgggaaagcattatctcgccttataagctttcgaagacacatgagaatgcacactggagagaggcctcataaatgtaagatatgtgggaaagccttttactctcccagttcatttcaaaggcatgaaagaagtcacactggagagaaaccctacaaatgcaagcaatgtgggaaagccttcacttgttccacttcgtttcaatatcatgaaaggactcacactggagagaaacccgatgggtgtaagcaatgtgggaaagccttcagatctgccaagtacattcgaatacatggaaggactcacactggtgagaaaccctatgaatgtaagcaatgtgggaaagcatttcattgtgtcagctcctttcatagacatgaaaggactcacgctggagaaaaaccttatgaatgtaagcattgtgggaaagccttcacttgttccatatatattagaatacatgaaagaattcacactggagagaaaccttaccaatgtaaggaatgtgggaaagccttcattcgttccagttactgtcgaaaacatgaaagaactcacactattaatatatgagagaaatgctattttttaatttttattttaatagagacagggtctcactatcttgtccaggttggtcttgaactcctggcctcaagcatccctcccagcttgaagtgtcaataaaggaaggcaataaaatgtagagatggagttaggtgatgccacgctgggattcactggtggcctatcttacatatgatttcgaaggcagacatgaggaaggccttagtcacattttagagccagccaaattcacatgggctgtgtggccccctgattctagcccattttcctgattctctggcttgtcaatcaagagtatcctccaaatctcttgactttccttttttcagaggtgtaggtttccaaagatgtccccagaagctccacattcaagttctatctacagtttggtttttctttaagtattgtaatgtacataccagagagataatgcagactgtcatgggtggggaatgttctctgatgctcaactcccctagtctgcagattgagttggtaggaggtgtgatttgtttacatgcacctttgttcctgctggtagtgaccttgttcttgattcagcctgacagctactatgctgccatcagaaccaacttgatgagagctctgctgccctgtgcagtgactggtctcatccaggactctcatgtgagaaggaacaccttgctctggtcaggaaatgtccagtgtttcctgttatccacaggagaatgtaatgcctcagttcattttcagttatctttgattatatgtgattgacaatgtgtatttttgagggagcaaagatttctgtacatatttcttaaaaata

SEQ ID NO: 202690 - DNA, 578 bp, Homo sapiens
  Payload ID: 19974
  Gene Name: zinc finger protein 491
  ENST ID: ENST00000450087
  CDS Start-End: 160-578
gttgctggggtccgttgcgttctgcatccagtccttgctgctccgagaggccccaggtgcctccgccacggctcctgtgacgctgtcacctgcgctgtgacctgctccggagtcataaagaggacgccgggacaccaagaagcagggaaatgaaattttatgggagagagactctttgagagtgcagaaggtagtcagtgtggagaaactttcacccaggttccggaagacatgctgaacaagaaaactcttcctggagtaaaatcatgtgaaagtggtacatgtggagaaatcttcatgggatattcatcctttaataggaacatcagaactgacactggacaccaaccacataagtgtcagaaatttttagagaagccatataaacataaacaacgtaggaaagccttgagccatagccactgctttcgaacacatgaaaggcctcacactagagagaaaccttttgattgtaaggaatgtgaaaaatctttcatttctcctgcaagcattcgaagatatatggtaacgcacagtggagatggaccttataaatgtaagttttgtgggaaagcctt

SEQ ID NO: 202691 - DNA, 4245 bp, Homo sapiens
  Payload ID: 19975
  Gene Name: zinc finger protein 492
  Uniprot ID: Q9P255
  ENST ID: ENST00000456783
  CDS Start-End: 245-1840
gtctttgtctctcgctgcagtcggagtatggtctagtgttcgctgttctgcgtcctctggtcctagaggcccatcctctgtggccctgtgacctgcaggtattgggagatccacagctaagacgctaggaccccctggaagcctagaaacgggagtgttgacatttagggatgtggccatagaattctctctggaggagtggcaatgcctggacaccgcacagcagaatttatataggaatgtgatgttagagaactacagaaacctggtcttcgtgggtattgctgcctctaagccagacctgatcacctgtctggagcaaggaaaagaaccttggaatgtgaagagacatgagatggtagctgaacccccagttgtatgttcttattttgcccgagacctttggccaaagcagggcaaaaaaaattatttccaaaaagtgatactgagaagatataaaaaatgtggatgtgaaaatttacagttaagaaaatactgtaaaagcatggatgagtgtaaggtgcacaaagaatgttacaatggacttaaccagtgtttgacgactacccagaacaaaatatttcaatgtgacaaatatgtgaaagtctttcataaattttcaaattcaaacagacatacgataagacatactggaaagaaatctttcaaatgtaaagaatgtgaaaagtcattttgcatgctttcacacttagctcaacataaaagaattcatagtggagagaaaccctacaaatgtaaagaatgtgggaaagcctataatgagacctcaaacctttctacacataaaagaattcatactggaaagaaaccctacaaatgcgaagagtgtggaaaagcctttaaccggctctcacaccttactacacataagataattcatactggaaagaaaccctacaaatgtgaggagtgtggcaaagcttttaaccaatctgcaaaccttactacacataagagaattcatactggagagaaaccctacaaatgtgaagaatgtggcagagcttttagccagtcctcaacccttactgcacataagataattcatgctggagagaaaccttacaaatgtgaagaatgtggcaaagcttttagccagtcctcaacccttactacacataagataattcatactggagagaaattctacaaatgtgaagaatgtggtaaggcctttagccagttatcccaccttactacacataagagaattcattctggagagaaaccctacaagtgtgaagaatgtggcaaagcttttaaacaatcctcaacccttactacacataagagaattcatgctggagagaaattctacaaatgtgaagtatgtagcaaagcctttagccggttctcacaccttactacacataagagaattcatactggagagaagccctacaaatgtgaagaatgtggcaaagcttttaacctatcgtcacaacttactacacataagataattcatactggagagaaaccctacaaatgtgaagaatgtggcaaagcttttaaccagtcctcaactctttctaaacataaggtaattcatactggagagaagccctacaaatatgaagaatgtggcaaagcttttaaccagtcctcacaccttactacacataagatgattcatactggagagaaaccctacaagtgtgaagaatgtggcaaagcctttaacaactcctctattcttaacagacataagatgattcatactggagagaaactctacaaacctgaaagttgtaacaatgcttgtgacaacattgcaaagatttccaaatataaaagaaattgtgctggtgagaaataatagaaatatgaatgtgacaaagcctttaaatggttatcacactggattgtaggtaaggtaattcattctggagaaaacttctacaagtgtgaatgaacagtgtggcaaaacttacacaatgctcaaaccttattgcacaggaaagcctttatacttgagaacaaatgtacaaatataaagaaagtaaaaaagtgattaatatctgtgcacatcttattcaacatcagagtttatattaatagcattaaaagtgcaattactgtcaaaagagttcaaaaaataagcatttaaagtgctgaagaggatttattttgaagacaaacattacaaatataaacgaagttgtggtaactttacttgtaacacagatcttgttgtattcattctgtattagagcaaaccctgaggcaattgctcaaactttgttcaacatcagagaatttatatcgaagaaaaaccctgtaaatgtaataaatttagaaaaaaacatttattcaaaaactacaggttagaaaattccagagagttcatattaaaatatttttgcatatacagtaaatagaaaaaaatatttaattcaatggtaagtttatgtaaatatcagagaatttatgttagaaatatataaggcaatgacacttcagactttacactgaatcagagttctgagtttagaaagtaatccaaaactaaacttggcagaaaaattatttgtttataactttaaaagagtagaagattttttggagagttacaagtatacttttttttagaaagattacagattttttttaaaagtaaataactctcaaattacttcatacaaataatgttgtaattaactcaaattacttcgtgttaatgttgtaattaactctcaaattacttcatgctaaggaaattagtttttctttttcttcttctttttttttttttttttagatggagtcttgctctatcgcccccccaggctggagtacagtggcacgatctcagctcactgcaacctccgtctccagggttcaagtgattctcctgcctcagcctcccaagtggctgggattacaggcgcaaaccaccatgcgtggctaaattttgtatttttaatagagccagggttttgccatgttggccaggctggtctcgaactcgagactttaggtgatccgcccagcttggcctcccgcaatgctgcaattacaggtgttagccactgcgcctgcctgatgttgtttctttattcctattgtattcatatgtgaaagcatgtgaccaaaagatatgaggattattttttattaggtgagcatttatgacctcttctatgaaagagtaaggacattaaaatgcatgatgaaaatctaagtaaagaggttctttgtgattcacttacagtactgagtgatgcatgaggtaggtgttctgagtaatattctgcattatattgagagacaaatttttagttttagttaaaattaaaaataaattagtatattattttactaattttacttttatgaaaatgcagtacatgttaaaaattttagattatgtgtgaacttaatttcttaattcaacatttttaacagtttaaatattgtgcattcaatcaagtcacattattccacttactttaacctagtccaccttactcaagggtgtaggtaaaaggtggtaacaaggccgggcacggtggctcacgcctgtaatcccagcactttgggaggcaaaggtgggtagatcacctgaggtcgggagttcaagaccagcctgaccaacatggagaaacgccatctctactaaaaatacaaaattagccaggcatggtggcgcatgcctgtaatcccagctactcgggaggctgaggcaggagaatcacttgaacccgggaagcagaggttgcggtgagccgagatcatgccatggcactccgtcctgggtgacaaagtgagactccctctcaaaaaataaataagtaaataaaataaatggtggtaacaatacactatttggtaaaagaatgcactaacatctgtagtactaatcttttttccagtggctttaaactgcaaataaggaatgttgtttctgtaggtaaaatttttatttattttttcccatttaaatttacttttgttagttttttcaggcatataatatttatgttatatatggcatattctgataagaggcatacaatatgtaataatcacattagggtaaatgaggtatccatcacctttagaatttattttttgtattatgaacagttcaattgtacagttttagtttttttaaaatatacgattgttattgactacagggttatttttataataaaaattatatacaagtataaaatttacacatttctgagtcctgaataaataaaaataatttcttgt

SEQ ID NO: 202692 - DNA, 1665 bp, Homo sapiens
  Payload ID: 19976
  Gene Name: zinc finger protein 493
  Uniprot ID: Q6ZR52
  ENST ID: ENST00000339914
  CDS Start-End: 83-394
ctccaggtctacccttcactgctctgtgtcctcagcgtgtgtggcttcgtgacctgaagatactgggaaatccatagctaagatgccaggaccccctgaaagcctagacatggggccgttgacatttagggatgtggccatagaattctctctggaggagtggcaatgcctggacactgctcagcaggatttgtataggaaagtgatgttagagaactacagaaacctggtcttcttggcaggtattgctgtctctaagccagatctggtcacctgtctggagcaaggaaaagatccctggaatatgaagggacacagtacggtagtcaaacccccagtagagacggggtttcaccgttttagccaggatggtctctatctcctgacctcgtgatccgcccgcctcagtctcccaaagtgctggtattacaggcgtgagccaccatgcccagcctaataaaaatttttttatttctattgtatccaatagcttgttttaagtgtgtagaacaataacttacacttttatgttaattttatattttgttaatttactgactgtattattagtttagacaaatttcaatgtactgtggttttttatgtgtaagattatatgttcctcaaacagcaactttttacttatttgtcttcagtttcaatggctttaaaaagaattcttttttcattattctgccacatgcttccagtgctatgttaaaatagaaacattgacaaagggcacaatagagtttactattggtgtctgtgaatttgaaatggcaaacaactccttaagtttttataagctgatttcaggaggtaaagatcttcttttcttgtgttccccagggttttgggatgccctctgggtttgtagtggagtggggttgtaacttggttgcaaggctgctggttctacattagggtccatatttagttgtcatgttacaagaggcttgggtagttgtacttcccaatttttttttttttttttttttttttttttgagacaggagtctcgctctgtcgcctggctggagtgcagtggtgtgatctcagctcatcaaaacttttgcctccctagttcaagcgattctcctacctcagcctcctgagtagctgggattacaggtgcccaccagcacgcccagctaattttttgtgtgtttttagtggagacggggtttcaccatgttggctaagctgggtctcgaactcctgacctcaggtgatccacccgccttggcctcctgggtgctgggattacagacgtgagccaccacccccggccacttgtttcttttaaatgcttattaaaagtttctcatcagaatattttatttataattatactgcatattctctgaaattttactgccaatttttcaaaatacctgcttttgatgagtacagttacagtcaaatactgtagttagacaaattcttttttaatggtatattaatgttgcataccaaattgtatgagttaaacgtctcttcctgtgcagtttcatattagtggtgttttcagtgtaggtatcttaatatcagcttatcgtggtttttggttatgtattataattttagtcaatttgcaattctgtctgtatactttatgtcaatgtgaggttgaattaaaagatagccatatgtctatcacaa

SEQ ID NO: 202693 - DNA, 4386 bp, Homo sapiens
  Payload ID: 19976
  Gene Name: zinc finger protein 493
  Uniprot ID: Q6ZR52
  ENST ID: ENST00000355504
  CDS Start-End: 267-2207
attgtttctctctgctgccggagctccaggtctacccttcactgctctgtgtcctcagcgtgtgtggcttcgtgacctgaagatactgggaaatccatagctaagatgccaggaccccctgaaagcctagacatgttatatgttctcattttgctgaagacttttgcccagggccaggcattaaagattcttttcaaaaagtgatactgagagaatatgtaaaatgtggacataaggatttacagttaagaaaaggatgtaaaagtatgaatgagtgtaatgtgcacaaagaaggttataatgaactaaaccagtatttgacaactacccagagcaaaatatttcaatgtgataaatatgtgaaagtctttcataaacttttaaattcaaatagacataacacaaaacatactggaaagaaacctttcaaatgtaaaaaatgtggcaaatcattttgcatgcttttacacctatgtcagcataaaagaattcatattagagagaattcttaccgatgtgaagaatgtggcaaagcctttatctggttttcaacccttactagacacaggagagttcatactggagagaaatcctacaaatatgaatgtggcaaatcttttaaccaggactcaaaccttactacacataagagaattcatactggacagaaaccctacaaatgtgaagaatgtggcacatctttctaccaattctcataccttactaggcataagctaattcatactagagagaaaccctataaatgtgaacaatatggcaaaacttttaaccaatcttcaacccttactggacataagataattcataatggagaaaaaccctataaatgtgaagaatgtggcaaagcctttagtattttctcaacccctactaaacataagataattcacactgaagagaaatcccacagatgtgaagaatattgcaaagcttataaggagtcctcacaccttactacacataaaagaattcatactggagagaaaccctacaaatgtgaagaatgtggcaaagcctttagtattttctcaacccttactaaacataagataattcacactgaagagaaatcccacagatgtgaagaatgtggcaaagcttataaggagtcttcacaccttactacacataaaagaattcatactggagagaaaccctacaaatgtgaagaatgtggcaaaacctttagtgtattctcaattcttactaaacataaaataattcatacagaagagaaaccctacaaatgtgaagaatgtggcaaagcttttaaacgatcttcaacccttactaaacataggataattcatactgaagagaaaccctacaaatgtgaagaatgtggcaaagcttttaaccaatcttcaacccttagtatacataaaataattcatactggagaaaaaccctacaaatgtgaagaatgtggcaaagcttttaaacgatcttcaacccttactatacataaaatgattcacactggagaaaaaccctacaaatgtgaagaatgtggcaaagcttttaatcggtcctcacaccttactacacataagagaattcatactggacacaaaccctacaaatgtaaagaatgtggcaaatcctttagtgtattctcaacccttactaaacacaagataattcatactgataagaaaccctacaaatgtgaagaatgtggcaaagcttttaaccgatcttcaatccttagtatacataagaaaattcatactggagaaaaaccctacaaatgtgaagaatgtggcaaagcttttaagcggtcctcacacctcgctgggcacaagcaaattcatagtgtacaaaaaccctacaaatgtgaagaatgtggcaaagcctttagtatattctcaacccttactaaacataagataattcatactgaagagaaaccctacaaatgtgaaaaatgtggcaaaactttctaccgattctcaaaccttaatacgcataagataattcatactggagagaaaccttgcaaatgtgaagaatgtggcaaagcttttaaccattcctcaaaccttattaaacataagctaattcatactggagacaaaccctacaaatgtgaagcatgtggcaaagcttttaggcggtcttcacatcttagtagacataagataattcatattggaattcatactgaagagactgtacaaaagtgaagaatgtggcaaaggcctttactgctcctattcccttactaaagaatgtggcaaagcttttcaccagtactttacccttaatacacataagataattaatgctggagagaaaccctacaaatgtgaagaatgtggcaaagatttctattgattctcataccttactaaatataagataattcatattggagagaaattctacagatgtgaagaatgtggcaaaggctttaattagttctcatcccttactaaacataagagaattcataccatagagaaatcctacaaatatgaagaatgtgacaaagcttttaaccacttctcaaccctgcctacacgtaagataattcatactggaaggaaaccctacaaatatgaggaatgtctcaaagctttttactgattcttataccttactaaacataaaataattcataaaggagataaattatacaaatgtgaagaatgtggcaaagcttttaacaaatcctcatccattagtaaacataagataattcatactggagagaaaacctacaaatgtgaggaatgtggcaaagcctttagcctgtccctccaatttactgcacataagataatttatactggagagaagccctacaaatgtgaaaaatgtggcaaaccttttaaccaatcctcaacccttactacacattagataattcatgctggagagaaaccctacaaatgtgaaaaatgtggcaaagcttttaaccaattttcaaaccttactaaacataagataactcatactggagaaaaatcttacaaatgtgaagaatgtggcaaagcctttatccagtcctcaactcctagtaaacataattaatgatggagagaaaccatacaactgtgaagaatgtggcaaagcttttaaccagtcctcaaactttattgaacaaaataattcatacaggagagaaaccctacaaatgtgaagaatgtgacaaagcctttaaccagtcctcaatttttactaaacataagaaaattcatactggagagaaaccctatgattgtgaaaaatatggcaaaggctttaactagtcctcagttcttaacacacatacgataattcttactgcagagaaactctacaaaccagtaagatgtgacagtgcttctgacaacatctcaaacttttctaatcataaaagaaatcatattggtgagaaatcctagaaatgtggagaatgtaacaaagtatttaaatggttgtcacacttgattataggtaatattcatattggaaaaatttcctacaagtaagaacaatgtggcaaagtttttaactaatacaccttattgcacagaaaatcatttatatttgagaaaaattgtagaaatatagactgtgaaaaagacgtcaatatctgctcacatcttactaaacaccagagagttcatgcttaataaaagcatgataagtgcaattactgccaaaagatctttcagaaaatattatcctttaaagtgaaggagagtatttatattaaagatgaacattacaaccataaagagggttgaagtacctttacttgtatcagatcttattgtccacattttgtactacagaaaaactctgaagaggtcactcaaactttgttcaacatcagggaatttatattggagagctgtcttgcaaatgtaataaatttgggaaaacaaattttcaaaaactacagcttagaaaacaccagagtttatacgaaaatatattttcaaaggtgtagtaaaaataaaaaaaattttaatccaaatttgtctatgtaaataccagaatttatagtagaaatatatgaggaagcgacacttcgaatattctactaaatgagagttctgagtatagaaaataaaactaaagttggtagaaaaattatttgtatataatgttaagaggagtaaaagattttttgtagaataataactatattcggattatactttgtttcttgaaaaaattacagattttttgaaaagcaaatgatgtaactcaactcattattttctgctgtttcttcattcttattcacttgtgaaagcttgtgatcatttgttgctgcatcagaggtatgagagattcttcttcattagatgggcattatttatgatcttttctatggatgagtaagaatattaaaatgtaagatgcatggtg

SEQ ID NO: 202694 - DNA, 5023 bp, Homo sapiens
  Payload ID: 19976
  Gene Name: zinc finger protein 493
  Uniprot ID: Q6ZR52
  ENST ID: ENST00000392288
  CDS Start-End: 110-2434
ggccattgtttctctctgctgccggagctccaggtctacccttcactgctctgtgtcctcagcgtgtgtggcttcgtgacctgaagatactgggaaatccatagctaagatgccaggaccccctgaaagcctagacatggggccgttgacatttagggatgtggccatagaattctctctggaggagtggcaatgcctggacactgctcagcaggatttgtataggaaagtgatgttagagaactacagaaacctggtcttcttgggtattgctgtctctaagccagatctggtcacctgtctggagcaaggaaaagatccctggaatatgaagggacacagtacggtagtcaaacccccagttatatgttctcattttgctgaagacttttgcccagggccaggcattaaagattcttttcaaaaagtgatactgagagaatatgtaaaatgtggacataaggatttacagttaagaaaaggatgtaaaagtatgaatgagtgtaatgtgcacaaagaaggttataatgaactaaaccagtatttgacaactacccagagcaaaatatttcaatgtgataaatatgtgaaagtctttcataaacttttaaattcaaatagacataacacaaaacatactggaaagaaacctttcaaatgtaaaaaatgtggcaaatcattttgcatgcttttacacctatgtcagcataaaagaattcatattagagagaattcttaccgatgtgaagaatgtggcaaagcctttatctggttttcaacccttactagacacaggagagttcatactggagagaaatcctacaaatatgaatgtggcaaatcttttaaccaggactcaaaccttactacacataagagaattcatactggacagaaaccctacaaatgtgaagaatgtggcacatctttctaccaattctcataccttactaggcataagctaattcatactagagagaaaccctataaatgtgaacaatatggcaaaacttttaaccaatcttcaacccttactggacataagataattcataatggagaaaaaccctataaatgtgaagaatgtggcaaagcctttagtattttctcaacccctactaaacataagataattcacactgaagagaaatcccacagatgtgaagaatattgcaaagcttataaggagtcctcacaccttactacacataaaagaattcatactggagagaaaccctacaaatgtgaagaatgtggcaaagcctttagtattttctcaacccttactaaacataagataattcacactgaagagaaatcccacagatgtgaagaatgtggcaaagcttataaggagtcttcacaccttactacacataaaagaattcatactggagagaaaccctacaaatgtgaagaatgtggcaaaacctttagtgtattctcaattcttactaaacataaaataattcatacagaagagaaaccctacaaatgtgaagaatgtggcaaagcttttaaacgatcttcaacccttactaaacataggataattcatactgaagagaaaccctacaaatgtgaagaatgtggcaaagcttttaaccaatcttcaacccttagtatacataaaataattcatactggagaaaaaccctacaaatgtgaagaatgtggcaaagcttttaaacgatcttcaacccttactatacataaaatgattcacactggagaaaaaccctacaaatgtgaagaatgtggcaaagcttttaatcggtcctcacaccttactacacataagagaattcatactggacacaaaccctacaaatgtaaagaatgtggcaaatcctttagtgtattctcaacccttactaaacacaagataattcatactgataagaaaccctacaaatgtgaagaatgtggcaaagcttttaaccgatcttcaatccttagtatacataagaaaattcatactggagaaaaaccctacaaatgtgaagaatgtggcaaagcttttaagcggtcctcacacctcgctgggcacaagcaaattcatagtgtacaaaaaccctacaaatgtgaagaatgtggcaaagcctttagtatattctcaacccttactaaacataagataattcatactgaagagaaaccctacaaatgtgaaaaatgtggcaaaactttctaccgattctcaaaccttaatacgcataagataattcatactggagagaaaccttgcaaatgtgaagaatgtggcaaagcttttaaccattcctcaaaccttattaaacataagctaattcatactggagacaaaccctacaaatgtgaagcatgtggcaaagcttttaggcggtcttcacatcttagtagacataagataattcatattggaattcatactgaagagactgtacaaaagtgaagaatgtggcaaaggcctttactgctcctattcccttactaaagaatgtggcaaagcttttcaccagtactttacccttaatacacataagataattaatgctggagagaaaccctacaaatgtgaagaatgtggcaaagatttctattgattctcataccttactaaatataagataattcatattggagagaaattctacagatgtgaagaatgtggcaaaggctttaattagttctcatcccttactaaacataagagaattcataccatagagaaatcctacaaatatgaagaatgtgacaaagcttttaaccacttctcaaccctgcctacacgtaagataattcatactggaaggaaaccctacaaatatgaggaatgtctcaaagctttttactgattcttataccttactaaacataaaataattcataaaggagataaattatacaaatgtgaagaatgtggcaaagcttttaacaaatcctcatccattagtaaacataagataattcatactggagagaaaacctacaaatgtgaggaatgtggcaaagcctttagcctgtccctccaatttactgcacataagataatttatactggagagaagccctacaaatgtgaaaaatgtggcaaaccttttaaccaatcctcaacccttactacacattagataattcatgctggagagaaaccctacaaatgtgaaaaatgtggcaaagcttttaaccaattttcaaaccttactaaacataagataactcatactggagaaaaatcttacaaatgtgaagaatgtggcaaagcctttatccagtcctcaactcctagtaaacataattaatgatggagagaaaccatacaactgtgaagaatgtggcaaagcttttaaccagtcctcaaactttattgaacaaaataattcatacaggagagaaaccctacaaatgtgaagaatgtgacaaagcctttaaccagtcctcaatttttactaaacataagaaaattcatactggagagaaaccctatgattgtgaaaaatatggcaaaggctttaactagtcctcagttcttaacacacatacgataattcttactgcagagaaactctacaaaccagtaagatgtgacagtgcttctgacaacatctcaaacttttctaatcataaaagaaatcatattggtgagaaatcctagaaatgtggagaatgtaacaaagtatttaaatggttgtcacacttgattataggtaatattcatattggaaaaatttcctacaagtaagaacaatgtggcaaagtttttaactaatacaccttattgcacagaaaatcatttatatttgagaaaaattgtagaaatatagactgtgaaaaagacgtcaatatctgctcacatcttactaaacaccagagagttcatgcttaataaaagcatgataagtgcaattactgccaaaagatctttcagaaaatattatcctttaaagtgaaggagagtatttatattaaagatgaacattacaaccataaagagggttgaagtacctttacttgtatcagatcttattgtccacattttgtactacagaaaaactctgaagaggtcactcaaactttgttcaacatcagggaatttatattggagagctgtcttgcaaatgtaataaatttgggaaaacaaattttcaaaaactacagcttagaaaacaccagagtttatacgaaaatatattttcaaaggtgtagtaaaaataaaaaaaattttaatccaaatttgtctatgtaaataccagaatttatagtagaaatatatgaggaagcgacacttcgaatattctactaaatgagagttctgagtatagaaaataaaactaaagttggtagaaaaattatttgtatataatgttaagaggagtaaaagattttttgtagaataataactatattcggattatactttgtttcttgaaaaaattacagattttttgaaaagcaaatgatgtaactcaactcattattttctgctgtttcttcattcttattcacttgtgaaagcttgtgatcatttgttgctgcatcagaggtatgagagattcttcttcattagatgggcattatttatgatcttttctatggatgagtaagaatattaaaatgtaagatgcatggtgaaaatctaagtggagaggttctttgtggttaacttatactattgagtgatgcacaaggtaggtgttaagagtaatattcttttgcattatgagaaaactagtatattattcatatattttactaattgtactttttttattatactttaagttttagggtacatgtgcacaatgtgcaggttagttacatatgtatacatgtgccatgctggtgcgctgcacccactaactcgtcatctagcattaggtatatctcccaatgctatccgtcccccctccccccaattgtacttttatataataaaatgcagtacattttaaaaaattttaaattctgtgtgaaggtaactgtttcaacatttttaacatggtaaatattattgtgcattcaataaagtgttgttatgcca

SEQ ID NO: 202695 - DNA, 496 bp, Homo sapiens
  Payload ID: 19976
  Gene Name: zinc finger protein 493
  ENST ID: ENST00000596815
  CDS Start-End: 106-252
attgtttctctctgctgccggagctccaggtctacccttcactgctctgtgtcctcagcgtgtgtggcttcgtgacctgaagatactgggaaatccatagctaagatgccaggaccccctgaaagcctagacatggtgagagtgctgggtccgacatcacgagagaggggaaggagttgctcggaaccggtgggaagtggctgtggcgggactcaggcctccccgcagtcagctccacaatctgctccctgagttctccttgcccagctcggcctcagtctccttcagccgggccgttgacatttagggatgtggccatagaattctctctggaggagtggcaatgcctggacactgctcagcaggatttgtataggaaagtgatgttagagaactacagaaacctggtcttcttggcaggtattgctgtctctaagccagatctggtcacctgtctggagcaaggaaaagatccctggaatatgaagggacacag

SEQ ID NO: 202696 - DNA, 546 bp, Homo sapiens
  Payload ID: 19976
  Gene Name: zinc finger protein 493
  ENST ID: ENST00000596302
  CDS Start-End: 120-407
gatgtggctgggccattgtttctctctgctgccggagctccaggtctacccttcactgctctgtgtcctcagcgtgtgtggcttcgtgacctgaagatactgggaaatccatagctaagatgccaggaccccctgaaagcctagacatggggccgttgacatttagggatgtggccatagaattctctctggaggagtggcaatgcctggacactgctcagcaggatttgtataggaaagtgatgttagagaactacagaaacctggtcttcttggcaggtattgctgtctctaagccagatctggtcacctgtctggagcaaggaaaagatccctggaatatgaagggacacagtacggtagtcaaacccccaggttttcttccgccatctgtgacagcttcttgatctgtcccaagttatatgttctcattttgctgaagacttttgcccagggccaggcattaaagattcttttcaaaaagtgatactgagagaatatgtaaaatgtggacataaggatttacagttaagaaaaggatgtaaa

SEQ ID NO: 202697 - DNA, 1536 bp, Homo sapiens
  Payload ID: 19976
  Gene Name: zinc finger protein 493
  ENST ID: ENST00000594390
  CDS Start-End: 106-390
attgtttctctctgctgccggagctccaggtctacccttcactgctctgtgtcctcagcgtgtgtggcttcgtgacctgaagatactgggaaatccatagctaagatgccaggaccccctgaaagcctagacatggggccgttgacatttagggatgtggccatagaattctctctggaggagtggcaatgcctggacactgctcagcaggatttgtataggaaagtgatgttagagaactacagaaacctggtcttcttgggtattgctgtctctaagccagatctggtcacctgtctggagcaaggaaaagatccctggaatatgaagggacacagtacggtagtcaaacccccaggttttcttccgccatctgtgacagcttcttgatctgtcccaaggtgggtggctgtgttcgacgtgtgttgcttgtgacgcttggggttgtcctcagcatcaatcttgacatggctgcaacgagggggtcctcgggatcctcccagaatctcttcctcagcatctggctcatgataaagtttcaggtatcttgatggtatccaaatcagctgttgattttggcctggaggaacacaagcataatctctaccccaagttattttacccatttgccaactttttgttattggatctctccaccaaatcagttgttctgcttctctctttgcagctggtttctgtacatgctgttcagctgctgataacatctggcctttgggcaggctcaaaaaatttaaagttaataatgctagattcaggagcatctgtggggttacatattgtctatttccccccgtctccttctgcaactgctgttttagggagagattcattctttccactatggcttgtccttgagaattgtatgggataccggtaatgtgtttaatattccacacagagaaaaatgtagctagagcttggctagtatagcctggggcattatctgttttaatagaagctggaatgcccaccaccacaaaacactgcaaaaggtgatgtttaactaacacaggcagaagactctcctgattggcatgtagcccagacaaagtaagaaaaggtgtccacacatacatgtatataagctagtctcccaaatgagggaacatgtgtgacatccatttgccaaatagagttaggttccaatcctcgaggattaacccctcctgtaaaagatgaggaatgtaccatttggcaagttgggcattgctggataatagctttagcttctttccaggtaatgctgtatctgcatttgagactagaggcattaacatgggttaaattgtgaaagtgtctagcattagatattgcgttagcaactaggcaatcggccatttgattcccttcagtcaaaggtcctggaagaggtgtatgagcgagccctaatgtgagtgatgtaaaaaggatgcattgtactcctaactgctatttgcaattgggtaaataaagtgatcagttgttcatctgtatgaaatcgtaactgagcattttcaataaactgtgtggaatgaa

SEQ ID NO: 202698 - DNA, 1769 bp, Homo sapiens
  Payload ID: 19976
  Gene Name: zinc finger protein 493
  ENST ID: ENST00000599461
  CDS Start-End: 73-219
acccttcactgctctgtgtcctcagcgtgtgtggcttcgtgacctgaagatactgggaaatccatagctaagatgccaggaccccctgaaagcctagacatggtgagagtgctgggtccgacatcacgagagaggggaaggagttgctcggaaccggtgggaagtggctgtggcgggactcaggcctccccgcagtcagctccacaatctgctccctgagttctccttgcccagctcggcctcagtctccttcagccgtaagttggcggctgcgccaacagccggggccccgggcgtcctgtctcttccctgcactgtgactgtgccctgcctggagtcctctctggcagttctgcacccgcagcgccgcgtctttctcagattgtgcggggaccacgggagggtcatcaggggagaatcctgacttggggtgcgggttcatgaatgggaagagctttggtccgtggggttcccagttgctattttctcctattaaaaatttatgggcgtcactgcaaaaatattaaagaatgtaatcaaagagtggttctagaattgtagagcacccagctatggtttgtagtttgtggtctgtgggagaggcttgaaggaaagtcttttataaaatgcatgatgaagaaaccaaatttactaattggttaggtacagttacatggtttcttaatatgtgcgttaaaggtgaaaatttcctggttatgtaatcagagcttaattggcagtttacagttgctgaagcctgaattttgtttctctgaatgtagtaattaaaaataatgcacctgagttagattttttttttaaagtaagaattcagggactagaaatacctcagtctaattgcctgccacttaattattttcacactccacagggaactgattttctgctgtatttttcacctgtgtcccaagcagagtcttggaaccaatcccccatttctccggcctcactctggcttgcagtaagataatttccagtttcctctgacgttcctaaatgccaccttttcctccctaattcacattatcgcctatttgtcttttactgtacttttttataccatattttaattatttttttggcaaagcattaaatggttaaatggtgcatttaaagagatttgttatctgtttgtaaatatttcccatgaaaagaaggcaaataataataccctgacactgcattgtagtaaatctctgtctcttttgctttcatcttgtctaggcacagagatgttaccagaatgtttttgggtcgaagttctcctttggaaaatctatggggtgatgtgtcctcagccaccctttggttttttcctggtcatgggtttcagtactatctggggataaaccaagataactgccatggttatgttagctagagtgtccattggatctcagcttctggtttattttctcccataagatgacctgaggtatggagtgtatcctctcaagggagcaagtggatattctggggctgaggggaatcttccggtgtactcttattttgaaacgggtaaccctttgaaatgttaaaattgccttccctcaaccaggcttccatttcttggagacaaattgctggtcagccaatcagatgctggtaatgaggggaaaacacagaaataatttctgccccctggattctctaagggggcagaaaaatagtgaaattaatatagtaaaagaaaaagagtaaaaaaaaaaaagtgaaaaatttgtggcccaaaaaatagtatcccaaaa

SEQ ID NO: 202699 - DNA, 5336 bp, Homo sapiens
  Payload ID: 19977
  Gene Name: zinc finger protein 496
  Uniprot ID: Q96IT1
  ENST ID: ENST00000294753
  CDS Start-End: 466-2229
ggcccgcgcccggcctccgcggcgccgcctcccagcccagagcccagcgctcaggaaggtgcgggcgggggagaaagcaacaccattgtttttcaggcgcctccatttgcccccgagccgagccgtggctttccggatgatcgggagacgcggtctggacgggccgggaaaggagccgggcgcctgcggagaccccgcctcagcgagtacgcccggccgggcgggctgggaggatgaggacggctgccctggacttccgccgccacaggagggttttcggccggacgccgggagggagctccaggctgtgagctccatttgtaaaggtcttaataacaagaacagtgacttcggctccggagcttcaagatagtggcctgcttggcctgcccatctcggatctctccaggaggacccagccacccaagggtcgtcttctgctgctgacccccatcaaatcccatcatgcccacagccctgtgcccccgagtcttggctccgaaggaaagtgaggagcccaggaaaatgaggagcccacctggagagaaccctagcccccagggggagcttcccagccccgagtcctctcggcgtctcttccgccgtttccgctaccaggaggcggcgggcccccgggaggccctgcagcgcctctgggacctgtgcgggggctggctgcggcctgagaggcacaccaaggagcagattctggagctgctggtgctggagcagttcctggccatcctgccccgggagatccagagctgggtgcgggcgcaggagcctgagagcggagagcaggctgtggccgcggtggaggcactggaacgggagcccgggagaccctggcagtggctcaagcactgtgaagaccctgtggtgattgatgatggggacagccctctggaccaggagcaggagcagctgccggtagagccccacagcgaccttgcaaagaaccaggatgcccagcccataaccctggcacagtgcctggggctcccaagcagaccaccaagccagctcagcggggacccagttctgcaagatgctttccttcttcaggaagagaatgtgcgggacacacagcaggtgaccaccctccagctacccccgagtcgggtttctccattcaaggacatgattttatgcttctctgaagaggattggtcccttctagatcctgcccagactggcttctatggagagttcatcattggggaggattacggggtctcaatgcctccaaacgacctagctgcccagccagatctctcccagggagaggagaatgagccacgcgttccagagttgcaggatctccagggcaaagaagtgccccaggtctcctacttggactctccaagtctccagccattccaggtagaagaaagaaggaaacgtgaggagctgcaggtgccagagttccaggcctgcccacagacggtggtgcctcaaaacacctacccagctggcggcaacccgcgatctctagagaacagcctggatgaagaagtgaccatcgagatcgttctctccagctctggggacgaggactcccagcatggcccgtactgcacagaagagctggggagccccacagagaagcagcgcagcctccccgcctcccaccggagcagcaccgaggccggaggcgaggtgcagacctccaagaagtcctacgtgtgtccgaactgtgggaaaatcttccgctggagggtcaacttcatccggcatctgcggagccgcagggagcaggagaagccgcacgagtgctcggtgtgcggggagctgttcagcgacagcgaggacctggatgggcacctagagagccacgaggcccagaagccttaccggtgtggtgcctgcgggaagagcttccgcctgaactcccacctgctctcccaccggcggatacacctgcagccggacagactccagccggtggagaagagagagcaggcggcatccgaggacgcggacaagggtcccaaagagccgctggaaaacggcaaggccaaactgagcttccagtgctgtgagtgtgggaaggccttccagcggcacgaccacctggctcggcaccgcagccactttcacctgaaggacaaagcccggcccttccagtgccggtactgcgtcaagagcttcacgcagaactatgacctcctccgccacgagcgcctgcacatgaagcgccgttccaagcaggctctgaactcctactgagcctctccgcctggggcggcctcaccctggctggtgctgccccctcaccttggtactgatcagcgcccccacccaggacataccttccccaggatagagagcacacctccctcctgtccttgctctcaggtagtgagcgttcgggtggtgccatgggagcactctccctcccccaggtaatgaaagagtggccaagtgagtgttctgtttctgctgtgccaaaaaacgggggggatgtgccatcaccaggttggacatgccaggtgttctgcgtcttagagacccttggcccatgctccccaagctcggggagtaaaactgggctatcccccgtcagggcggcaccctggtcaccagccaaacctcagtatactccctcccctccttccctgtctgaacgctaggatctgctcctgaagctccaggatgcctgcacttccactgagaagctgctggcggatgttggactagaggaaagaagaaggcagggtgggactgatgggctcagtggggagcagggccaggcacactgagccagacatgtcatgtctgagccccagattcgtggccatcaggtaggcaggagcaccccgcagatccaagatgatcaggcagcccttttgggctggcctctgtggcaggggtctgcagagctccttcttgaggtttggaaacagtcgtcatacctgttgattttcctgggggccaatcactagggatctggagctcaccaaaaacaaagcttacattttaatttgtgttgcacacctaccccataatgtctttataccccaaagatccttggtaaatgcttgtgggttggaagcggagttgtcatcgtttaaaaggcacttaagtcccttcttccaatctgtcctgtctaggaatgtggagctctgcccccagtgaggggttctcctgtctgggtgagccaagctccagaacagaaccttgcctgacaacacacttgatagatacattagcttggagtgctggtgtgtccaaacactggctggcttagaacaacaggagtgtattccctgacagttctgggaggtgcacgtccaagatcagggtgtcctcagagttggtgccttccgagagctgtgagggagaagcggcttcatgcctttgctggcagttgccattccttggtgtgtggaagcgtcacccagtctctgccttcatctccacatggcactcttgctgtgtgcgtgtctgtctccaaacctccctttgtttaaggacaccagtcatatcggattagagcccatcccaccgactccagtataacctcatctgtatccgcagcaaccgtttaccaataaggtcacattctgaggtactagaggttgggacttcaacatcggaatttgaaagggacagcattcagcccatgactccagataaacgtgaggtatgctatatcattcctaatttacagatgagtcaatacaaacttgagtgagcttgctcacaattccatcaaaggcagggttcagacccaagtttcagcatttagggcaggtgtcctctgcatggaagaatcatactcaatagccgtaaacgctgacaaattccccttcctccctgccttctgatgggggctgggcaggccagctggagctgtgtctcctgctgggattccggactgagagtgacagcaggtagtgaaacctcaagcaatttaaaacatggtattgttcctggaagactggttatgttggctagggtcagcaagagagggcatcaaggctgtagtctagcagtgatttaatctgcaagtcaaaccagacgggtattttgtattattcatatgtcacatcctaccaacagacagtaagtcaggcaaggctcctggtgctccttgtcactcacgtaattttcacatcaggaaaactctgggctgggtgcagtggctcacacctgtaatcctagcactttgggaaaccaaggtgggtggattgcctagctcagtgacaccagcctgggccacatggcaaaaccccgtctgtaccaaaaatgcaaaaaattagctgggtgtggtgttgacgtttgcggtcccagctactctggaggctgaggtgggaggattgcttgagtctgggaggcagaagttgcagtaagccgagatcatgccactgcacaagctaggtgacagaatgagactctgtctcaaaaataattaaaaagcctctgccccaaactcgttaaaagattttataaccacaactgctgtttctgtgtagatgcatctgcatgcccaggagcagtaaatgcaataaaatcatttggttatactttgaacacaaaataaacggttgaggcttttactttctaaatagtttgtctcttgtatcaacatagctggaaaagggagaaatccgatttttaaggccaagggaggggaaaattccaagtagaagccaggctctctgtacacgtttaccccacctacctgtgtgctcctacctgtgctgaggattctctctgtagctctaaggtcttgggaaggttattcaccttcctgcttcagacgtctgactcaagagaagaacactgttctacttaccagagtgtttttctgtgtaaaaccacatcatgaaggagaaagcgacaaagggaatgtgaggggctggaagccacagggaggctgtctcttgagtccccaccactgatccagagccaaccaaggcacctcaggaaatggaaggccacattgcctctggatttggaaatcctcctgggtaatgtaactgaaacccaggttgatgccatgcagcaggagcagcagggggaacgtgctctcaggagaggtcggccaaccctccagcccaacacccttcaccacagtggtggaggaggctgcacccaggagatctttgtctcccttttggccactgatacctttggccttatctgacaacagctacccctcgatccttccctcccaccccaggggctgggcagctggctggagctttgtgtccaccttgctctggaggttgagacccccatctgagcaacatcctctctctttgttcctctgatcccttggcatcgtcacaaacccacaggtgcataataaaaacttgctgagtcaatat

SEQ ID NO: 202700 - DNA, 3857 bp, Homo sapiens
  Payload ID: 19977
  Gene Name: zinc finger protein 496
  ENST ID: ENST00000461277
  CDS Start-End: 1-1539
caggctgtggccgcggtggaggcactggaacgggagcccgggagaccctggcagtggctcaagcactgtgaagaccctgtggtgattgatgatggggacagccctctggaccaggagcaggagcagctgccggtagagccccacagcgaccttgcaaagaaccaggatgcccagcccataaccctggcacagtgcctggggctcccaagcagaccaccaagccagctcagcggggacccagttctgcaagatgctttccttcttcaggaagagaatgtgcgggacacacagcaggtgaccaccctccagctacccccgagaatttttcaatttaataatcatcgcagcaatggttatattttagaaatgttaggaagtggagggaagaaagcacagataatttcagtcctgtcacagatctacgtgagtcgggtttctccattcaaggacatgattttatgcttctctgaagaggattggtcccttctagatcctgcccagactggcttctatggagagttcatcattggggaggattacggggtctcaatgcctccaaacgacctagctgcccagccagatctctcccagggagaggagaatgagccacgcgttccagagttgcaggatctccagggcaaagaagtgccccaggtctcctacttggactctccaagtctccagccattccaggtagaagaaagaaggaaacgtgaggagctgcaggtgccagagttccaggcctgcccacagacggtggtgcctcaaaacacctacccagctggcggcaacccgcgatctctagagaacagcctggatgaagaagtgaccatcgagatcgttctctccagctctggggacgaggactcccagcatggcccgtactgcacagaagagctggggagccccacagagaagcagcgcagcctccccgcctcccaccggagcagcaccgaggccggaggcgaggtgcagacctccaagaagtcctacgtgtgtccgaactgtgggaaaatcttccgctggagggtcaacttcatccggcatctgcggagccgcagggagcaggagaagccgcacgagtgctcggtgtgcggggagctgttcagcgacagcgaggacctggatgggcacctagagagccacgaggcccagaagccttaccggtgtggtgcctgcgggaagagcttccgcctgaactcccacctgctctcccaccggcggatacacctgcagccggacagactccagccggtggagaagagagagcaggcggcatccgaggacgcggacaagggtcccaaagagccgctggaaaacggcaaggccaaactgagcttccagtgctgtgagtgtgggaaggccttccagcggcacgaccacctggctcggcaccgcagccactttcacctgaaggacaaagcccggcccttccagtgccggtactgcgtcaagagcttcacgcagaactatgacctcctccgccacgagcgcctgcacatgaagcgccgttccaagcaggctctgaactcctactgagcctctccgcctggggcggcctcaccctggctggtgctgccccctcaccttggtactgatcagcgcccccacccaggacataccttccccaggatagagagcacacctccctcctgtccttgctctcaggtagtgagcgttcgggtggtgccatgggagcactctccctcccccaggtaatgaaagagtggccaagtgagtgttctgtttctgctgtgccaaaaaacgggggggatgtgccatcaccaggttggacatgccaggtgttctgcgtcttagagacccttggcccatgctccccaagctcggggagtaaaactgggctatcccccgtcagggcggcaccctggtcaccagccaaacctcagtatactccctcccctccttccctgtctgaacgctaggatctgctcctgaagctccaggatgcctgcacttccactgagaagctgctggcggatgttggactagaggaaagaagaaggcagggtgggactgatgggctcagtggggagcagggccaggcacactgagccagacatgtcatgtctgagccccagattcgtggccatcaggtaggcaggagcaccccgcagatccaagatgatcaggcagcccttttgggctggcctctgtggcaggggtctgcagagctccttcttgaggtttggaaacagtcgtcatacctgttgattttcctgggggccaatcactagggatctggagctcaccaaaaacaaagcttacattttaatttgtgttgcacacctaccccataatgtctttataccccaaagatccttggtaaatgcttgtgggttggaagcggagttgtcatcgtttaaaaggcacttaagtcccttcttccaatctgtcctgtctaggaatgtggagctctgcccccagtgaggggttctcctgtctgggtgagccaagctccagaacagaaccttgcctgacaacacacttgatagatacattagcttggagtgctggtgtgtccaaacactggctggcttagaacaacaggagtgtattccctgacagttctgggaggtgcacgtccaagatcagggtgtcctcagagttggtgccttccgagagctgtgagggagaagcggcttcatgcctttgctggcagttgccattccttggtgtgtggaagcgtcacccagtctctgccttcatctccacatggcactcttgctgtgtgcgtgtctgtctccaaacctccctttgtttaaggacaccagtcatatcggattagagcccatcccaccgactccagtataacctcatctgtatccgcagcaaccgtttaccaataaggtcacattctgaggtactagaggttgggacttcaacatcggaatttgaaagggacagcattcagcccatgactccagataaacgtgaggtatgctatatcattcctaatttacagatgagtcaatacaaacttgagtgagcttgctcacaattccatcaaaggcagggttcagacccaagtttcagcatttagggcaggtgtcctctgcatggaagaatcatactcaatagccgtaaacgctgacaaattccccttcctccctgccttctgatgggggctgggcaggccagctggagctgtgtctcctgctgggattccggactgagagtgacagcaggtagtgaaacctcaagcaatttaaaacatggtattgttcctggaagactggttatgttggctagggtcagcaagagagggcatcaaggctgtagtctagcagtgatttaatctgcaagtcaaaccagacgggtattttgtattattcatatgtcacatcctaccaacagacagtaagtcaggcaaggctcctggtgctccttgtcactcacgtaattttcacatcaggaaaactctgggctgggtgcagtggctcacacctgtaatcctagcactttgggaaaccaaggtgggtggattgcctagctcagtgacaccagcctgggccacatggcaaaaccccgtctgtaccaaaaatgcaaaaaattagctgggtgtggtgttgacgtttgcggtcccagctactctggaggctgaggtgggaggattgcttgagtctgggaggcagaagttgcagtaagccgagatcatgccactgcacaagctaggtgacagaatgagactctgtctcaaaaataattaaaaagcctctgccccaaactcgttaaaagattttataaccacaactgctgtttctgtgtagatgcatctgcatgcccaggagcagtaaatgcaataaaatcatttggttatactttgaacacaaaataaa

SEQ ID NO: 202701 - DNA, 3468 bp, Homo sapiens
  Payload ID: 19978
  Gene Name: zinc finger protein 497
  Uniprot ID: Q6ZNH5
  ENST ID: ENST00000311044
  CDS Start-End: 190-1686
accattccacgcggctcgagcccgcgtgcgggcctctttcaggccgctcctagtggacgcagaggcgggccgaggacggtgccagcccccaggccccaagaggagctggtccccaggacagaggagggagaggagcaagaggctcccctgggccccttccaggccccacctccaggtcacaggcgcgagatggagtccccaagagggtggaccctgcaggtggccccagaggaaggccaggtcctctgcaatgtgaagactgccacgaggggcctctctgagggggctgtgtctggaggctggggggcctgggaaaactccacggaggttccgagggaggcaggggacggccagcggcagcaagccacactgggggcggcggacgaacagggaggccccggcagggagctgggccccgcagacggtgggcgggacggggctgggcccaggagcgagcctgcagaccgggcgttgcgcccttcgcctctcccagaggagccgggctgccggtgcggggagtgcggcaaggcgttcagccagggctcttacttgctgcagcatcggcgcgtgcacacaggcgagaagccgtacacgtgccccgagtgcggcaaggccttcgcctggagctccaacctcagccagcaccagcgcatccacagcggcgagaagccctacgcttgcagggagtgcggcaaggccttccgcgcgcactcgcagctcatccaccaccaggagacacacagcggcctgaagcccttccgctgcccggactgcggcaagtccttcggccgaagcaccacgctggtgcagcaccgacgcacgcacacgggcgagaagccctacgagtgcccggagtgcggcaaggccttcagctggaactccaatttcctggagcaccggcgcgtgcacacgggcgcgcggccgcacgcctgccgggactgtggcaaggccttcagccagagctccaacctggccgagcacctgaagatccacgcgggcgcacggccacacgcctgtcccgactgcggcaaggccttcgtgcgtgtggcggggctgcggcagcaccggcgcacgcacagcagcgagaagcccttcccctgcgccgagtgcggaaaggctttccgcgagagctcgcagctcctgcagcaccagcgcacgcacactggtgagcggcccttcgagtgcgccgagtgcggccaggctttcgtcatgggctcctacctggcggagcaccggcgcgtgcacacgggcgagaagcctcatgcgtgcgcccagtgcggcaaggccttcagccagcgctccaacctactgagccaccggcgcacgcactcgggcgccaagcccttcgcctgcgccgactgcggcaaggccttccgcggcagttccggcctggcgcaccaccggctttcgcacacgggagagcgacccttcgcctgcgcagaatgcggcaaggccttccgcggcagctccgagctgcgccagcaccagcgcctgcactctggcgagaggccgttcgtctgcgcccactgcagcaaggccttcgtgcgcaagtcggagctcttaagccaccggcgcacgcacacgggcgagaggccctacgcttgcggcgagtgcgggaagcctttcagccaccgttgcaacctcaacgagcaccagaagcggcacgggggccgcgctgcgccctgacccgaggacgccctgagcgggaggtcgcggacacacggcattgcggggtctcgggcgtgagtgcgctgtctgctggcccagactttttcgggccgccggtgcgggcgccctcctgctgggagtgcaggggcggccttgggtgtggagaaccctggctgcacagtccctttgacgatagtccaccggccacccaggcctgtctggggacatgtaggatgggctcttaccccagggagggcggcaggctccacttcggcgagaggttcgtccatgcagaggtgggcaagaactggggtctccgacaggtgtggctatttctttgagttctctggcactgtcaaaagcagccaacccaccccccagtccacatggtcaccactgctgctaccagctgctcagtgcagtggccactgtgtctcctaaggtgctcgcttcagtcagcacttcatctcaggcaaccacaggtgacagttaaacatgatgaaaccgcatgctatggctttctagtgtctcatattctgttggcaagaagctcagcactgcattcctgaccgaggtcagaaccagatcaatctcagaatctcacctgtgtaggtctgtttcatgggacttttcttttttgggggagggggcagggtttcactctgtcacccaggctggagtgcagtggtgcaatcactgtttattgcagccgcgacttcttaggctcaggtgatcctcccacctcagcctcccaagcagctgggatgacagacttgcgtcactacacctggctaattttaaaattttttgtaaggacagtgtctcaccatgttgcctaggcgggtctcaaaactcctgggctcaagtgatcctcctgcctcagcctcccaaagcgttgggattataggcgtgagccaccgcacctggccagggaaccttctttataccaagtaccacaccagtcagagtcaagtcaggaaatagaaaccacactaggtatttcaaacagaggggatataagttagggactgattgtgcaggttttgcaaggctcagagagcaaaagtggatgttgcagaatctcagagctggatacttgcaggaagctgctaccacccttagggctggagaacccagggaagctaagaggagggtgcaacgaggctggtgttgggactgccaaaggaaacacagaatgacagctccatctctgcagacctcagatttgaccaggcctctggctgcctgggcagcctcattgccaatgggctgaaaggttctgtcactgttcagtggtctgacttctgagttctgtgcacaccctgagctctgctcctctggcctggccaccagtccttgtctgagtgccccaggtctggttatgacttcaggcctcagcacctggttgtctcttctgcaaagaatgcattctcccccagtccacccagaacacacagcctccatccaggtactggctctgagcaggacagagagcatgcagcaggtgctcagcaatatggaaatgggaccaaacagagggagtctccacagctccccgtccctcacagcagaagccagagccgctgcagtgcccagctggtcttcatcacgtctatgagctctgcaatcgctctgcagtcgcctcaactcctggtctcctctgctccttctcactgcacccgcatctcccatgtttgcactggctgttccctctgcctggaatgctccttgcccagttatcccactgtcttctttgcatctggcacacagtagatgctcaataaatgcctgtggaatgaa

SEQ ID NO: 202702 - DNA, 2261 bp, Homo sapiens
  Payload ID: 19978
  Gene Name: zinc finger protein 497
  Uniprot ID: Q6ZNH5
  ENST ID: ENST00000425453
  CDS Start-End: 187-1683
atagttacgcaggcgcagtggggagaaacgcgacgccttgggccgctctgccgaatgcaaccgcgcccccaggagacccggtgcccgccctcctaccattccacgcggctcgagcccgcgtgcgggcctctttcaggccgctcctagtggacgcagaggcgggccgaggacggtcacaggcgcgagatggagtccccaagagggtggaccctgcaggtggccccagaggaaggccaggtcctctgcaatgtgaagactgccacgaggggcctctctgagggggctgtgtctggaggctggggggcctgggaaaactccacggaggttccgagggaggcaggggacggccagcggcagcaagccacactgggggcggcggacgaacagggaggccccggcagggagctgggccccgcagacggtgggcgggacggggctgggcccaggagcgagcctgcagaccgggcgttgcgcccttcgcctctcccagaggagccgggctgccggtgcggggagtgcggcaaggcgttcagccagggctcttacttgctgcagcatcggcgcgtgcacacaggcgagaagccgtacacgtgccccgagtgcggcaaggccttcgcctggagctccaacctcagccagcaccagcgcatccacagcggcgagaagccctacgcttgcagggagtgcggcaaggccttccgcgcgcactcgcagctcatccaccaccaggagacacacagcggcctgaagcccttccgctgcccggactgcggcaagtccttcggccgaagcaccacgctggtgcagcaccgacgcacgcacacgggcgagaagccctacgagtgcccggagtgcggcaaggccttcagctggaactccaatttcctggagcaccggcgcgtgcacacgggcgcgcggccgcacgcctgccgggactgtggcaaggccttcagccagagctccaacctggccgagcacctgaagatccacgcgggcgcacggccacacgcctgtcccgactgcggcaaggccttcgtgcgtgtggcggggctgcggcagcaccggcgcacgcacagcagcgagaagcccttcccctgcgccgagtgcggaaaggctttccgcgagagctcgcagctcctgcagcaccagcgcacgcacactggtgagcggcccttcgagtgcgccgagtgcggccaggctttcgtcatgggctcctacctggcggagcaccggcgcgtgcacacgggcgagaagcctcatgcgtgcgcccagtgcggcaaggccttcagccagcgctccaacctactgagccaccggcgcacgcactcgggcgccaagcccttcgcctgcgccgactgcggcaaggccttccgcggcagttccggcctggcgcaccaccggctttcgcacacgggagagcgacccttcgcctgcgcagaatgcggcaaggccttccgcggcagctccgagctgcgccagcaccagcgcctgcactctggcgagaggccgttcgtctgcgcccactgcagcaaggccttcgtgcgcaagtcggagctcttaagccaccggcgcacgcacacgggcgagaggccctacgcttgcggcgagtgcgggaagcctttcagccaccgttgcaacctcaacgagcaccagaagcggcacgggggccgcgctgcgccctgacccgaggacgccctgagcgggaggtcgcggacacacggcattgcggggtctcgggcgtgagtgcgctgtctgctggcccagactttttcgggccgccggtgcgggcgccctcctgctgggagtgcaggggcggccttgggtgtggagaaccctggctgcacagtccctttgacgatagtccaccggccacccaggcctgtctggggacatgtaggatgggctcttaccccagggagggcggcaggctccacttcggcgagaggttcgtccatgcagaggtgggcaagaactggggtctccgacaggtgtggctatttctttgagttctctggcactgtcaaaagcagccaacccaccccccagtccacatggtcaccactgctgctaccagctgctcagtgcagtggccactgtgtctcctaaggtgctcgcttcagtcagcacttcatctcaggcaaccacaggtgacagttaaacatgatgaaaccgcatgctatggctttctagtgtctcatattctgttggcaagaagctcagcactgcattcctgaccgaggtcagaaccagatcaatctcag

SEQ ID NO: 202703 - DNA, 792 bp, Homo sapiens
  Payload ID: 19978
  Gene Name: zinc finger protein 497
  ENST ID: ENST00000595763
  CDS Start-End: 467-792
agaaacgcgacgccttgggccgctctgccgaatgcaaccgcgcccccaggagacccggtgcccgccctcctaccattccacgcggctcgagcccgcgtgcgggcctctttcaggccgctcctagtggacgcagaggcgggccgaggacggtgccagcccccaggccccaagaggagctggtccccaggacagaggagggagaggagcaagaggctcccctgggccccttccaggccccacctccagggatctgggctgcacagccaccccatgccttggaccacctggtctgacctgcacagaggcctggtgtggacattgcctgggtaacagccactgagatcctccagcctggacatgctgcccatactgtgtggaggggactacccagggatccggccagggtggagtgggtgaggcagacatagctgtgtttgggtcaggcggtgtcctccagccttcaggaatggagacgggtccatcgtgttcctcacaaactggagtctccaccttcttgacacttggggccccaccctgtgaagcaaggagaggagagtggtgccacagtagggccagtgcaggtcacaggcgcgagatggagtccccaagagggtggaccctgcaggtggccccagaggaaggccaggtcctctgcaatgtgaagactgccacgaggggcctctctgagggggctgtgtctggaggctggggggcctgggaaaactccacggaggttccgagggaggcaggggacggccagcggcagcaagccacactgggggcggcggacga

SEQ ID NO: 202704 - DNA, 5880 bp, Homo sapiens
  Payload ID: 19979
  Gene Name: zinc finger protein 500
  Uniprot ID: O60304
  ENST ID: ENST00000219478
  CDS Start-End: 301-1743
ttagccaatggtgccacggctacgttacccacaatgccgcctgcgggcccacccgcacggcctggtttgcacccctggtttagggtcttcggccccggctctggcgtccctggctgccaagcctgaggcccgcagtcctactcccgccgagacccgccgctccggtcctgccccgaactgcccacggccggcagcgcttccaggccctgaaaaaaactctcttcctgtgtctggccagaggtatagagagagacaggttcaactctaaggcctgaaaaggaacaaggcccaccggaagcaatggccactgtccctggcctccagcccctgccaaccttggagcaggacctggaacaggaagagatcctgattgtgaaggtggaggaggacttctgcttggaagaggagccctccgtggagacggaggaccccagccctgagactttccgccagctcttccggctcttctgctaccaggaggtggctgggccccgggaggccctgagccgcctctgggagctgtgctgccgctggctgcggccggagctgcgcaccaaggagcagatcctggagctgctggtgctggagcagttcctgactgtgctgccgggggagatccaggctcgggtacgcgagcagcagccggagagcggtgaggaggccgtggtccttgtggaagggctgcagcggaagcccaggaaacacaggcagcggggctcagagctgctttctgatgacgaggtgcccctcgggatagggggacagttcttaaaacaccaggcagaggctcagccagaggatctgtccctggaggaagaggctcgattctccagccagcagcccccagcccagctgagccacaggccacagaggggcccgctgttgtggccagagagaggccctccagctccccggcatcaggagatggcgtcagcctcgcccttcctttcggcctggtcccaggtgcccgtgaacttggaggacgtggctgtatacctttctggggaggagccaagatgcatggacccagctcagcgggacgcgccgctggagaatgaaggacctgggatccagttggaggacggcggtgatggcagggaggatgccccgttgagaatggagtggtaccgagtgctctcggcacgatgccaggggcctggccacccgctcccaggtcagaggccagccccagtcaggggcttggtcaggcctgatcagccaagaggcggccccccaccaggaagacgggcttcccatggggctgacaagccgtacacctgccccgaatgtggcaaaggcttcagcaagacgtcccacttgaccaagcaccagcgcacacacacgggcgagcggccttacaagtgcctagtctgtgggaagggctttagcgaccgctccaacttcagcacgcaccagagggtgcacacaggcgagaagccctacccgtgccccgagtgtgggaagcgcttcagccagagctccagcctggtcatccaccgcaggacacacagcggggagcggccctatgcctgcacccagtgcgggaagcgcttcaacaacagctcgcacttcagcgcccaccgccggacgcacacaggtgagaagccctacacctgcccggcctgtggccggggcttccgccggggcaccgacctgcacaagcaccagcggacccacatgggggcaggctccttgccgacgctccagccggtggctcctggaggccccggtgccaaagcctgatcaccaggcctgaaactccctttccaggactctcatccctgggcacagaattcaggaaactgctagacagcctggtccgaaagcattgccagctgcccgtttcctcccatggcccagtatgaggccagcaggggacatttgggatgcccaggccgcagaggaagctgggcactgggtgcagaacaagggcaaggacaggctctgagtgtccagtggcagccagaacaggtgacacagagcaggggcttcagccacagagacacactcaggaggccagaagccgacactcaaggtgttcgtggggctggctcctgaagggcctgggagggtccatcagctgcctccagcatccagtggctgctggcatacagcctcatccccacgtcccaacccctctcctgtgtgtctgtgaccctgtgcgctgtctctgtgtgtaccccccacctgctcccccccccttttttttttgagacggggccttgctgtgtcccccaggcgggaatacagtgccatgatcatagctcactgcagcctcgaatccctgggctcaagtgttcctcctgcctcatcctcctgagtagctggggttacaggtgtgtgccgccatgcccagtctcttttttggtagggccaccactcactgggtttagggtcccccaatacactgtgacctcatcttaactaattatatcatcaaaacccgtgtttccaaataaggtcacattctgaggtctgggtgcacatgaatttgagggacccctcgtctgctgcagggagccctgctgtaccccagccttcccaggacgtggtctccagcttcttcatcctgccagagtttccaaatggagcccggggctctgcagcattccagtcccctttgcagatccatagctgctctgcagggcggaagacacctggggcgggaaagcacccctgagttccatcttcctgacatgttgcctgggatgtgacgggcctgacatctccccagggccggggcccagggctgcgtttgctcctggccccttagtgtctggaatgtggccttccacggttgccccactttgtctttctaaggtaagaagccttcaccttccagcttttgtctggcctgtgctgcgtgggagccactggtctgtgcacatccacggtgggtgagtggccaagacaagcagtgtgatagagtccttggtgggtttagtcatctcggaagtcgtagggcagctatggaaaccactgggttctggaacgttccagccaggcagtggttgttcctcataggtaggtggccttggccttcatcccagcctgggatgctccattgcatttgtcacctagtcactgtatatacgtgcacatttgaccttttggcacagcccaggttccaggtgcgtgacctgccctttttctcattcccttaactgacattatttagtgtcagaggccgagcacagtggctcccacctataatcctagcactttgggaggccaacgcgggtggattgcttgagcccaggagttcaagagcagcctgggcaatatagaaagacctcttccctaccaaaaaaaaaaaaaaaaaaaaaaagccaggtgcagtggctcacgcttgtaatcccagcactttgggaggccgaggcaggtggatcacaaggtcaggagatcgagaccatcctggccaacatggtgaaaccccatctctactaaaaacacaaaaattagctaggcatggtggcgtggcacgtgcctgtagtcccagctactcgggaagctgaggcaagagaatcacttgaaccagggaggcggaggttgcagtgagccgaggtcgcaccgttgtactccagcctggtgatagaacgagactccacacaaaaaaaaaaaaaattagccaggcatgatggggtgtgcctgtagtcccagctacttgagaggctgaggctggaggatcacttgagcccaggaagttgaggctgcagtgagctgtgattgtgccactgcactcatcctggaagacagagtgagatcctgtctcagataaaataaacaattttttttttaagtcattgcttctggcccctgtgtgctctgtcctgtgtctgcagaatggggctgcctggttgagggacggcttttaccttctagactagctctgggatctctcatggggcatgaggtacccagctagatgtggccaggccacactccaggagctagcaaagcacccagcgttgctgacacccatctccccagcgcagcctgagcccccaggcccctctctcatatccaggcctgtgctggaggtggcggcctctgggggagtgtggttggggtctgcccacttccctccccctgccgaggctgtggcctcccactggctgctgcttggccccatctcatggtcgctgcctgctgcttggccccatctcatgggcgtcatcctcagcactcacgtgatgggagagttttgtaggagctgtgagtcccaggtgcctgcgtgtgctgtgatgttatctcatgcagtccagtgaggggggactcccattagtctcctttttttgttttgttttgagacacagtctcacttcattacccaggctggagtgcaaggcacgatcttggctcaccacaacctccacctcccaggttcaagtgattctcctgcctcagcctcctgagtagctgggattacaggtgcgcaccactacgcctggctaatttttgtatttttagtagagatggggtttctccatgttggtcaggctggtcttgaactcccgaccttgtgatccacccacctcggcctcccaaagtgctgggattacaggcgtgagccaccgcgcccggccatgattctccttctgtgggtggaggaactgggcactgggagcgtgaaaaccttgcccaggtggcagagccagctttggacgcaggtctgacttcctacctcactccccttgccttgacagacacagtaattcagagttgaacttggaacagagtttattttccatcactgtaaaacattctcagtgaggttactggcattaaaaaggtgggagaaatggaagaaaatggggttgaagaaaaaaaaagcctttgctcttgacagctaggcagccacagcggaggccgccaggctgcgagggcagcgtatgggggcagagcccggttctggcggcacaggccccggagtggagggggcaggggagggtctctgtaggtgggagagggcctgggggctgggaggcagcctggccttgtgccctacaggagggacctcctgggactttatggaagcctgtcttgcctttgacttgcaatgaaaatgcccctcatcattgggagtggggtcgggtgggggtccccagtggccagatcacgtggggtccagagagcagacatctgtagccctgatcttggcggccagtgaccacggccaagcagggcctgtcttttgcctggtacaaggcttgatgagaagagacccctgcccatcctcagtggcctggcagccaggggtgaaccccaggggaagctgggacactgtcccaaaggcccggcgccctactgtgctgcctgagcccgtggcaccgtggggcccaaggtggtgatgatttctctgctcttcccacggggcagacagcaggacacatcctggagacaaggttggggagacaaacaggtgcccaggtcagggctgatcacagcagttacaaaagcatcccgtgaagacggggctgcaagacggtgctggcaaaggaacaggacccaggaagaccaggcttgtcctgtggaggggccgggtcttggcagggggcaagcagatgtccccagtttttgctggtgatcaacaagtgaggccgctgctccattctacacaggacagcatttccaggggtttccagtattctgtctagattcataaaggtcaaaggccttgagaatctatgtgtgcctttctatcttaggtaaagaagagaaagagaaagcaaattctcgttactcctctttcaaaaagttcattaaaagccaggctggcagctcacagtgctataatcccagcactgtggaaggcctaggcaggaggattgagaggagttccagaccaacctgggcaacaccgtgagaccccatctctac

SEQ ID NO: 202705 - DNA, 2440 bp, Homo sapiens
  Payload ID: 19979
  Gene Name: zinc finger protein 500
  Uniprot ID: O60304
  ENST ID: ENST00000545009
  CDS Start-End: 299-1624
agccaatggtgccacggctacgttacccacaatgccgcctgcgggcccacccgcacggcctggtttgcacccctggtttagggtcttcggccccggctctggcgtccctggctgccaagcctgaggcccgcagtcctactcccgccgagacccgccgctccggtcctgccccgaactgcccacggccggcagcgcttccaggccctgaaaaaaactctcttcctgtgtctggccagaggtatagagagagacaggttcaactctaaggcctgaaaaggaacaaggcccaccggaagcaatggccactgtccctggcctccagcccctgccaaccttggagcaggacctggaacaggaagagatcctgattgtgaaggtggaggaggacttctgcttggaagaggagccctccgtggagacggaggaccccagccctgagactttccgccagctcttccggctcttctgctaccaggaggtggctgggccccgggaggccctgagccgcctctgggagctgtgctgccgctggctgcggccggagctgcgcaccaaggagcagatcctggagctgctggtgctggagcagttcctgactgtgctgccgggggagatccaggctcgggtacgcgagcagcagccggagagcggtgaggaggccgtggtccttgtggaagggctgcagcggaagcccaggaaacacaggcagcggggctcagagctgctttctgatgacgaggtgcccctcgggatagggggacagttcttaaaacaccaggcagaggctcagccagaggatctgtccctggaggaagaggctcgattctccagccagcagcccccagcccagctgagccacaggccacagaggggcccgctgttgtggccagagagaggccctccagctccccggcatcaggagatggcgtcagcctcgcccttcctttcggcctggtcccaggtgcccgtgaacttggaggacgtggctgtatacctttctggggaggagccaagatgcatggacccagctcagcgggacgcgccgctggagaatgaaggacctgggatccagttggaggacggcggtgatggcagggaggatgccccgttgagaatggagtggtaccgagtgctctcggcacgatgccaggggcctggccacccgctcccaggtcagaggccagccccagtcaggggcttggtcaggcctgatcagccaagaggcggccccccaccaggaagacgggcttcccatggggctgacaagccgtacacctgccccgaatgtggcaaaggcttcagcaagacgtcccacttgaccaagcaccagcgcacacacacgggcgagcggccttacaagtgcctagtctgtgggaagggctttagcgaccgctccaacttcagcacgcaccagagggtgcacacaggcgagaagccctacccgtgccccgagtgtgggaagcgcttcagccagagctccagcctggtcatccaccgcaggacacacagcggggagcggccctatgcctgcacccagtgcgggaagcgcttcaacaacagctcgcacttcagcgcccaccgccggacgcacacaggtcacattctgaggtctgggtgcacatgaatttgagggacccctcgtctgctgcagggagccctgctgtaccccagccttcccaggacgtggtctccagcttcttcatcctgccagagtttccaaatggagcccggggctctgcagcattccagtcccctttgcagatccatagctgctctgcagggcggaagacacctggggcgggaaagcacccctgagttccatcttcctgacatgttgcctgggatgtgacgggcctgacatctccccagggccggggcccagggctgcgtttgctcctggccccttagtgtctggaatgtggccttccacggttgccccactttgtctttctaaggtaagaagccttcaccttccagcttttgtctggcctgtgctgcgtgggagccactggtctgtgcacatccacggtgggtgagtggccaagacaagcagtgtgatagagtccttggtgggtttagtcatctcggaagtcgtagggcagctatggaaaccactgggttctggaacgttccagccaggcagtggttgttcctcataggtaggtggccttggccttcatcccagcctgggatgctccattgcatttgtcacctagtcactgtatatacgtgcacatttgaccttttggcacagcccaggttccaggtgcgtgacctgccctttttctcattcccttaactgacattatttagtgtcagaggccgagcacagtggctcccacctataatcctagcactttgggaggccaacgcgggtggattgcttgagcccaggagttcaagagcagcctgggcaatatagaaagacctcttccctacc

SEQ ID NO: 202706 - DNA, 604 bp, Homo sapiens
  Payload ID: 19979
  Gene Name: zinc finger protein 500
  ENST ID: ENST00000592425
  CDS Start-End: 329-604
gcggccgcatcagagacagcccgggccaggtcccatggacaccacctgcaccgtgattgaggaaccctgatctgaagatctctgagcgcacattacctgtggtccagttcattccctgtgcaaaaggcagaagtcaaaagggaaagaatttgccagccctcccggctcccaagtggttacgtggaatcctcagaagggaaggaatgagattctgcccagctctgtccaccagctcctggagcccagacacagcttccctctcagggtcacaggacctgggatccagttggaggacggcggtgatggcagggaggatgccccgttgagaatggagtggtaccgagtgctctcggcacgatgccaggggcctggccacccgctcccaggtcagaggccagccccagtcaggggcttggtcaggcctgatcagccaagaggcggccccccaccaggaagacgggcttcccatggggctgacaagccgtacacctgccccgaatgtggcaaaggcttcagcaagacgtcccacttgaccaagcaccagcgcacacacacgggcgagcggccttacaagtgcctagtctgtgggaagggctttagcgac

SEQ ID NO: 202707 - DNA, 276 bp, Homo sapiens
  Payload ID: 19979
  Gene Name: zinc finger protein 500
  ENST ID: ENST00000588942
  CDS Start-End: 1-220
gtcatccaccgcaggacacacagcggggagcggccctatgcctgcacccagtgcgggaagcgcttcaacaacagctcgcacttcagcgcccaccgccggacgcacacaggtaaagaagagaaagagaaagcaaattctcgttactcctctttcaaaaagttcattaaaagccaggctggcagctcacagtgctataatcccagcactgtggaaggcctaggcaggaggattgagaggagttccagaccaacctgggcaacaccgtgagaccccatc

SEQ ID NO: 202708 - DNA, 1831 bp, Homo sapiens
  Payload ID: 19979
  Gene Name: zinc finger protein 500
  ENST ID: ENST00000589422
  CDS Start-End: 27-455
aaaaggaacaaggcccaccggaagcaatggccactgtccctggcctccagcccctgccaaccttggagcaggacctggaacaggaagagatcctgattgtgaaggtggaggaggacttctgcttggaagaggagccctccgtggagacggaggaccccagccctgagactttccgccagctcttccggctcttctgctaccaggaggtggctgggccccgggaggccctgagccgcctctgggagctgtgctgccgctggctgcggccggagctgcgcaccaaggagcagatcctggagctgctggtgctggagcagttcctgactgtgctgccgggggagatccaggctcgggtacgcgagcagcagccggagagcggtgaggaggccgtggtccttgtggaagggctgcagcggaagcccaggaaacacaggcagcggggggacagttcttaaaacaccaggcagaggctcagccagaggatctgtccctggaggaagaggctcgattctccagccagcagcccccagcccagctgagccacaggccacagaggggcccgctgttgtggccagagagaggccctccagctccccggcatcaggagatggcgtcagcctcgcccttcctttcggcctggtcccaggtgcccgtgaacttggaggacgtggctgtatacctttctggggaggagccaagatgcatggacccagctcagcgggacgcgccgctggagaatgaaggacctgggatccagttggaggacggcggtgatggcagggaggatgccccgttgagaatggagtggtaccgagtgctctcggcacgatgccaggggcctggccacccgctcccaggtcagaggccagccccagtcaggggcttggtcaggcctgatcagccaagaggcggccccccaccaggaagacgggcttcccatggggctgacaagccgtacacctgccccgaatgtggcaaaggcttcagcaagacgtcccacttgaccaagcaccagcgcacacacacgggcgagcggccttacaagtgcctagtctgtgggaagggctttagcgaccgctccaacttcagcacgcaccagagggtgcacacaggcgagaagccctacccgtgccccgagtgtgggaagcgcttcagccagagctccagcctggtcatccaccgcaggacacacagcggggagcggccctatgcctgcacccagtgcgggaagcgcttcaacaacagctcgcacttcagcgcccaccgccggacgcacacaggtgagaagccctacacctgcccggcctgtggccggggcttccgccggggcaccgacctgcacaagcaccagcggacccacatgggggcaggctccttgccgacgctccagccggtggctcctggaggccccggtgccaaagcctgatcaccaggcctgaaactccctttccaggactctcatccctgggcacagaattcaggaaactgctagacagcctggtccgaaagcattgccagctgcccgtttcctcccatggcccagtatgaggccagcaggggacatttgggatgcccaggccgcagaggaagctgggcactgggtgcagaacaagggcaaggacaggctctgagtgtccagtggcagccagaacaggtgacacagagcaggggcttcagccacagagacacactcaggaggccagaagccgacactcaaggtgttcgtggggctggctcctgaagggcctgggagggtccatcagctgcctccagcatccagtggctgctggcatacagcctcatccccacgtcccaacccctctcctgtgtg

SEQ ID NO: 202709 - DNA, 507 bp, Homo sapiens
  Payload ID: 19979
  Gene Name: zinc finger protein 500
  ENST ID: ENST00000588602
  CDS Start-End: 145-507
gatttcgcggcccgcgccagcacccgggtctgtgccgcggcctcggggccctgaaaaaaactctcttcctgtgtctggccagaggtatagagagagacaggttcaactctaaggcctgaaaaggaacaaggcccaccggaagcaatggccactgtccctggcctccagcccctgccaaccttggagcaggacctggaacaggaagagatcctgattgtgaaggtggaggaggacttctgcttggaagaggagccctccgtggagacggaggaccccagccctgagactttccgccagctcttccggctcttctgctaccaggaggtggctgggccccgggaggccctgagccgcctctgggagctgtgctgccgctggctgcggccggagctgcgcaccaaggagcagatcctggagctgctggtgctggagcagttcctgactgtgctgccgggggagatccaggctcgggtacgcgagcagcagccggagagcggtgaggaggcc

SEQ ID NO: 202710 - DNA, 312 bp, Homo sapiens
  Payload ID: 19979
  Gene Name: zinc finger protein 500
  ENST ID: ENST00000585977
  CDS Start-End: 236-312
tcggctcactgcaacctgcgccttagcctcctgagtagctaggattacaggcatgaaccaccacgcccaggtttctccacgttagtcaggctggtctcgaactcccgacctcagatggttttatcgtctctccacagggccctgaaaaaaactctcttcctgtgtctggccagaggtatagagagagacaggttcaactctaaggcctgaaaaggaacaaggcccaccggaagcaatggccactgtccctggcctccagcccctgccaaccttggagcaggacctggaacaggaagagatcctgattgtgaa

SEQ ID NO: 202711 - DNA, 3099 bp, Homo sapiens
  Payload ID: 19980
  Gene Name: zinc finger protein 501
  Uniprot ID: Q96CX3
  ENST ID: ENST00000396048
  CDS Start-End: 438-1253
gactgctgacgtcacgccggctgggcgcgtccgggacttactcctttccgcagggcagcacccagggacctgagtgttgcaaggtgcgagaggggagcgccgcggggagcgccgcgggaagcgcatgtgcctcaaattcctgcctttcctcaagagaagagcccccaggagaaaagccagtattgcttgtgctcctaacaacctgtctcttgagaggctgatcatcaggggttcactttcagagaagttgagaatgcaggctgaacaaggaagaggaaggggaatcctgcagggatgaatgagaggacagcaatgcatgtgtgatgtgtgtgagcacacacacacagtaacctttcctaggagaactgtattactctaatgataatcacctttgaggaaaaaaaacttgtaagtatgaatttggtgttacaagcagcatgaattccagccaaatatcactcagaatgaaacatgggagagttaacatgcagaagaaaccttcaaagtgtagtgaatgtgggaagttctttactcagagatcatctcttacccagcaccagaggattcacagaggagagaagccctatgtgtgcagtgaatgtggaagttgtttccgtaaacagtcaaatcttactcaacatctgagaattcataccggagagaaaccttataaatgtaatgaatgtgagaaagcctttcaaacaaaagcaattcttgttcagcatctgagaattcatactggagagaaaccctataaatgcaatgaatgtggaaaagccttttgtcagagcccatcccttattaaacaccagcgaattcatactggagagaaaccatataaatgtacagaatgtggcaaagccttcagtcagagcatatgccttactcgtcatcagagaagtcattctggagataaaccttttaagtgtaatgaatgtgggaaagcctttaatcagagtgcatgtctcatgcagcatcagagaattcattcaggagagaagccctacacatgcactgaatgtggtaaagccttcactcagaactcttcccttgttgaacatgaaaggactcacactggagagaaactttataagtgtagtgagtgtgaaaaaactttccgcaaacaagcacaccttagtgagcattacagaattcatactggagaaaaaccttatgagtgtgttggatgtgggaaatcctttaggcacagttcagcacttcttcgacatcagaggcttcatgctggagagtaaaatttggaatataatgagtatgggaagatttgtatggaagcaccttttttttctcctaaattcctaggaatgtaagactcaatctgtagctagtatgaatattttgtattttgaacaagaaatgttgtgtcctaatgtgtcctagtctggagtttgatgccttatctgctgctcagtgggtgtaaccttatcccttctgagcctcagtttccccattccccccaatagaaaaatggggatatttcctagggttgtcctgagaataaaatgagttctgtgtgacagttaactgccattaattaattagccgttctaaaagtttatttacaatatcaaaatctgacaagtaaatcagcattgttgtttggttctcataatgtattgtttcttaagaacattttgtaattgggctatgattttatgatctacagacgtctatttaaactataatgtcttggtttaaataggataatacaatctaagactggtttgtccttgagaaatttcagatttaatcagagaaaaatgtactgattgggatttgagtggacattgtggggtgtatttctggataccctcaagatcttcatttaaattttgatactttctattactagatctaatttgattttaagctctaagtttcacttttccattaaacggaaagcctccctgacattaactgaataaaacctcatgttgtgggacttctgtgtgtgtttagggttggcagcaggtgattaggagaaggcatatgacagtagagaggactggaatatagaggagaatataagcatgtagatgaggatgtggctgtatttgttttgagttctaggagcacagcaccaaatgtggtctcttaagggaagatgagggtagaagatgttaagatcccaggttccagcaactgatgccactgactaacaactagccacttgtcagaggaaggagagaacagtgtcttggggatgctgatgggttggagtgcctaatggctcattaaaagccatgaaaaagcaaagaaatcaaagaatacttttgatggagctttaggctatgctaagccttttaatgtaaacaagcacctctaacgctaaaagcacccttgcaagaaaggtaggagttactattcacatcctagagtcaaggaaaaagagaagatgtttgacttgctcaaagtcaagcaggtaatgtcagaattgaatctcaaatctatatctttatagatttgcagttctggtttatataataccaaagtcacatacaggtaatttcccaccattgaaccttcctgttggtgtgagatgccaaatctgtgaaaaccagacacaggtggccaggtgggtgtcgaactcctgacctcaagtgatccgcctgcctcagcctcccaaagtgctgggattacaggtgtgagtcaccacatctggtcggattttaactattctaataggtatgtagtggtattaattgttttaatctgcagttcaccaataatatatgaatttagcatcttttcatatgtttgccatctgtatagctttggtgaggtatctgttagaggttttgcccatttttaattggattgctcattttcttattgttgaattttaagtgttccttgtatattttgtataacagacctttatcagataggtcttttgcaaatattttcctcccaggctgtggcttattttctcaatccttgattccttctctttactttttttttcttttttctttttttaaagaaatggtagcataatatacacagttgtccattttttaaagactaaaccatctcacagattgttctgtatcagtaaataaagatctttcccccaccctt

SEQ ID NO: 202712 - DNA, 3382 bp, Homo sapiens
  Payload ID: 19980
  Gene Name: zinc finger protein 501
  Uniprot ID: Q96CX3
  ENST ID: ENST00000620116
  CDS Start-End: 721-1536
gtcacgccggctgggcgcgtccgggacttactcctttccgcagggcagcacccagggacctgagtgttgcaaggtgcgagaggggagcgccgcggggagcgccgcgggaagcgcatggtgagcggtttctgctgtgcccggctgccgcgggtcgattccagctcctccctcgggaagcagggcgtttttcttcctggagggcctgtggagcggaggcccgaggcctagggcaaacttgccatgaagaaaggagaggctgttcgagagccctaggctgggagtcggaggacctgggttcgatttatacatacttaagcatgtcagtgaacttctgggcactttagttttctgatttccagaagtaaatactgtttcctgccttgccgtttcccaaagttgtgcgggttgaatgcctcaaattcctgcctttcctcaagagaagagcccccaggagaaaagccagtattgcttgtgctcctaacaacctgtctcttgagaggctgatcatcaggggttcactttcagagaagttgagaatgcaggctgaacaaggaagaggaaggggaatcctgcagggatgaatgagaggacagcaatgcatgtgtgatgtgtgtgagcacacacacacagtaacctttcctaggagaactgtattactctaatgataatcacctttgaggaaaaaaaacttgtaagtatgaatttggtgttacaagcagcatgaattccagccaaatatcactcagaatgaaacatgggagagttaacatgcagaagaaaccttcaaagtgtagtgaatgtgggaagttctttactcagagatcatctcttacccagcaccagaggattcacagaggagagaagccctatgtgtgcagtgaatgtggaagttgtttccgtaaacagtcaaatcttactcaacatctgagaattcataccggagagaaaccttataaatgtaatgaatgtgagaaagcctttcaaacaaaagcaattcttgttcagcatctgagaattcatactggagagaaaccctataaatgcaatgaatgtggaaaagccttttgtcagagcccatcccttattaaacaccagcgaattcatactggagagaaaccatataaatgtacagaatgtggcaaagccttcagtcagagcatatgccttactcgtcatcagagaagtcattctggagataaaccttttaagtgtaatgaatgtgggaaagcctttaatcagagtgcatgtctcatgcagcatcagagaattcattcaggagagaagccctacacatgcactgaatgtggtaaagccttcactcagaactcttcccttgttgaacatgaaaggactcacactggagagaaactttataagtgtagtgagtgtgaaaaaactttccgcaaacaagcacaccttagtgagcattacagaattcatactggagaaaaaccttatgagtgtgttggatgtgggaaatcctttaggcacagttcagcacttcttcgacatcagaggcttcatgctggagagtaaaatttggaatataatgagtatgggaagatttgtatggaagcaccttttttttctcctaaattcctaggaatgtaagactcaatctgtagctagtatgaatattttgtattttgaacaagaaatgttgtgtcctaatgtgtcctagtctggagtttgatgccttatctgctgctcagtgggtgtaaccttatcccttctgagcctcagtttccccattccccccaatagaaaaatggggatatttcctagggttgtcctgagaataaaatgagttctgtgtgacagttaactgccattaattaattagccgttctaaaagtttatttacaatatcaaaatctgacaagtaaatcagcattgttgtttggttctcataatgtattgtttcttaagaacattttgtaattgggctatgattttatgatctacagacgtctatttaaactataatgtcttggtttaaataggataatacaatctaagactggtttgtccttgagaaatttcagatttaatcagagaaaaatgtactgattgggatttgagtggacattgtggggtgtatttctggataccctcaagatcttcatttaaattttgatactttctattactagatctaatttgattttaagctctaagtttcacttttccattaaacggaaagcctccctgacattaactgaataaaacctcatgttgtgggacttctgtgtgtgtttagggttggcagcaggtgattaggagaaggcatatgacagtagagaggactggaatatagaggagaatataagcatgtagatgaggatgtggctgtatttgttttgagttctaggagcacagcaccaaatgtggtctcttaagggaagatgagggtagaagatgttaagatcccaggttccagcaactgatgccactgactaacaactagccacttgtcagaggaaggagagaacagtgtcttggggatgctgatgggttggagtgcctaatggctcattaaaagccatgaaaaagcaaagaaatcaaagaatacttttgatggagctttaggctatgctaagccttttaatgtaaacaagcacctctaacgctaaaagcacccttgcaagaaaggtaggagttactattcacatcctagagtcaaggaaaaagagaagatgtttgacttgctcaaagtcaagcaggtaatgtcagaattgaatctcaaatctatatctttatagatttgcagttctggtttatataataccaaagtcacatacaggtaatttcccaccattgaaccttcctgttggtgtgagatgccaaatctgtgaaaaccagacacaggtggccaggtgggtgtcgaactcctgacctcaagtgatccgcctgcctcagcctcccaaagtgctgggattacaggtgtgagtcaccacatctggtcggattttaactattctaataggtatgtagtggtattaattgttttaatctgcagttcaccaataatatatgaatttagcatcttttcatatgtttgccatctgtatagctttggtgaggtatctgttagaggttttgcccatttttaattggattgctcattttcttattgttgaattttaagtgttccttgtatattttgtataacagacctttatcagataggtcttttgcaaatattttcctcccaggctgtggcttattttctcaatccttgattccttctctttactttttttttcttttttctttttttaaagaaatggtagcataatatacacagttgtccattttttaaagactaaaccatctcacagattgttctgtatcagtaaataaagatctttcccccaccctt

SEQ ID NO: 202713 - DNA, 3382 bp, Homo sapiens; identical to SEQ ID NO: 202712
  Payload ID: 19980
  Gene Name: Zinc finger protein 501
  ENST ID: ENST00000625592
  CDS Start-End: 721-1536

SEQ ID NO: 202714 - DNA, 3099 bp, Homo sapiens; identical to SEQ ID NO: 202711
  Payload ID: 19980
  Gene Name: Zinc finger protein 501
  ENST ID: ENST00000627775
  CDS Start-End: 438-1253

SEQ ID NO: 202715 - DNA, 3270 bp, Homo sapiens
  Payload ID: 19981
  Gene Name: zinc finger protein 502
  Uniprot ID: Q8TBZ5
  ENST ID: ENST00000296091
  CDS Start-End: 257-1891
attcttccggtttcagaagttaaggctggtgtcctggccccagtccacctctgggagcgcctgcgccgctccgcggagagtccgtggatctcacagtgaaaaatgtttgctgacccttgacattgacaaactgctgacagctcagatgatccatgattggaaggatgtggtcatcaccaagatgtctttctttctccggttcccagttttccagacctgaagtgttttccaatcaaagcgaagagacgatctgtggatgttgaatatgcaaggagctgaagagagagacattagaagagagacttgtccaggctgggtaaacaagaacaagcctgctctggagcaggatgtctgtaaaattgactcatcagggatagtagtaaagaggttccaagaggatgaataccaagattctacatttgaagaaaaatatgcatgtgagggcatgaaggaaaactctcctagggagattgctgaatcatgccttttccaggaaggaggttttgggagaataactttcatccacaaagaagcaccccctgaaattattagtcaaggatataattttgagaaaagcttgcttttgacctcaagccttgttacacgtctcagggtttctacagaagagagtctgcatcagtgggaaacaagtaatatacaaaccaatgatatttcagaccaaagtaaatgtccaactctctgcacacagaaaaaatcttggaaatgtaatgaatgtggaaaaacctttactcagagctcatcccttacccaacatcagagaactcatactggagagagaccctacacatgtgaggaatgtgggaaagcctttagtcgtagttcattccttgttcaacatcaaagaattcacactggagtgaaaccatatggatgtgagcagtgtgggaaaacatttcgatgtcgatcatttcttactcagcatcaaagaattcacactggagagaaaccttataaatgcaatgaatgtgggaattccttccgcaatcactcacatctcactgaacaccagagaattcacactggagagaaaccttataaatgcaataggtgtgggaaggcattcaatcagaatacacaccttattcatcatcagagaattcacactggtgagaagccttacatatgcagtgaatgtggctcttcttttcgaaaacactcaaatcttacgcaacatcagagaattcacactggggaaaaaccccataaatgtgacgaatgtgggaaaactttccaaacaaaggcaaacctctctcagcatcagagaattcatagtggagagaaaccctataaatgtaaagaatgtggcaaagccttttgtcagagcccatctcttattaaacaccagcgaattcatactggagaaaaaccatataagtgtaaagaatgtggcaaagcgtttactcagagcaccccactcactaaacatcagagaatacatacaggggagagaccctacaaatgcagtgaatgtggtaaagccttcattcagagcatttgccttattcggcaccagagaagtcacactggagaaaaaccctataaatgcaatgaatgtggaaagggctttaatcagaacacctgcctcactcagcatatgagaattcatactggagagaagccctataaatgtaaagaatgtgggaaagcctttgctcatagctcatctcttactgaacatcatagaactcacactggtgagaagctctataaatgtagtgagtgtgagaaaaccttccgcaagtatgcacaccttagtgaacattacagaattcacactggtgagaagccttatgagtgtattgagtgtggaaagttcttcagacatagttcagtccttttcagacatcagaaacttcacagtggtgactaatgctgccatttaggttatgacagtttctctagcgaggatgactacgaatctgactgggagtagaggggcaggtagagttcctggagggaaggatgaaggagccttggctactgtactctgagaggaatgtttccagaaatggaggtgggagcttagggaatgcagagcctacttgaggtgggcatctgggaatacagggtagaaagaaattcctgcttttcagataaagcctacacattgccactgtctccccatgtgactcttacagcttgaggaggcatttgttagcacttctgttcactttactacatcctgccccacattctgacttgtcacccattttcgttggctggcaggttgagatgtttttcttaaacactgcctgtcagtgtgaagtggcacagctctgatgtagtgctaagtctagcctccagatttgaggcagccctgaccatgctaccatgggggaggctcccaacctgtggaagtggtcctgtgaaaaggagacagaaacaagtaagagccaaaaaaaaaaaaaaaaaaaatccatatccattcattaaaaaaatgagatataaagcaacaactgggctgacctctatagatctgccagtaaagaaggctttctttcattatcagggtgaaggtctttcctgattcttccaagctttgaggtgactcagagctaagaatgaaataggagaccaagttagaattcatgatactggtttatggggaggcagtcatacctgttcagagaaccaggaagactcaatatctatctcagaggaaatatggttacccaggaaagaaatggtctgctagagtgataagactcagaacaggaagcctgcatgtgactgagcaagtcacctacataaccctgcctgtactaaggtgtacacctgtctattgtaagtttgcctaggctgttggtgtacagagaccagaggagagagacacactaggactaacaatgtcctaacaaaatggtacttagtttgttggtctttaggagaaagcattagtaatgaaagaagaaagaattttcacttggttggacattggggctcttaagaaagttgacatttgtcgtggaatgactttggaaagacttctaaaagaatctttttcaaatccctgaaaatcaggatagcacattttgctactgactgtgacagtgttttattcttttgagagaaatgacatagttttccctttatttcccaaattcctttcatgttcttaactgctacccagaaattgagcttcagaagattgaggatagcctttgattggtatttaaaataatttctaagctgtgaagcttatagcatttttaaagtatggctattaaaaacactaagttgattctggaa

SEQ ID NO: 202716 - DNA, 3173 bp, Homo sapiens
  Payload ID: 19981
  Gene Name: zinc finger protein 502
  Uniprot ID: Q8TBZ5
  ENST ID: ENST00000449836
  CDS Start-End: 162-1796
accattcttccggtttcagaagttaaggctggtgtcctggccccagtccacctctgggagcgcctgcgccgctccgcggagagtccgtggatctcacagtgaggttcccagttttccagacctgaagtgttttccaatcaaagcgaagagacgatctgtggatgttgaatatgcaaggagctgaagagagagacattagaagagagacttgtccaggctgggtaaacaagaacaagcctgctctggagcaggatgtctgtaaaattgactcatcagggatagtagtaaagaggttccaagaggatgaataccaagattctacatttgaagaaaaatatgcatgtgagggcatgaaggaaaactctcctagggagattgctgaatcatgccttttccaggaaggaggttttgggagaataactttcatccacaaagaagcaccccctgaaattattagtcaaggatataattttgagaaaagcttgcttttgacctcaagccttgttacacgtctcagggtttctacagaagagagtctgcatcagtgggaaacaagtaatatacaaaccaatgatatttcagaccaaagtaaatgtccaactctctgcacacagaaaaaatcttggaaatgtaatgaatgtggaaaaacctttactcagagctcatcccttacccaacatcagagaactcatactggagagagaccctacacatgtgaggaatgtgggaaagcctttagtcgtagttcattccttgttcaacatcaaagaattcacactggagtgaaaccatatggatgtgagcagtgtgggaaaacatttcgatgtcgatcatttcttactcagcatcaaagaattcacactggagagaaaccttataaatgcaatgaatgtgggaattccttccgcaatcactcacatctcactgaacaccagagaattcacactggagagaaaccttataaatgcaataggtgtgggaaggcattcaatcagaatacacaccttattcatcatcagagaattcacactggtgagaagccttacatatgcagtgaatgtggctcttcttttcgaaaacactcaaatcttacgcaacatcagagaattcacactggggaaaaaccccataaatgtgacgaatgtgggaaaactttccaaacaaaggcaaacctctctcagcatcagagaattcatagtggagagaaaccctataaatgtaaagaatgtggcaaagccttttgtcagagcccatctcttattaaacaccagcgaattcatactggagaaaaaccatataagtgtaaagaatgtggcaaagcgtttactcagagcaccccactcactaaacatcagagaatacatacaggggagagaccctacaaatgcagtgaatgtggtaaagccttcattcagagcatttgccttattcggcaccagagaagtcacactggagaaaaaccctataaatgcaatgaatgtggaaagggctttaatcagaacacctgcctcactcagcatatgagaattcatactggagagaagccctataaatgtaaagaatgtgggaaagcctttgctcatagctcatctcttactgaacatcatagaactcacactggtgagaagctctataaatgtagtgagtgtgagaaaaccttccgcaagtatgcacaccttagtgaacattacagaattcacactggtgagaagccttatgagtgtattgagtgtggaaagttcttcagacatagttcagtccttttcagacatcagaaacttcacagtggtgactaatgctgccatttaggttatgacagtttctctagcgaggatgactacgaatctgactgggagtagaggggcaggtagagttcctggagggaaggatgaaggagccttggctactgtactctgagaggaatgtttccagaaatggaggtgggagcttagggaatgcagagcctacttgaggtgggcatctgggaatacagggtagaaagaaattcctgcttttcagataaagcctacacattgccactgtctccccatgtgactcttacagcttgaggaggcatttgttagcacttctgttcactttactacatcctgccccacattctgacttgtcacccattttcgttggctggcaggttgagatgtttttcttaaacactgcctgtcagtgtgaagtggcacagctctgatgtagtgctaagtctagcctccagatttgaggcagccctgaccatgctaccatgggggaggctcccaacctgtggaagtggtcctgtgaaaaggagacagaaacaagtaagagccaaaaaaaaaaaaaaaaaaaatccatatccattcattaaaaaaatgagatataaagcaacaactgggctgacctctatagatctgccagtaaagaaggctttctttcattatcagggtgaaggtctttcctgattcttccaagctttgaggtgactcagagctaagaatgaaataggagaccaagttagaattcatgatactggtttatggggaggcagtcatacctgttcagagaaccaggaagactcaatatctatctcagaggaaatatggttacccaggaaagaaatggtctgctagagtgataagactcagaacaggaagcctgcatgtgactgagcaagtcacctacataaccctgcctgtactaaggtgtacacctgtctattgtaagtttgcctaggctgttggtgtacagagaccagaggagagagacacactaggactaacaatgtcctaacaaaatggtacttagtttgttggtctttaggagaaagcattagtaatgaaagaagaaagaattttcacttggttggacattggggctcttaagaaagttgacatttgtcgtggaatgactttggaaagacttctaaaagaatctttttcaaatccctgaaaatcaggatagcacattttgctactgactgtgacagtgttttattcttttgagagaaatgacatagttttccctttatttcccaaattcctttcatgttcttaactgctacccagaaattgagcttcagaagattgaggatagcctttgattggtatttaaaataatttctaagctgtgaagcttatagcatttttaaagtatggctattaaaaacactaagttgattctgg

SEQ ID NO: 202717 - DNA, 593 bp, Homo sapiens
  Payload ID: 19981
  Gene Name: zinc finger protein 502
  ENST ID: ENST00000411443
  CDS Start-End: 129-593
gtcctggccccagtccacctctgggagcgcctgcgccgctccgcggagagtccgtggatctcacagtgaggttcccagttttccagacctgaagtgttttccaatcaaagcgaagagacgatctgtggatgttgaatatgcaaggagctgaagagagagacattagaagagagacttgtccaggctgggtaaacaagaacaagcctgctctggagcaggatgtctgtaaaattgactcatcagggatagtagtaaagaggttccaagaggatgaataccaagattctacatttgaagaaaaatatgcatgtgagggcatgaaggaaaactctcctagggagattgctgaatcatgccttttccaggaaggaggttttgggagaataactttcatccacaaagaagcaccccctgaaattattagtcaaggatataattttgagaaaagcttgcttttgacctcaagccttgttacacgtctcagggtttctacagaagagagtctgcatcagtgggaaacaagtaatatacaaaccaatgatatttcagaccaaagtaaatgtccaactctctgcacacagaaaaaatcttgg

SEQ ID NO: 202718 - DNA, 2314 bp, Homo sapiens
  Payload ID: 19981
  Gene Name: zinc finger protein 502
  Uniprot ID: Q8TBZ5
  ENST ID: ENST00000436624
  CDS Start-End: 155-1789
attcttccggtttcagaagttaaggctggtgtcctggccccagtccacctctgggagcgcctgcgccgctccgcggagagtccgtggatctcacaggttcccagttttccagacctgaagtgttttccaatcaaagcgaagagacgatctgtggatgttgaatatgcaaggagctgaagagagagacattagaagagagacttgtccaggctgggtaaacaagaacaagcctgctctggagcaggatgtctgtaaaattgactcatcagggatagtagtaaagaggttccaagaggatgaataccaagattctacatttgaagaaaaatatgcatgtgagggcatgaaggaaaactctcctagggagattgctgaatcatgccttttccaggaaggaggttttgggagaataactttcatccacaaagaagcaccccctgaaattattagtcaaggatataattttgagaaaagcttgcttttgacctcaagccttgttacacgtctcagggtttctacagaagagagtctgcatcagtgggaaacaagtaatatacaaaccaatgatatttcagaccaaagtaaatgtccaactctctgcacacagaaaaaatcttggaaatgtaatgaatgtggaaaaacctttactcagagctcatcccttacccaacatcagagaactcatactggagagagaccctacacatgtgaggaatgtgggaaagcctttagtcgtagttcattccttgttcaacatcaaagaattcacactggagtgaaaccatatggatgtgagcagtgtgggaaaacatttcgatgtcgatcatttcttactcagcatcaaagaattcacactggagagaaaccttataaatgcaatgaatgtgggaattccttccgcaatcactcacatctcactgaacaccagagaattcacactggagagaaaccttataaatgcaataggtgtgggaaggcattcaatcagaatacacaccttattcatcatcagagaattcacactggtgagaagccttacatatgcagtgaatgtggctcttcttttcgaaaacactcaaatcttacgcaacatcagagaattcacactggggaaaaaccccataaatgtgacgaatgtgggaaaactttccaaacaaaggcaaacctctctcagcatcagagaattcatagtggagagaaaccctataaatgtaaagaatgtggcaaagccttttgtcagagcccatctcttattaaacaccagcgaattcatactggagaaaaaccatataagtgtaaagaatgtggcaaagcgtttactcagagcaccccactcactaaacatcagagaatacatacaggggagagaccctacaaatgcagtgaatgtggtaaagccttcattcagagcatttgccttattcggcaccagagaagtcacactggagaaaaaccctataaatgcaatgaatgtggaaagggctttaatcagaacacctgcctcactcagcatatgagaattcatactggagagaagccctataaatgtaaagaatgtgggaaagcctttgctcatagctcatctcttactgaacatcatagaactcacactggtgagaagctctataaatgtagtgagtgtgagaaaaccttccgcaagtatgcacaccttagtgaacattacagaattcacactggtgagaagccttatgagtgtattgagtgtggaaagttcttcagacatagttcagtccttttcagacatcagaaacttcacagtggtgactaatgctgccatttaggttatgacagtttctctagcgaggatgactacgaatctgactgggagtagaggggcaggtagagttcctggagggaaggatgaaggagccttggctactgtactctgagaggaatgtttccagaaatggaggtgggagcttagggaatgcagagcctacttgaggtgggcatctgggaatacagggtagaaagaaattcctgcttttcagataaagcctacacattgccactgtctccccatgtgactcttacagcttgaggaggcatttgttagcacttctgttcactttactacatcctgccccacattctgacttgtcacccattttcgttggctggcaggttgagatgtttttcttaaacactgcctgtcagtgtgaagtggcacagctctgatgtagtgctaagtctagcctccagatttgaggcagccctgaccatgctaccatgggggaggctcccaacctgtggaagtggtcctgtgaaaaggagacagaaacaagtaagagcc

SEQ ID NO: 202719 - DNA, 2314 bp, Homo sapiens; identical to SEQ ID NO: 202718
  Payload ID: 19981
  Gene Name: Zinc finger protein 502
  ENST ID: ENST00000628995
  CDS Start-End: 155-1789

SEQ ID NO: 202720 - DNA, 3173 bp, Homo sapiens; identical to SEQ ID NO: 202716
  Payload ID: 19981
  Gene Name: Zinc finger protein 502
  ENST ID: ENST00000630464
  CDS Start-End: 162-1796

SEQ ID NO: 202721 - DNA, 3270 bp, Homo sapiens; identical to SEQ ID NO: 202715
  Payload ID: 19981
  Gene Name: Zinc finger protein 502
  ENST ID: ENST00000626630
  CDS Start-End: 257-1891

SEQ ID NO: 202722 - DNA, 593 bp, Homo sapiens; identical to SEQ ID NO: 202717
  Payload ID: 19981
  Gene Name: Zinc finger protein 502
  ENST ID: ENST00000629892
  CDS Start-End: 129-593

SEQ ID NO: 202723 - DNA, 3347 bp, Homo sapiens
  Payload ID: 19982
  Gene Name: zinc finger protein 503
  Uniprot ID: Q96F45
  ENST ID: ENST00000372524
  CDS Start-End: 488-2428
ctggcagcggcggcggcggcggcgcgggacgcgtcacatccccttgaccctccaatcacctcgggctcccatttgattggaaggcggcaaaggctttaatctcccccttggtgcagctgcttttgaagtgagtttcctcgccagagccccggctggacacgcagcggctcgcatcgcagagcgcagcgccggcgcggggccgcgagaacgcagcgcaggggagcagcccgaggcggacaccgcgagccgcccggcactcccgcagtccagccggctcctctagcccggccacggctccgctgcgggccacccaggattactcgcgtctggctccaggcgccgagaaggcgcgctgggcgcccgtggccgccgcgccagctcctcctcctcccgctgctcctgctcccggggcgagcgcgcagccccgagcccgccccgcgcctcccggagccctcccccccgctgctcccatgcgcgcgggtgggtcatgagcacagcgccctcgctttctgccctaagaagcagtaagcacagcggcggcggcggcggcggaggcggaggcggcggtgcagaccctgcctggaccagcgcgctctctggaaatagctccggccccggcccaggctcgtccccggccggcagcaccaagccttttgtgcacgccgtgcccccctctgaccccctgcgccaggccaaccgcctgccaatcaaggtgctgaagatgctgacggcacgaactggccacattttgcaccccgagtacctgcagcccctgccttccacgccggtcagccccatcgagctcgatgccaagaagagcccgctggcgctgttggcgcaaacatgttcgcagatcgggaagcccgacccctcgccctcctccaaactctcctcggttgcctccaacgggggcggcgcgggcggtgccggcggcggtgctgcgggcgacaaggacaccaaatcgggccccctgaagctgagcgacatcggcgtggaggacaagtcgagtttcaagccgtactccaaacccggctcggataagaaggagccgggaggcggcggtggaggcggtggcggtggcgggggcggcggcgggggtgtttcgtcggagaagtcgggattccgggtaccgagcgccacctgccagccattcacgcccaggacaggcagcccgagctccagcgcctcggcctgctcgccgggaggtatgctgtcctcggccgggggtgccccggagggcaaggacgacaagaaagacaccgacgtgggcggcggtggcaagggcaccgggggcgcctcggccgaagggggacccacggggctggcacacggccggattagctgcggcggcgggattaatgtggatgtgaaccagcatccggatgggggcccgggaggcaaggctctgggctcggactgcggcggttcatcgggctccagctccggctccggccccagcgcgcccacctcctcctcagtgttgggctctgggctggtggctcccgtgtcaccctacaagccgggccagacagtgttccctctgcctcccgcgggtatgacctacccaggcagcctggccggggcctacgccggctacccgccccagttcctgccacacggcgtggcacttgaccccaccaagccgggcagcctggtgggggcgcagctggcggcggccgcggccgggtctctgggctgcagtaagccggccggctccagccctttggccggagcgtctccgccgtccgtgatgacagccagtttgtgccgggacccttactgcctcagctaccactgcgctagccacctggcaggggcggcggccgccagcgcttcttgcgcacatgatccggctgctgcggctgcggcgctgaagtccggatacccgctggtgtaccccacgcacccgctgcacggtgtgcactcctcgctaacggccgccgcggctgctggcgccacaccgccctccctggccggccaccccctctacccctacggctttatgctccctaacgacccactcccccacatctgcaactgggtgtcggccaacgggccgtgcgacaagcgcttcgccacgtccgaagagctgctgagccacttgcggacccatacggcatttcccgggacagacaaactgctgtcgggctaccccagctcgtcgtctctggccagcgctgccgcggccgccatggcttgccacatgcacatccccacctcgggcgcaccgggcagccctgggacgctggcgctgcgcagcccccaccacgcgctgggactcagcagccgctaccacccctactccaagagcccgcttcccacgcctggcgcccccgtgccggtgcccgccgccaccggaccgtactactccccctacgccctctacggacagagactgaccaccgcctcggcgctggggtatcagtgagggcggccgggagggcgagcgagggagaggagggagagggggaggggaggagtccagggagaggcgggatcacggcccaggctgctgacacccgcgcgtggggaggactcgggccacgaaaggaaagaaatgtataccgtatctatctacccgacagcagcgaccgagacccggtgggacactccccttctccccactttcacctccccacccaaactttataaaagttgaaaaaatatcatttgactttttatagaaaaaaaaaggaaaaaataattgagaaagtgttcatctgaggactgcatcggtggacactggtatttatttatgttagctccaagcggaccggtggttcaaaagtgcattatttagtttgagctctgtaggtaaaaaggaggtgggaaaaattttaaaacttgagggtaaaaatgtggaaaacaaaccctcccatcccttgtagattataaataaaagcaaaaccgccacagaactagaggtcttctctttaatgttactttaaaattgctatgattgtattgtacgttatttaatgtctgattgaaacacaaatttacatgcatgtttgttacaaaaaaaatgaaaaaaaaagtcacaatttgtcagctctgatttcaaattgcaattatttttaaggtgtataccatcgaagagaatgggtatttttttgtatgtattctggaagaaaacaacaaaaaaaaaaagaaaaagaaaaaattctattccaaaacctcatttgccttattttgttctttaaaaggaacacttaactatttttaatttttaagtccacccgctgagaaggggacaaggtttacgtcatgtactaaaataatagacaatgtatcgctttaaagattaaaattccgtatatttgatgtattaaagggttttacttctt

SEQ ID NO: 202724 - DNA, 1442 bp, Homo sapiens
  Payload ID: 19982
  Gene Name: zinc finger protein 503
  ENST ID: ENST00000535216
  CDS Start-End: 337-1188
gctggacacgcagcggctcgcatcgcagagcgcagcgccggcgcggggccgcgagaacgcagcgcaggggagcagcccgaggcggacaccgcgagccgcccggcactcccgcagtccagccggctcctctagcccggccacggctccgctgcgggccacccaggattactcgcgtctggctccaggcgccgagaaggcgcgctgggcgcccgtggccgccgcgccagctcctcctcctcccgctgctcctgctcccggggcgagcgcgcagccccgagcccgccccgcgcctcccggagccctcccccccgctgctcccatgcgcgcgggtgggtcatgagcacagcgccctcgctttctgccctaagaagcagtaagcacagcggcggcggcggcggcggaggcggaggcggcggtgcagaccctgcctggaccagcgcgctctctggaaatagctccggccccggcccaggctcgtccccggccggcagcaccaagccttttgtgcacgccgtgcccccctctgaccccctgcgccaggccaaccgcctgccaatcaaggtgctgaagatgctgacggcacgaactggccacattttgcaccccgagtacctgcagcccctgccttccacgccggtcagccccatcgagctcgatgccaagaagagcccgctggcgctgttggcgcaaacatgttcgcagatcgggaagcccgacccctcgcccgccctggccggccaccccctctacccctacggctttatgctccctaacgacccactcccccacatctgcaactgggtgtcggccaacgggccgtgcgacaagcgcttcgccacgtccgaagagctgctgagccacttgcggacccatacggcatttcccgggacagacaaactgctgtcgggctaccccagctcgtcgtctctggccagcgctgccgcggccgccatggcttgccacatgcacatccccacctcgggcgcaccgggcagccctgggacgctggcgctgcgcagcccccaccacgcgctgggactcagcagccgctaccacccctactccaagagcccgcttcccacgcctggcgcccccgtgccggtgcccgccgccaccggaccgtactactccccctacgccctctacggacagagactgaccaccgcctcggcgctggggtatcagtgagggcggccgggagggcgagcgagggagaggagggagagggggaggggaggagtccagggagaggcgggatcacggcccaggctgctgacacccgcgcgtggggaggactcgggccacgaaaggaaagaaatgtataccgtatctatctacccgacagcagcgaccgagacccggtgggacactccccttctccccactttcacctccccacccaaactttataaaagttgaaaaaatatcatttgactttttat

SEQ ID NO: 202725 - DNA, 4095 bp, Homo sapiens
  Payload ID: 19983
  Gene Name: zinc finger protein 506
  Uniprot ID: Q5JVG8
  ENST ID: ENST00000443905
  CDS Start-End: 107-1441
ctgctctgtgccgtcagctcctagaggcccagcctctgtggccctgtgacctgcaggtattaggagggtcacagctaggacgccgggaccccctggaagcctagaaatgggaccattgcaatttagagatgtggccatagaattctctctggaggagtggcattgcctggacgctgcacagcggaatctatatagggatgtgatgttagagaactacagaaacctgatcttccttggtattgttgtctctaaaccaaacctgatcacctgtctggagcaaggaaaaaaacctttaactatgaagaggcatgagatgattgccaaacccccagttatgtattctcattttgcccaagacctttggtcagagcagagcataaaagattctttccaaaaagtgatactaagaagatatgaaaaatgtagacatgacaatttacagttaaaaaaaggctgtgaaagtgtagatgagtgtccagtgcacaaaagaggttataatggacttaaacaatgtttggcaactacccagagaaaaatatttcaatgtgatgaatatgtgaaattcttgcataaattttcaaattcaaacaaacataagataagagatactggaaaaaaatcttttaaatgtatagaatatgggaaaacttttaaccagtcttcaacccgtactacatataagaaaattgatgctggagagaaacgctataaatgtgaagaatgtggtaaagcctataagcagtcctcacaccttactacacataagaaaattcatactggagagaaaccctacaaatgtgaagaatgtggcaaagcctataagcagtcctgtaaccttactacacataagataattcatactggagagaaaccctacagatgtagagaatgtggcaaagcttttaaccaccctgcaacccttttttcacataagaaaattcatactggagagaaaccatacaagtgtgataaatgtggcaaagcctttatttcatcctcaacccttactaaacatgagataattcatactggagagaaaccctacaaatgtgaggaatgtggcaaagcttttaaccgttcctcaaaccttactaaacataagagaattcatactggagatgtaccctacaaatgtgacgaatgtggcaaaacctttacctggtactcaagcctctctaaacataagagagctcatactggagagaaaccctacaagtgtgaagaatgtggcaaagcctttactgcattctcaactctaactgaacataagataattcatactggagagaaaccgtacaaatgtgaagaatgtggcaaagcttttaactggtcctcagcccttaataaacataagaaaattcatattagacagaaaccctgcatagtgaagaatgtggaaaatcttttaaatgttcctcaacccttaataagcataagataattcatactggagagaaaccgtatgaatgtgatgaatgtgggaaagcctttaactagccctggactctgactaaatatgagaatttatatggaacataaaccctacaaatataaagaatgtgacaaagctttttaaggaagttctcaacccttattacacataatttatactggacagaaaccctacaagtgtgaagaatatggcaaagcctataacaacctgtcaactctttttgttttttgagatggagtttcactcttgtcacccaggctggagtgcaatggcacgatctcagctcactgcaacttctgcctcctggtatcaagccattctcctgcctcagcctcccgagtagctgggattactggtgcccaccaccatgcccagctaatttttgtatttttagtagagatggggtttcatcatgtttgccagactggtctccaactcctgacctcagatggtccacccacctcggcatcctaaagtgctgagatgacaggcatgagccacgacgcccagccacaagttctcaattcttaagagacatggcgataattcatgctgaagaggaactctacaaacctgaaagatgcaacagtgcttttaccaccacctccaacttttgtatacataaaaataaattatactaatgtgaaaccctggaaatgtatgaaatgagacaaagcgtttatatggttgccacacttgattgtagatggagtctcggtctttcacccaggctggagtgctgtggcacgatctcggctcactgcaacctccacctcccaggttcacaccattctcctgcctcagcttcctgagtagctgggactacaggcacccgccaccatgcccggctaatttttttgtatttttagtagagatggggtttcactgtgttagccgggatggtcaatctcctgaccttgtgatccgcccacctcggcctcccaaagtgctgggattacaggcgtgagccaccgcacctggccattatgccactaactttaacctatcccaccttaatcaagggtgtacttaaaagatggtaacaatatactgtttggtacgtagtggaataacatctctacttgtcactttgccagtggctttaaactgcaaatgagttgaattgttcccatagcttaaattttttttcttattgaaatctattactagtatttgtgggtatacagtatgtgtatatctttatgccttatatggcatattttgattcaggcctacaatatgtagtaattacattagggtaaagtatccatcacctctagcatttatcctttgaattacagtgtaattatacatttttaattattttaaaatgtacaattaaattgttactgactacaggtttatttttatggtcataataaaaattatacagaaaaataaataaaatatggccaggtgcagtggctcaggcctgtaatcccagcactttccaaggcaggtggattgtctgaggtcaggagttcaagaccatcctggccaacatagtgaaaccccgtctgaggaagcgctcctttcgcgggggcactcgctgtggatgaataaagtacactgacacacattctgctctgccagtccagctgagggtccgagccgcttacaggctccaaggccaggcacggtggctcatgcctataattccagcactttggagggccaaggcaggcggatcatctgaggtcaggagttcacgcaaatcagggggcccgtgaaaggcaactgagcagggatccatgggaaagacaccctcagaggcacaagattctctcgttacctttcagtttgctgatacttcagttaaagtctcctgggaaacgtctgcattaggttcttcctctgtagttcttcttaccttgcctgtaaaacaaaacctatctagtgtctgcataggtttccacttcttgtccccacctgaggaatggaaagcaacggcacagtccttgctcatgttttggagtgaaaggagcttgaaggtcatgtgagctttgccaaggcttctcctggcctcatgtcagatacagctcctaactcccaagcagcctaccatagtgtcctcctttttttgcgtgtgtgatggggtttcgcacttgttgcccaggctggagtgcaatggtacaatctcggctcactgcaacctccgcctcccaggttcaagtgattcttctgcctcagcctctcaagtaactgggattacaggcatgcgccactaagggaggagaccactcctcatattgtcttatgcccaatttctgcttccaaagaaagaagaagtaaaaactaaaaggcagaaatgaaatccacaggcagacagcccagcgccacaccatgggcctggtagttaaagatcgagccctgacctaatcggttatgttatctacagattacagacattgtatagaaaagcactttgaaaatccctgtcctgttctgttccattctaattactggtgcatgcagccttcagtcacttactccctgcttgctcaatcgatcacgaccctctcatgcaaacccccttagagttgtaagcccttaagagggataggaattgctcactcagggagctcagtttttgagacgtgagtcttgccaatgctcccggccgaataaagcccttccttctt

SEQ ID NO: 202726 - DNA, 1385 bp, Homo sapiens
  Payload ID: 19983
  Gene Name: zinc finger protein 506
  Uniprot ID: Q5JVG8
  ENST ID: ENST00000450683
  CDS Start-End: 147-1385
ttgtctctcgctgacgccagagatccagctatcgtcttcactgctctgtgccgtcagctcctagaggcccagcctctgtggccctgtgacctgcaggtattaggagggtcacagctaggacgccgggaccccctggaagcctagaaatgggaccattgcaatttagagatgtggccatagaattctctctggaggagtggcattgcctggacgctgcacagcggaatctatatagggatgtgatgttagagaactacagaaacctgatcttccttgttatgtattctcattttgcccaagacctttggtcagagcagagcataaaagattctttccaaaaagtgatactaagaagatatgaaaaatgtagacatgacaatttacagttaaaaaaaggctgtgaaagtgtagatgagtgtccagtgcacaaaagaggttataatggacttaaacaatgtttggcaactacccagagaaaaatatttcaatgtgatgaatatgtgaaattcttgcataaattttcaaattcaaacaaacataagataagagatactggaaaaaaatcttttaaatgtatagaatatgggaaaacttttaaccagtcttcaacccgtactacatataagaaaattgatgctggagagaaacgctataaatgtgaagaatgtggtaaagcctataagcagtcctcacaccttactacacataagaaaattcatactggagagaaaccctacaaatgtgaagaatgtggcaaagcctataagcagtcctgtaaccttactacacataagataattcatactggagagaaaccctacagatgtagagaatgtggcaaagcttttaaccaccctgcaacccttttttcacataagaaaattcatactggagagaaaccatacaagtgtgataaatgtggcaaagcctttatttcatcctcaacccttactaaacatgagataattcatactggagagaaaccctacaaatgtgaggaatgtggcaaagcttttaaccgttcctcaaaccttactaaacataagagaattcatactggagatgtaccctacaaatgtgacgaatgtggcaaaacctttacctggtactcaagcctctctaaacataagagagctcatactggagagaaaccctacaagtgtgaagaatgtggcaaagcctttactgcattctcaactctaactgaacataagataattcatactggagagaaaccgtacaaatgtgaagaatgtggcaaagcttttaactggtcctcagcccttaataaacataagaaaattcatattagacagaaaccctgcatagtgaagaatgtggaaaatcttttaaatgttcctcaacccttaataagcataagataa

SEQ ID NO: 202727 - DNA, 1424 bp, Homo sapiens
  Payload ID: 19983
  Gene Name: zinc finger protein 506
  Uniprot ID: Q5JVG8
  ENST ID: ENST00000540806
  CDS Start-End: 90-1424
ctcctagaggcccagcctctgtggccctgtgacctgcaggtattaggagggtcacagctaggacgccgggaccccctggaagcctagaaatgggaccattgcaatttagagatgtggccatagaattctctctggaggagtggcattgcctggacgctgcacagcggaatctatatagggatgtgatgttagagaactacagaaacctgatcttccttggtattgttgtctctaaaccaaacctgatcacctgtctggagcaaggaaaaaaacctttaactatgaagaggcatgagatgattgccaaacccccagttatgtattctcattttgcccaagacctttggtcagagcagagcataaaagattctttccaaaaagtgatactaagaagatatgaaaaatgtagacatgacaatttacagttaaaaaaaggctgtgaaagtgtagatgagtgtccagtgcacaaaagaggttataatggacttaaacaatgtttggcaactacccagagaaaaatatttcaatgtgatgaatatgtgaaattcttgcataaattttcaaattcaaacaaacataagataagagatactggaaaaaaatcttttaaatgtatagaatatgggaaaacttttaaccagtcttcaacccgtactacatataagaaaattgatgctggagagaaacgctataaatgtgaagaatgtggtaaagcctataagcagtcctcacaccttactacacataagaaaattcatactggagagaaaccctacaaatgtgaagaatgtggcaaagcctataagcagtcctgtaaccttactacacataagataattcatactggagagaaaccctacagatgtagagaatgtggcaaagcttttaaccaccctgcaacccttttttcacataagaaaattcatactggagagaaaccatacaagtgtgataaatgtggcaaagcctttatttcatcctcaacccttactaaacatgagataattcatactggagagaaaccctacaaatgtgaggaatgtggcaaagcttttaaccgttcctcaaaccttactaaacataagagaattcatactggagatgtaccctacaaatgtgacgaatgtggcaaaacctttacctggtactcaagcctctctaaacataagagagctcatactggagagaaaccctacaagtgtgaagaatgtggcaaagcctttactgcattctcaactctaactgaacataagataattcatactggagagaaaccgtacaaatgtgaagaatgtggcaaagcttttaactggtcctcagcccttaataaacataagaaaattcatattagacagaaaccctgcatagtgaagaatgtggaaaatcttttaaatgttcctcaacccttaataagcataagataa

SEQ ID NO: 202728 - DNA, 1007 bp, Homo sapiens
  Payload ID: 19983
  Gene Name: zinc finger protein 506
  ENST ID: ENST00000545006
  CDS Start-End: 120-356
gctatcgtcttcactgctctgtgccgtcagctcctagaggcccagcctctgtggccctgtgacctgcaggtattaggagggtcacagctaggacgccgggaccccctggaagcctagaaatgggaccattgcaatttagagatgtggccatagaattctctctggaggagtggcattgcctggacgctgcacagcggaatctatatagggatgtgatgttagagaactacagaaacctgatcttccttggtattgttgtctctaaaccaaacctgatcacctgtctggagcaaggaaaaaaacctttaactatgaagaggcatgagatgattgccaaacccccaggtggtctataaagaggaatgttttatgagctattgagaaggctatgtatcctgatgatgttgaggagtgttctctataccttcattagaaataattgttttttactgccttctagtcctctgttcccttactaatatactgtcttgttttattattattacagaaagtggggtattgaaatatcctactataattatattgctctattcaactttgttagtatttgctttatatatttgaaaccccaatttgagacacacacacgcacaaatacacacatggataaacaaatttgtcataggtttccatgaattaatctatatattgtttaatgtccttcttttttgaagttttaacttaaagtacattttataaaatatgacagcttttgactttaacaatgtagcttgtgtaatattattttgacctcttctgctctcattttgttagtatttacatgaaatttctacttggtcttgccactttcagtcttttcttatcattagatctcagctgactcttgtaaaaaggcaagttgagtcttgatttttaaaattttttaatgagcctttttagaagtatgtctcttgattggaaagataattatatttaaatagttttctgaaagagaaaaacttactgttaataaaataattgttttg

SEQ ID NO: 202729 - DNA, 892 bp, Homo sapiens
  Payload ID: 19983
  Gene Name: zinc finger protein 506
  ENST ID: ENST00000586260
  CDS Start-End: 130-543
cagagatccagctatcgtcttcactgctctgtgccgtcagctcctagaggcccagcctctgtggccctgtgacctgcaggtattaggagggtcacagctaggacgccgggaccccctggaagcctagaaatgggaccattgcaatttagagatgtggccatagaattctctctggaggagtggcattgcctggacgctgcacagcggaatctatatagggatgtgatgttagagaactacagaaacctgatcttccttggtattgttgtctctaaaccaaacctgatcacctgtctggagcaaggaaaaaaacctttaactatgaagaggcatgagatgattgccaaacccccagatggagtctcggtctttcacccaggctggagtgctgtggcacgatctcggctcactgcaacctccacctcccaggtggattgtctgaggtcaggagttcaagaccatcctggccaacatagtgaaaccccgtctgaggaagcgctcctttcgcgggggcactcgctgtggatgaataaagtacactgacacacattctgctctgccagtccagctgagggtccgagccgcttacaggctccaaggccaggcacggtggctcatgcctataattccagcactttggagggccaaggcaggcggatcatctgaggtcaggagttcacgcaaatcagggggcccgtgaaaggcaactgagcagggatccatgggaaagacaccctcagaggcacaagattctctcgttacctttcagtttgctgatacttcagttaaagtctcctgggaaacgtctgcattaggttcttcctctgtagttcttcttaccttgcctgtaaaacaaaacctatctagtgtctgcataggtttccacttcttg

SEQ ID NO: 202730 - DNA, 575 bp, Homo sapiens
  Payload ID: 19983
  Gene Name: zinc finger protein 506
  ENST ID: ENST00000587452
  CDS Start-End: 108-386
actgctctgtgccgtcagctcctagaggcccagcctctgtggccctgtgacctgcaggtattaggagggtcacagctaggacgccgggaccccctggaagcctagaaatgggaccattgcaatttagagatgtggccatagaattctctctggaggagtggcattgcctggacgctgcacagcggaatctatatagggatgtgatgttagagaactacagaaacctgatcttccttggtattgttgtctctaaaccaaacctgatcacctgtctggagcaaggaaaaaaacctttaactatgaagaggcatgagatgattgccaaacccccagagacggggtttcaccgtgttagccaggatggtctccatctcctgaccttgtgatccgcccgcctcggcctcccaaagtgctgggattacaggcgtgagccaccgtgcctggcctcggatattttcttagtagtaccttgggggattatctaaaacctctaaaagatccaacaatatattttaatgtagtaaaaaattaacttcagttgcatacagaaattcctcattattacatctaccttc

SEQ ID NO: 202731 - DNA, 429 bp, Homo sapiens
  Payload ID: 19983
  Gene Name: zinc finger protein 506
  ENST ID: ENST00000590766
  CDS Start-End: 108-429
actgctctgtgccgtcagctcctagaggcccagcctctgtggccctgtgacctgcaggtattaggagggtcacagctaggacgccgggaccccctggaagcctagaaatgggaccattgcaatttagagatgtggccatagaattctctctggaggagtggcattgcctggacgctgcacagcggaatctatatagggatgtgatgttagagaactacagaaacctgatcttccttggtattgttgtctctaaaccaaacctgatcacctgtctggagcaaggaaaaaaacctttaactatgaagaggcatgagatgattgccaaacccccagatggagtctcggtctttcacccaggttgcagtgagctgagatcacgccactgcattccagtctgggcaacagagcaagactctatttcaaaaaaaa

SEQ ID NO: 202732 - DNA, 4140 bp, Homo sapiens
  Payload ID: 19983
  Gene Name: zinc finger protein 506
  Uniprot ID: Q5JVG8
  ENST ID: ENST00000591639
  CDS Start-End: 149-1483
cattgtctctcgctgacgccagagatccagctatcgtcttcactgctctgtgccgtcagctcctagaggcccagcctctgtggccctgtgacctgcaggtattaggagggtcacagctaggacgccgggaccccctggaagcctagaaatgggaccattgcaatttagagatgtggccatagaattctctctggaggagtggcattgcctggacgctgcacagcggaatctatatagggatgtgatgttagagaactacagaaacctgatcttccttggtattgttgtctctaaaccaaacctgatcacctgtctggagcaaggaaaaaaacctttaactatgaagaggcatgagatgattgccaaacccccagttatgtattctcattttgcccaagacctttggtcagagcagagcataaaagattctttccaaaaagtgatactaagaagatatgaaaaatgtagacatgacaatttacagttaaaaaaaggctgtgaaagtgtagatgagtgtccagtgcacaaaagaggttataatggacttaaacaatgtttggcaactacccagagaaaaatatttcaatgtgatgaatatgtgaaattcttgcataaattttcaaattcaaacaaacataagataagagatactggaaaaaaatcttttaaatgtatagaatatgggaaaacttttaaccagtcttcaacccgtactacatataagaaaattgatgctggagagaaacgctataaatgtgaagaatgtggtaaagcctataagcagtcctcacaccttactacacataagaaaattcatactggagagaaaccctacaaatgtgaagaatgtggcaaagcctataagcagtcctgtaaccttactacacataagataattcatactggagagaaaccctacagatgtagagaatgtggcaaagcttttaaccaccctgcaacccttttttcacataagaaaattcatactggagagaaaccatacaagtgtgataaatgtggcaaagcctttatttcatcctcaacccttactaaacatgagataattcatactggagagaaaccctacaaatgtgaggaatgtggcaaagcttttaaccgttcctcaaaccttactaaacataagagaattcatactggagatgtaccctacaaatgtgacgaatgtggcaaaacctttacctggtactcaagcctctctaaacataagagagctcatactggagagaaaccctacaagtgtgaagaatgtggcaaagcctttactgcattctcaactctaactgaacataagataattcatactggagagaaaccgtacaaatgtgaagaatgtggcaaagcttttaactggtcctcagcccttaataaacataagaaaattcatattagacagaaaccctgcatagtgaagaatgtggaaaatcttttaaatgttcctcaacccttaataagcataagataattcatactggagagaaaccgtatgaatgtgatgaatgtgggaaagcctttaactagccctggactctgactaaatatgagaatttatatggaacataaaccctacaaatataaagaatgtgacaaagctttttaaggaagttctcaacccttattacacataatttatactggacagaaaccctacaagtgtgaagaatatggcaaagcctataacaacctgtcaactctttttgttttttgagatggagtttcactcttgtcacccaggctggagtgcaatggcacgatctcagctcactgcaacttctgcctcctggtatcaagccattctcctgcctcagcctcccgagtagctgggattactggtgcccaccaccatgcccagctaatttttgtatttttagtagagatggggtttcatcatgtttgccagactggtctccaactcctgacctcagatggtccacccacctcggcatcctaaagtgctgagatgacaggcatgagccacgacgcccagccacaagttctcaattcttaagagacatggcgataattcatgctgaagaggaactctacaaacctgaaagatgcaacagtgcttttaccaccacctccaacttttgtatacataaaaataaattatactaatgtgaaaccctggaaatgtatgaaatgagacaaagcgtttatatggttgccacacttgattgtagatggagtctcggtctttcacccaggctggagtgctgtggcacgatctcggctcactgcaacctccacctcccaggttcacaccattctcctgcctcagcttcctgagtagctgggactacaggcacccgccaccatgcccggctaatttttttgtatttttagtagagatggggtttcactgtgttagccgggatggtcaatctcctgaccttgtgatccgcccacctcggcctcccaaagtgctgggattacaggcgtgagccaccgcacctggccattatgccactaactttaacctatcccaccttaatcaagggtgtacttaaaagatggtaacaatatactgtttggtacgtagtggaataacatctctacttgtcactttgccagtggctttaaactgcaaatgagttgaattgttcccatagcttaaattttttttcttattgaaatctattactagtatttgtgggtatacagtatgtgtatatctttatgccttatatggcatattttgattcaggcctacaatatgtagtaattacattagggtaaagtatccatcacctctagcatttatcctttgaattacagtgtaattatacatttttaattattttaaaatgtacaattaaattgttactgactacaggtttatttttatggtcataataaaaattatacagaaaaataaataaaatatggccaggtgcagtggctcaggcctgtaatcccagcactttccaaggcaggtggattgtctgaggtcaggagttcaagaccatcctggccaacatagtgaaaccccgtctgaggaagcgctcctttcgcgggggcactcgctgtggatgaataaagtacactgacacacattctgctctgccagtccagctgagggtccgagccgcttacaggctccaaggccaggcacggtggctcatgcctataattccagcactttggagggccaaggcaggcggatcatctgaggtcaggagttcacgcaaatcagggggcccgtgaaaggcaactgagcagggatccatgggaaagacaccctcagaggcacaagattctctcgttacctttcagtttgctgatacttcagttaaagtctcctgggaaacgtctgcattaggttcttcctctgtagttcttcttaccttgcctgtaaaacaaaacctatctagtgtctgcataggtttccacttcttgtccccacctgaggaatggaaagcaacggcacagtccttgctcatgttttggagtgaaaggagcttgaaggtcatgtgagctttgccaaggcttctcctggcctcatgtcagatacagctcctaactcccaagcagcctaccatagtgtcctcctttttttgcgtgtgtgatggggtttcgcacttgttgcccaggctggagtgcaatggtacaatctcggctcactgcaacctccgcctcccaggttcaagtgattcttctgcctcagcctctcaagtaactgggattacaggcatgcgccactaagggaggagaccactcctcatattgtcttatgcccaatttctgcttccaaagaaagaagaagtaaaaactaaaaggcagaaatgaaatccacaggcagacagcccagcgccacaccatgggcctggtagttaaagatcgagccctgacctaatcggttatgttatctacagattacagacattgtatagaaaagcactttgaaaatccctgtcctgttctgttccattctaattactggtgcatgcagccttcagtcacttactccctgcttgctcaatcgatcacgaccctctcatgcaaacccccttagagttgtaagcccttaagagggataggaattgctcactcagggagctcagtttttgagacgtgagtcttgccaatgctcccggccgaataaagcccttccttctttaa

SEQ ID NO: 202733 - DNA, 571 bp, Homo sapiens
  Payload ID: 19983
  Gene Name: zinc finger protein 506
  ENST ID: ENST00000590319
  CDS Start-End: 126-571
agctatcgtcttcactgctctgtgccgtcagctcctagaggcccagcctctgtggccctgtgacctgcaggtattaggagggtcacagctaggacgccgggaccccctggaagcctagaaatgttatgtattctcattttgcccaagacctttggtcagagcagagcataaaagattctttccaaaaagtgatactaagaagatatgaaaaatgtagacatgacaatttacagttaaaaaaaggctgtgaaagtgtagatgagtgtccagtgcacaaaagaggttataatggacttaaacaatgtttggcaactacccagagaaaaatatttcaatgtgatgaatatgtgaaattcttgcataaattttcaaattcaaacaaacataagataagagatactggaaaaaaatcttttaaatgtatagaatatgggaaaacttttaaccagtcttcaacccgtactacatataagaaaattgatgctggagagaaacgctataaatgtgaagaatgtggtaaagcctataagcagtcctcacaccttactacacataagaaaattcatactgg

SEQ ID NO: 202734 - DNA, 831 bp, Homo sapiens
  Payload ID: 19983
  Gene Name: zinc finger protein 506
  ENST ID: ENST00000587461
  CDS Start-End: 138-464
gctgacgccagagatccagctatcgtcttcactgctctgtgccgtcagctcctagaggcccagcctctgtggccctgtgacctgcaggtattaggagggtcacagctaggacgccgggaccccctggaagcctagaaatgggaccattgcaatttagagatgtggccatagaattctctctggaggagtggcattgcctggacgctgcacagcggaatctatatagggatgtgatgttagagaactacagaaacctgatcttccttggtattgttgtctctaaaccaaacctgatcacctgtctggagcaaggaaaaaaacctttaactatgaagaggcatgagatgattgccaaacccccaggccaggcacggtggctcatgcctataattccagcactttggagggccaaggcaggcggatcatctgaggtcaggagttcacgcaaatcagggggcccgtgaaaggcaactgagcagggatccatgggaaagacaccctcagaggcacaagattctctcgttacctttcagtttgctgatacttcagttaaagtctcctgggaaacgtctgcattaggttcttcctctgtagttcttcttaccttgcctgtaaaacaaaacctatctagtgtctgcataggtttccacttcttgtccccacctgaggaatggaaagcaacggcacagtccttgctcatgttttggagtgaaaggagcttgaaggtcatgtgagctttgccaaggcttctcctggcctcatgtcagatacagctcctaactcccaagcagcctaccatagtgtcctcctttttttgcgtgtgtgatgggg

SEQ ID NO: 202735 - DNA, 7638 bp, Homo sapiens
  Payload ID: 19984
  Gene Name: zinc finger protein 507
  Uniprot ID: Q8TCN5
  ENST ID: ENST00000311921
  CDS Start-End: 193-3054
gacccacccgcggctcacgtgatccgtccccagcgccgccattttggagctccggatgaggagggggaaaccgggggaaaagagggaaaagagccgggagagaggtgggcaaggacgagggcgagggcacggccgggtcctggctggccaaacgaggctcgcggaagcagcagccgccgcctgaccgcagatatggaagaaagtagcagtgttgccatgttggtgccagatattggggaacaggaagctatactgactgctgaaagtatcatcagtccttcattggaaattgatgaacaaagaaaaactaaaccagatccattaatccatgttatccagaagttaagcaagatagtggaaaatgaaaagtcacaaaaatgtcttttaattgggaagaaacgcccacgttcaagtgctgcaacacactctcttgaaacccaagaactttgtgagattccggctaaagtaatccagtcacctgctgctgatactagaagggctgagatgtcacaaacaaattttacccctgacactcttgcccagaatgaagggaaggctatgtcttatcagtgtagcctttgtaagtttctatcatcatccttttccgtgttaaaagatcatattaagcaacatggtcagcaaaatgaagtgatactgatgtgctcagagtgccatattacatctagaagccaggaggaacttgaagcccacgtggtgaatgaccatgacaatgatgccaatatccacacccaatccaaagcccaacagtgcgtaagcccctccagctctttgtgtcggaaaaccacagaaagaaatgaaaccattccagatatcccagtaagtgtggacaatctacagactcatactgtccaaactgcatctgtggcagaaatgggtaggaggaaatggtatgcatacgaacagtacggcatgtatcgatgcttgttttgtagttatacttgtggccagcagagaatgttgaaaacacacgcttggaaacatgctggggaggttgattgctcctatccaatctttgaaaatgaaaatgaacccctaggcctgctggattcttcagcagctgctgcgcctggtggggtcgatgcagtcgtcattgctattggagagagtgaactgagtatccacaatgggccatcagtgcaagtgcagatttgcagctcagaacagttatcatcttcatctcctttagaacagagtgcagaaagaggagtacacctaagtcagtcagttaccctggaccccaatgaggaagaaatgctagaagtgatttctgatgcagaggagaatctgattcctgatagcctgcttacatcagcacagaaaatcatcagcagcagccccaataaaaaagggcatgttaacgtgatagtggagcgattgccaagtgctgaagaaaccctttcacagaagcgcttcctcatgaacactgaaatggaagaagggaaggacctgagcctgacagaagctcagattgggcgcgaaggaatggatgatgtttatcgtgctgataaatgtactgttgatattgggggattgatcataggctggagcagttcagagaaaaaagacgagttaatgaataaaggcctggctactgatgagaatgccccaccaggccggagaaggacaaattctgagtctcttcgattacactcattagctgcagaagcccttgtcacaatgcctataagagctgcagagttgacaagagccaacctggggcactatggagatataaaccttttagatccagatactagtcaaaggcaagtagatagtacattggcagcgtactcaaaaatgatgtcgccacttaaaaactcttcagatggattaactagtcttaaccaaagcaactccaccttggtagcactcccagagggtaggcaggaattgtcagatgggcaggttaagacaggcatcagcatgtccttactcaccgtcattgaaaaattgagagaaaggacagaccaaaacgcttcagacgatgacattttgaaagagttgcaggacaacgcccagtgccaacccaacagcgatacaagtttgtccggaaacaatgtggtggaatacatcccgaatgctgaacgaccctaccgttgccgcctgtgtcactacacaagtggcaacaagggctacatcaagcagcacttacgagtccatcgacagagacagccttatcagtgtcctatctgcgagcacatagcggacaacagcaaagatttggagagtcacatgatccaccactgtaagacaagaatataccagtgcaagcagtgtgaagaatccttccattataagagtcaattgaggaaccatgagagagaacagcacagtcttccagataccttgtcaatagcaacttctaatgagccaagaatttccagtgatacagctgatggaaaatgtgtccaggaagggaataagtcttcagtccagaaacaatatagatgtgatgtgtgtgattatacaagtacaacatatgttggtgtcagaaaccacaggcgaatccataactctgataagccgtacagatgctctctgtgtgggtatgtgtgtagccatcctccttctttgaagtctcatatgtggaaacatgcaagtgaccaaaattacaactacgaacaagtaaacaaggctattaacgacgcgatttcacaaagtggcagagttctggggaaatcccctggaaagactcaattaaagagcagtgaagagagtgcagatcccgtcactggaagttcagaaaatgcagtgtcatcttcagaactgatgtcccagactcccagtgaagttctgggtaccaacgagaatgagaaactgagccctacaagtaatacctcatatagtttagaaaaaatctccagtctggcccctcctagcatggagtactgcgttttactcttctgctgttgtatttgtggttttgaatcaaccagcaaagaaaacctcttggatcatatgaaagagcacgagggtgaaattgtaaacatcatcctgaataaggaccacaatacagctctaaacacaaattaggtggaataatgactcgagcaggaaagcagtagaagaggattccttcaccacagtttcacctttacgctgtcagacaacttcctgccacagaagaagtcgttgatgtgatttttgaggaaatgacagatgtgactttggaaccaaacttgtaataaaaggaattccaaatggacaagcagtaatgatatttaaatattttgagtgagggggagtgggtcaaagaggaagtagaggtgtaatcctgtattaaccctctgtcaccccttcttagtgtcgagtgtatttattaataaaagcttattagagtgtagaaatgccagcaagagttaagaaagggcttttcaggaactattctaaaagtcataaaagggtcacagtcttaagcagagcttagttttcttctcacttgtcaaatgcagactgtgaggcctccagtgagaaatgggaggcagttctgggagggggttttttcagtgtcaccaacagagtcaacaaggaaacataattagagggctttgaaatgatctactgaaatacctaaattgatagaaattaatcatactcaatctaggacatgttcctttactccttaaaaaagaaaggaaagatctctaaattcaaagctagattgtaaataggcattcaagaagtattgtcttaaatttacgatgaatttcttgtgagcagaggacgaaacaggtgaattctcaccagactcaaaccagatctcaattcgtagtaatgctaaatcgtcttccgtgttctcagaggttcttttcagtgtctgtcagaacttggcatactttctccatagtacgtagaccttctaatactctgctaaatgaaaccacacttgttatctgaaagtgtgtgaaagaaacaatgtatgaaaatttacatttgatcatccggcattggaaatagtttgaactatttccaaaaatcccttaggggatgaggggtgaaatttaaaagctcctgaaaatgagtactgctgtgttgagcttttctttcctggggtatattaatttagttatatttagcagaagaggaatataaccaaatgtgactaaaatatagcagaaattcaggttgtttgtaaaaattttaataacaaatagcatttggcaagtctataggattcttcctatctggaaattctattttgttagagtgcgataggacatatggaaaaccaacacaaagtgctttagcattaaaactcaccatcaaatagatgtaatcttattaattacacattttgtattttaattatttcaaggagtgaagaaaacagggtgtttttgtttttgtagttctgattactcatttatgcattgttttgtttaagtaaattctgcctacaagtgaaaaggtcggtgcgctcttctgtgcaccatcctcacggtgctatttccgaatatctgaatattgatttctaacacctggatgaggctgtgaccgatcaacttggaacactgtaaaggttttcgaatgggatacgctgtaggcacgttttaagaagtattctgttcctaaagtccaggtatgattggattaatatttataaaattattattaggaattatttaagtggggccaggcatcttgcaacattttctgatttttttttctttctttctaatctcattttggtgatatttaaacaaacataaatgattgtaactttgcagcttttttatttaggtagctttaatttatttatgaaagttaatccatttctgatacgtggtttttaaaaatatgaaatggatttatatatactatattcctcaaatccactgtatgtggacttatattcattttctccttttttcggaattgaaacattttaatttcaaattcaaatagaacatttaaaatgatttcattattattacccatactgttgccactcatattgtaagtcagttttttcattgctggtacaatgactcagtatttctttataaaaatctgttgttctgaaaatcaacaaccttagaaggattttgtcttagaaaatttccttggctttagttttatatcatatttagaaaataataatgaaaagcatccccaaaatttcaatgatgtgaatttttaaattacctttatttctttaaactaattccattgattgttacttaaattttccacctggaatcatggatttaaaatttccccacctcatggggaaaaaactaacccagaagttcaaagcctttaaagtttcatctgattctggccttagaattgtccttaaaagctttctcctggccgataggaggaagcatatatcaaggaggttctttcccttcccattatcattttgtggcaagccttaagttaacaatgtgtctaccaagaacaattgagttttctaaaagtaataatgaagattatgcaattctaactgtagaagagatagctattaaaataatcagtagcctgggcatagtggctcacacctgtaatcccaatactttagaaggccaaggctggaggactgcttgagtccagaagtttaagaccagcctgggcaacacggggagaccctgtctctacaagaaattaaaaattagccaggcatagttggcacgtgcctgtagcaccagctacttgggaggttaaggtgggaggatcacttgagcctgggagatagaggcttgcagtgagccgtgatggcaccattgcactccaaccggggtgacagatgaggtcctctgtttacctccccccccaaaaaaaaaattcagtaggaattccttcatagaataacatgttatttattggtattgacttcttattagacagagctcatagtatttgttttctgctccgaacacttaaaaaatactaagacgtgatagtgaaaatagctttgaaaagaaactacatatggcaaaggtggggaggggggaagatgatgcattctgatcattataaagaatacttttcagggctctatcattttctccctttctctaatcatccagaatatggcgggtgtcccagtgttcaacagtatcatgctaatattccatttgatcggtagtccaagttctttggccagatagtgcaatgttgtgacaccgaccgaagcctttgttctggatctttcttcctattgaaggtggctgctggtggcttcataattttctgttttttttctcacaaagtaaatggtgggcatccatgtttacattgcaccttcccgtgctgtaattggcttgacaaagacaagcaggcttctctgttgagacttattgtgtttttagttttcatagacacttatttaatctttttaaattgtacagcaaggtgctctaagtaatattcgataaaatatatttaatagaaatttgcgtttgatattcatgaacatgaatacatgtatttttttaagaaataagtattgtgtaacactatggcattgcttctatagccaaagtataaaaatttctggaatactgacatgtaaagactacagttaattctgacactgtatcttattaaaataggatgatttgcattttgtaaaattatcctgcacatcaagctgcatgccttaaagcggaaactctaggactgtgttcatgggagagcagttcatctgttcagaacagtgaggcaaggtctgtagtgcttctttaactacctttggaaatactgtacaatgttagaataatttattttgctttacaggagtttgtcatgtattgactttaatattgtattttggtaataaattttttgttaaaaaaaacttggctccaagttctattaaccacaggttgtgttcattcttttcctggaaatgatgactttattgcttagaaagttgtaaataattaaaagcttcccaagagttaaatgaaggttatgatgactcttgataacttgttaatctgttgctgactagcattagactgttacacgaagataaactgaataagcatttagctttttaaatcattttaaaaattaagtctaattttgaagcttttttccttgctacccagttcagtttctcttccaaatgtgacacgcttatatgctttcaattctgatatagtcaaagtgctaaagactagttctgctattgacgaaggaattagcattccttagtgaaggccaaaaactacagtgatatgttcacaccttgatcactctgtcgtctatacagacagctattgacatatttgttgcattgacgaagctaacatcatctgactgtatcgtgggtctggttatccatttgtgccctagaatcctgggtcacctcagttgaaagtgaccaaggccaaatatttcgtcccatgcttcccagggacaacataatcatatcccctgtctttgaaaaacccaatctgaaactgtgtcactaacctccaaattaaagaatccgagcatggaagctctagaacgtatggtccagtgtggcagccactataatatctaagtgtaaaatacatagcagttgcaaagacttagtacaaaaagaatggaaatgtattaacagttttttatattgattacatgttgaaatgatattttggtttaaataaaatattaaaatta

SEQ ID NO: 202736 - DNA, 3194 bp, Homo sapiens
  Payload ID: 19984
  Gene Name: zinc finger protein 507
  Uniprot ID: Q8TCN5
  ENST ID: ENST00000355898
  CDS Start-End: 162-3023
ggcacggccgggtcctggctggccaaacgaggctcgcggaagcagcagccgccgcctgaccgcagctggattttgaagattgatccaagggactgtattaatttcaggaattgatttgaaagacactggctctgccacttaacagccatgtaaccttggatatggaagaaagtagcagtgttgccatgttggtgccagatattggggaacaggaagctatactgactgctgaaagtatcatcagtccttcattggaaattgatgaacaaagaaaaactaaaccagatccattaatccatgttatccagaagttaagcaagatagtggaaaatgaaaagtcacaaaaatgtcttttaattgggaagaaacgcccacgttcaagtgctgcaacacactctcttgaaacccaagaactttgtgagattccggctaaagtaatccagtcacctgctgctgatactagaagggctgagatgtcacaaacaaattttacccctgacactcttgcccagaatgaagggaaggctatgtcttatcagtgtagcctttgtaagtttctatcatcatccttttccgtgttaaaagatcatattaagcaacatggtcagcaaaatgaagtgatactgatgtgctcagagtgccatattacatctagaagccaggaggaacttgaagcccacgtggtgaatgaccatgacaatgatgccaatatccacacccaatccaaagcccaacagtgcgtaagcccctccagctctttgtgtcggaaaaccacagaaagaaatgaaaccattccagatatcccagtaagtgtggacaatctacagactcatactgtccaaactgcatctgtggcagaaatgggtaggaggaaatggtatgcatacgaacagtacggcatgtatcgatgcttgttttgtagttatacttgtggccagcagagaatgttgaaaacacacgcttggaaacatgctggggaggttgattgctcctatccaatctttgaaaatgaaaatgaacccctaggcctgctggattcttcagcagctgctgcgcctggtggggtcgatgcagtcgtcattgctattggagagagtgaactgagtatccacaatgggccatcagtgcaagtgcagatttgcagctcagaacagttatcatcttcatctcctttagaacagagtgcagaaagaggagtacacctaagtcagtcagttaccctggaccccaatgaggaagaaatgctagaagtgatttctgatgcagaggagaatctgattcctgatagcctgcttacatcagcacagaaaatcatcagcagcagccccaataaaaaagggcatgttaacgtgatagtggagcgattgccaagtgctgaagaaaccctttcacagaagcgcttcctcatgaacactgaaatggaagaagggaaggacctgagcctgacagaagctcagattgggcgcgaaggaatggatgatgtttatcgtgctgataaatgtactgttgatattgggggattgatcataggctggagcagttcagagaaaaaagacgagttaatgaataaaggcctggctactgatgagaatgccccaccaggccggagaaggacaaattctgagtctcttcgattacactcattagctgcagaagcccttgtcacaatgcctataagagctgcagagttgacaagagccaacctggggcactatggagatataaaccttttagatccagatactagtcaaaggcaagtagatagtacattggcagcgtactcaaaaatgatgtcgccacttaaaaactcttcagatggattaactagtcttaaccaaagcaactccaccttggtagcactcccagagggtaggcaggaattgtcagatgggcaggttaagacaggcatcagcatgtccttactcaccgtcattgaaaaattgagagaaaggacagaccaaaacgcttcagacgatgacattttgaaagagttgcaggacaacgcccagtgccaacccaacagcgatacaagtttgtccggaaacaatgtggtggaatacatcccgaatgctgaacgaccctaccgttgccgcctgtgtcactacacaagtggcaacaagggctacatcaagcagcacttacgagtccatcgacagagacagccttatcagtgtcctatctgcgagcacatagcggacaacagcaaagatttggagagtcacatgatccaccactgtaagacaagaatataccagtgcaagcagtgtgaagaatccttccattataagagtcaattgaggaaccatgagagagaacagcacagtcttccagataccttgtcaatagcaacttctaatgagccaagaatttccagtgatacagctgatggaaaatgtgtccaggaagggaataagtcttcagtccagaaacaatatagatgtgatgtgtgtgattatacaagtacaacatatgttggtgtcagaaaccacaggcgaatccataactctgataagccgtacagatgctctctgtgtgggtatgtgtgtagccatcctccttctttgaagtctcatatgtggaaacatgcaagtgaccaaaattacaactacgaacaagtaaacaaggctattaacgacgcgatttcacaaagtggcagagttctggggaaatcccctggaaagactcaattaaagagcagtgaagagagtgcagatcccgtcactggaagttcagaaaatgcagtgtcatcttcagaactgatgtcccagactcccagtgaagttctgggtaccaacgagaatgagaaactgagccctacaagtaatacctcatatagtttagaaaaaatctccagtctggcccctcctagcatggagtactgcgttttactcttctgctgttgtatttgtggttttgaatcaaccagcaaagaaaacctcttggatcatatgaaagagcacgagggtgaaattgtaaacatcatcctgaataaggaccacaatacagctctaaacacaaattaggtggaataatgactcgagcaggaaagcagtagaagaggattccttcaccacagtttcacctttacgctgtcagacaacttcctgccacagaagaagtcgttgatgtgatttttgaggaaatgacagatgtgactttggaaccaaacttgtaataaaaggaattccaaatgg

SEQ ID NO: 202737 - DNA, 5764 bp, Homo sapiens
  Payload ID: 19984
  Gene Name: zinc finger protein 507
  ENST ID: ENST00000544431
  CDS Start-End: 209-3082
aaagagggaaaagagccgggagagaggtgggcaaggacgagggcgagggcacggccgggtcctggctggccaaacgaggctcgcggaagcagcagccgccgcctgaccgcagctggattttgaagattgatccaagggactgtattaatttcaggaattgatttgaaagacactggctctgccacttaacagccatgtaaccttggatatggaagaaagtagcagtgttgccatgttggtgccagatattggggaacaggaagctatactgactgctgaaagtatcatcagtccttcattggaaattgatgaacaaagaaaaactaaaccagatccattaatccatgttatccagaagttaagcaagatagtggaaaatgaaaagtcacaaaaatgtcttttaattgggaagaaacgcccacgttcaagtgctgcaacacactctcttgaaacccaagaactttgtgagattccggctaaagtaatccagtcacctgctgctgatactagaagggctgagatgtcacaaacaaattttacccctgacactcttgcccagaatgaagggaaggctatgtcttatcagtgtagcctttgtaagtttctatcatcatccttttccgtgttaaaagatcatattaagcaacatggtcagcaaaatgaagtgatactgatgtgctcagagtgccatattacatctagaagccaggaggaacttgaagcccacgtggtgaatgaccatgacaatgatgccaatatccacacccaatccaaagcccaacagtgcgtaagcccctccagctctttgtgtcggaaaaccacagaaagaaatgaaaccattccagatatcccagtaagtgtggacaatctacagactcatactgtccaaactgcatctgtggcagaaatgggtaggaggaaatggtatgcatacgaacagtacggcatgtatcgatgcttgttttgtagttatacttgtggccagcagagaatgttgaaaacacacgcttggaaacatgctggggaggttgattgctcctatccaatctttgaaaatgaaaatgaacccctaggcctgctggattcttcagcagctgctgcgcctggtggggtcgatgcagtcgtcattgctattggagagagtgaactgagtatccacaatgggccatcagtgcaagtgcagatttgcagctcagaacagttatcatcttcatctcctttagaacagagtgcagaaagaggagtacacctaagtcagtcagttaccctggaccccaatgaggaagaaatgctagaagtgatttctgatgcagaggagaatctgattcctgatagcctgcttacatcagcacagaaaatcatcagcagcagccccaataaaaaagggcatgttaacgtgatagtggagcgattgccaagtgctgaagaaaccctttcacagaagcgcttcctcatgaacactgaaatggaagaagggaaggacctgagcctgacagaagctcagattgggcgcgaaggaatggatgatgtttatcgtgctgataaatgtactgttgatattgggggattgatcataggctggagcagttcagagaaaaaagacgagttaatgaataaaggcctggctactgatgagaatgccccaccaggccggagaaggacaaattctgagtctcttcgattacactcattagctgcagaagcccttgtcacaatgcctataagagctgcagagttgacaagagccaacctggggcactatggagatataaaccttttagatccagatactagtcaaaggcaagtagatagtacattggcagcgtactcaaaaatgatgtcgccacttaaaaactcttcagatggattaactagtcttaaccaaagcaactccaccttggtagcactcccagagggtaggcaggaattgtcagatgggcaggttaagacaggcatcagcatgtccttactcaccgtcattgaaaaattgagagaaaggacagaccaaaacgcttcagacgatgacattttgaaagagttgcaggacaacgcccagtgccaacccaacagcgatacaagtttgtccggaaacaatgtggtggaatacatcccgaatgctgaacgaccctaccgttgccgcctgtgtcactacacaagtggcaacaagggctacatcaagcagcacttacgagtccatcgacagagacagccttatcagtgtcctatctgcgagcacatagcggacaacagcaaagatttggagagtcacatgatccaccactgtaagacaagaatataccagtgcaagcagtgtgaagaatccttccattataagagtcaattgaggaaccatgagagagaacagcacagtcttccagataccttgtcaatagcaacttctaatgagccaagaatttccagtgatacagctgatggaaaatgtgtccaggaagggaataagtcttcagtccagaaacaatatagatgtgatgtgtgtgattatacaagtacaacatatgttggtgtcagaaaccacaggcgaatccataactctgataagccgtacaggaaagagttcagatgctctctgtgtgggtatgtgtgtagccatcctccttctttgaagtctcatatgtggaaacatgcaagtgaccaaaattacaactacgaacaagtaaacaaggctattaacgacgcgatttcacaaagtggcagagttctggggaaatcccctggaaagactcaattaaagagcagtgaagagagtgcagatcccgtcactggaagttcagaaaatgcagtgtcatcttcagaactgatgtcccagactcccagtgaagttctgggtaccaacgagaatgagaaactgagccctacaagtaatacctcatatagtttagaaaaaatctccagtctggcccctcctagcatggagtactgcgttttactcttctgctgttgtatttgtggttttgaatcaaccagcaaagaaaacctcttggatcatatgaaagagcacgagggtgaaattgtaaacatcatcctgaataaggaccacaatacagctctaaacacaaattaggtggaataatgactcgagcaggaaagcagtagaagaggattccttcaccacagtttcacctttacgctgtcagacaacttcctgccacagaagaagtcgttgatgtgatttttgaggaaatgacagatgtgactttggaaccaaacttgtaataaaaggaattccaaatggacaagcagtaatgatatttaaatattttgagtgagggggagtgggtcaaagaggaagtagaggtgtaatcctgtattaaccctctgtcaccccttcttagtgtcgagtgtatttattaataaaagcttattagagtgtagaaatgccagcaagagttaagaaagggcttttcaggaactattctaaaagtcataaaagggtcacagtcttaagcagagcttagttttcttctcacttgtcaaatgcagactgtgaggcctccagtgagaaatgggaggcagttctgggagggggttttttcagtgtcaccaacagagtcaacaaggaaacataattagagggctttgaaatgatctactgaaatacctaaattgatagaaattaatcatactcaatctaggacatgttcctttactccttaaaaaagaaaggaaagatctctaaattcaaagctagattgtaaataggcattcaagaagtattgtcttaaatttacgatgaatttcttgtgagcagaggacgaaacaggtgaattctcaccagactcaaaccagatctcaattcgtagtaatgctaaatcgtcttccgtgttctcagaggttcttttcagtgtctgtcagaacttggcatactttctccatagtacgtagaccttctaatactctgctaaatgaaaccacacttgttatctgaaagtgtgtgaaagaaacaatgtatgaaaatttacatttgatcatccggcattggaaatagtttgaactatttccaaaaatcccttaggggatgaggggtgaaatttaaaagctcctgaaaatgagtactgctgtgttgagcttttctttcctggggtatattaatttagttatatttagcagaagaggaatataaccaaatgtgactaaaatatagcagaaattcaggttgtttgtaaaaattttaataacaaatagcatttggcaagtctataggattcttcctatctggaaattctattttgttagagtgcgataggacatatggaaaaccaacacaaagtgctttagcattaaaactcaccatcaaatagatgtaatcttattaattacacattttgtattttaattatttcaaggagtgaagaaaacagggtgtttttgtttttgtagttctgattactcatttatgcattgttttgtttaagtaaattctgcctacaagtgaaaaggtcggtgcgctcttctgtgcaccatcctcacggtgctatttccgaatatctgaatattgatttctaacacctggatgaggctgtgaccgatcaacttggaacactgtaaaggttttcgaatgggatacgctgtaggcacgttttaagaagtattctgttcctaaagtccaggtatgattggattaatatttataaaattattattaggaattatttaagtggggccaggcatcttgcaacattttctgatttttttttctttctttctaatctcattttggtgatatttaaacaaacataaatgattgtaactttgcagcttttttatttaggtagctttaatttatttatgaaagttaatccatttctgatacgtggtttttaaaaatatgaaatggatttatatatactatattcctcaaatccactgtatgtggacttatattcattttctccttttttcggaattgaaacattttaatttcaaattcaaatagaacatttaaaatgatttcattattattacccatactgttgccactcatattgtaagtcagttttttcattgctggtacaatgactcagtatttctttataaaaatctgttgttctgaaaatcaacaaccttagaaggattttgtcttagaaaatttccttggctttagttttatatcatatttagaaaataataatgaaaagcatccccaaaatttcaatgatgtgaatttttaaattacctttatttctttaaactaattccattgattgttacttaaattttccacctggaatcatggatttaaaatttccccacctcatggggaaaaaactaacccagaagttcaaagcctttaaagtttcatctgattctggccttagaattgtccttaaaagctttctcctggccgataggaggaagcatatatcaaggaggttctttcccttcccattatcattttgtggcaagccttaagttaacaatgtgtctaccaagaacaattgagttttctaaaagtaataatgaagattatgcaattctaactgtagaagagatagctattaaaataatcagtagcctgggcatagtggctcacacctgtaatcccaatactttagaaggccaaggctggaggactgcttgagtccagaagtttaagaccagcctgggcaacacggggagaccctgtctctacaagaaattaaaaattagccaggcatagttggcacgtgcctgtagcaccagctacttgggaggttaaggtgggaggatcacttgagcctgggagatagaggcttgcagtgagccg

SEQ ID NO: 202738 - DNA, 5154 bp, Homo sapiens
  Payload ID: 19985
  Gene Name: zinc finger protein 510
  Uniprot ID: Q9Y2H8
  ENST ID: ENST00000223428
  CDS Start-End: 190-2241
gttcgcagctcaggaaggagggagccccaggaacaggagtcccaccgaagaactgctctctgacagaacagagacctcctcaccagggcttccaaacagatgcagaagaacccagaaaggagcaggtcttgatttgcccaaccagcggcacttcttcatccccttgcccagagagcaccagacttggtgatgtcgccacatccagaagccatcacagattgtgtgacactgaacactgtgggccaacttgcagaaggtggttatcctttacggttctccacactctttcaggagcagcagaaaatgaacatatctcaggcatcagtgtcattcaaggacgtgactatagaattcacccaggaggagtggcagcaaatggcccctgttcagaagaatctgtacagagatgtgatgctggagaactacagcaacctcgtctcagtggggtactgctgtttcaaaccagaggtgatcttcaagttggagcaaggagaggagccttggttctcagaggaggaattctcaaaccagagtcacccaaaagattacagaggtgatgacctgatcaagcagaacaagaaaatcaaagacaaacacttggagcaagcaatatgtatcaataataaaacattgactacagaggaagagaaagttttggggaaaccatttactctgcatgtagctgctgttgcttcaacaaaaatgtcctgcaaatgcaactcatgggaagtgaatttgcaaagtatttctgaatttatcattaataatagaaactattcaacaaagaaaataggttgcggtaatgtatgtgagaattcacctttcaaaattaactttgagaaaactcagactggagagaaattttatgaacataataaaaacatgaaagctctcaattataatgaaaatcttcccaagcatccaaagtttcaaactttggagcaagcttttgaatgtaataaaattggaaaagcctttaatgataaggctaactgtgttaaacataacagttctcacacaggagaaacatcctctaaagatgatgaatttaggaaaaattgtgataagaaaactctctttgaccacaggagaactggcacagggaagaaacacctgcatcttaatcaatgtgggaaatcctttgagaagtcaactgtggaggaatataataaacttaatatgggtataaaacattatgaattaaatccaagtggaaataatttcaacagaaaggcacacctcactgatcctcaaacagctgtcatagaagagaacccattggtaagtaatgacagaacacagacttgggttaaatcctctgaatatcatgaaaataagaaatcctaccagacgtcggttcacagagttcgccgaagaagtcactcaatgatgaaaccctataaatgtaatgaatgtgggaaatccttctgtcagaaaggacatctcattcaacatcagagaactcacacaggagagaaaccatttgaatgtagtgaatgtggaaaaactttctcccagaagtcacacctcagtactcatcagagaattcatacagcagaaaaaccctataaatgtaatgaatgtggaaaaacatttgtccagaagtcaaccctcaggggacatcaaagaattcacacaggagaaaaaccctatgaatgtagtgaatgtgggaaaacttttgttcagaagtccaccctcagagatcatcacagaattcacacaggggagaaatcctttcaatgcaatcaatgtggaaaaacatttggccagaagtcaaacctcagaatacatcagagaactcacactggggagaaaacttaccagtgtaatgaatgtgaaaaatccttctggcgaaaagatcatctcattcaacatcagaaaactcacacgggagagaaaccattcaaatgtaacgaatgtgggaaaacttttgcccggacatcaaccctcagagtgcatcaaagaattcacactggggagaaaccatttaaatgtaatgaatgtgggaagaaatttgtccggaaagcaatccttagtgatcatcagagaattcacacaggggagaaaccctttcagtgtaataaatgtgggaaaacttttggccagaaatcaaacctcagaatacatcaaaggactcacagtggggagaaatcttatgaatgcaatgaatatgggaaattatgtaagaagtctaccctaagcttataccagaaaattcagggagaggggaatccctattgatgtaataactagaaaatccttttgacaaaaggaataccccatttgatatcagagatacacaaaaaaccaattgagggtagtgaatgtaagaagacagtcccagaagtaaaccctcactgtgaatcagagaattcacataggaaagaaaccagatgaagatgaatgcaggaagaattgtgtccaaaatgcaaccttcagagtgtatcaaagaattcagacaggcttctgttttcagagtactatggataggcctgaatgaagtcataccctattagatagctcccacacatcacacaggctggtaatctcttcaccagcaccaatttcattttactccaggcacatagtccagatttcccaatctccttttcatccaggttggtctttgtgactggctactaagatgtggatgtccatgatgtatatcacatcccagtctgaaacataagagacttccctaataaattaccagggccctgtcacaacaaaatggatatcatttctaggacaagcttggtgccgtgctttaatgtggcatggtacaagataaagaagtctgtgcctgaatgaatacacgcagcaaaattctcctcttctgtgtctttcccagttgaacattatgtgagcaaaatttaagcttatacagtagtccccccttatctgtattttcactttacgcaatttccattaaccatggtcaactgtactttaaagttattaaatggatccagaaataaacaattcctacattttaaactgcacccgattctgagtagtgggatgaagtctcatgccctcctgctctcccatgagggttattgaatcattccttagtctagcatatccacagtgtatacactatctgccagttagtcacttacttgacattttagttatcagatcacctgtcagggtatgacagtgcttgtattcaagtaacccttgttttactaaataatggcctgaaattgcaagagcatttctggcatgttgttgtaattattccattattagtccttaatttataaattaggcacagcaagagattaaactatcataggcatgtgtatatgtaggaaaaaaatatagtatatacagggttcagtatacccgtggtttcaaacatcaacttggaattcttggagagcattccttgtagttaagcagggactactgtattctgttgagctttcacatgtttgagtctatttgtttctacacataatttagttatcttctgctaggaaggcagaaagcttctgtgtaagccaggcttaagtcaatcagagggcacaaaccttattaggaggctagagagtcaaggagaacctcaaatatgatcagagaattgtggaaaagacatcctttcaatgtaatgaaattgatagtaccacctgatacagggctttgcatgaacctaaaagtcttttggctgaatggtgagcagccactgtgcagttcaacgtaagtgtgccttaattgcacagaggtactgcccccacacctcctgacacctccatataccccagctatatctgctttaaggagttttccctggctccaaaggccattggcacccacccaagtattatgggaaacctccagagaggggagggactcagatttatatggctttattgaatccatgcccaaggcaacatcttactagttcctgtgggggtacaggacacctagatttagctaatggggtttggcaatgggaaggcaaacaaatttaataactttatgggtgaggtactttgggccagtagagtatactacagttatgtttacatctgaaagtgtagtagggattaattcccataagttatagagagaattctaattccctgtaattcgcataagtcatagaattctaatcaggaataattgtatgtaaagatacctctgaggtccaacagctctgatcattttgggcttcaagtctctctctgtgactggtgattttgtgggttgaaacttctggcaaaagggggcagcccttgggagctgggggccaggggattgacttggttccctgacaagggtaccaggtccaccccttctgaaaagcagctgttagtttactcttgggctcttttacacattggatatctcttccttgggtagagggttctgacctaaaattccactttaggagtttgtcgtcttggactcaacaactaacaaaatgaaaaggacccagcaagcctcacttgtggaatgaaaatggggcattcaggaaagcacctgtcctggccccacagtatgtcagctgtataggcaatagtagtagctgtctcttagaagggaaataatgtatcacctctttccagaacgaagcaaagttgctggcttagtagagccctcaattcatagaggttactgtaattgggcctggctcactgatgctttcgccaactgaaactactaggatcctgtgtgtgttcaaactcagtgccattaacaaacccaaagtgaagcggtcactcctctcagtggaaagagcacgaggatgttctcagctctggccaatactccatttcataaaccatgttacatttttgttaagccttggctctggatgtggcctagatatttgatattctaattggaaattacagattaaaaagcaccctttctttgtacagtgggggtaaaagtcacagctgcttagtacaaccatctgggttgctcaagtagatgcccataataagagactattttctgataagactgactggaatcaagctgccgacagctttctccatccagattgtgacggttgctacctggatccatcattttactggtatggcaaaaaatcacccatgtgacactgggtgacatggtaaaagtacatggtacttttacagtaccatgtactgtacaaaataaaggtctctttatctg

SEQ ID NO: 202739 - DNA, 675 bp, Homo sapiens
  Payload ID: 19985
  Gene Name: zinc finger protein 510
  ENST ID: ENST00000374641
  CDS Start-End: 273-675
acggatatgcgcgttttcgtctgcgcatgtgcagtcaaccccactttccggcttctccctgttagtgtttgctggtgcagagggttcgcagctcaggaaggagggagccccaggaacaggagtcccaccgaagaactgctctctgacagaacagagacctcctcaccagggcttccaaacagatgcagaagaacccagaaaggagcaggtcttgatttgcccaaccagcggcacttcttcatccccttgcccagagagcaccagacttggtgatgtcgccacatccagaagccatcacagattgtgtgacactgaacactgtgggccaacttgcagaaggtggttatcctttacggttctccacactctttcaggagcagcagaaaatgaacatatctcaggcatcagtgtcattcaaggacgtgactatagaattcacccaggaggagtggcagcaaatggcccctgttcagaagaatctgtacagagatgtgatgctggagaactacagcaacctcgtctcagtggggtactgctgtttcaaaccagaggtgatcttcaagttggagcaaggagaggagccttggttctcagaggaggaattctcaaaccagagtcacccaagtgagttactgagcagtagtagacataattctgcaggagtggttagactcc

SEQ ID NO: 202740 - DNA, 5616 bp, Homo sapiens
  Payload ID: 19985
  Gene Name: zinc finger protein 510
  Uniprot ID: Q9Y2H8
  ENST ID: ENST00000375231
  CDS Start-End: 652-2703
ggtgcagagggttcgcagctcaggtgagagcgccgggcctccacgcggattgcggacctgcagggagggatgtgctagtgtccagggggcgggaacgcgacgtcccgggaactcccccaaagcaggccgtcgctccctgtgcctcggccggcccgggacctcagcctgagaagggccggtgggggcgggctccgggggcgttaggtggggctgagtcctagttggaagatgctcggtgcgggccgaggtatgggcgccagaatgcagccaggcgtcggaaaacgcggtgctggcttcaggaggggaatgcgcgtttattgtattgaccatgaacctgccacaaagcgcgtacagcccgtgggtctgcggtgagaggccgagcctaggagctagaaggacctcgtgaattttggctctgtcacttgagcgtttgaaaatgaggatattagtaaaaactgctttgtgtcgttcagaggaaggagggagccccaggaacaggagtcccaccgaagaactgctctctgacagaacagagacctcctcaccagggcttccaaacagatgcagaagaacccagaaaggagcaggtcttgatttgcccaaccagcggcacttcttcatccccttgcccagagagcaccagacttggtgatgtcgccacatccagaagccatcacagattgtgtgacactgaacactgtgggccaacttgcagaaggtggttatcctttacggttctccacactctttcaggagcagcagaaaatgaacatatctcaggcatcagtgtcattcaaggacgtgactatagaattcacccaggaggagtggcagcaaatggcccctgttcagaagaatctgtacagagatgtgatgctggagaactacagcaacctcgtctcagtggggtactgctgtttcaaaccagaggtgatcttcaagttggagcaaggagaggagccttggttctcagaggaggaattctcaaaccagagtcacccaaaagattacagaggtgatgacctgatcaagcagaacaagaaaatcaaagacaaacacttggagcaagcaatatgtatcaataataaaacattgactacagaggaagagaaagttttggggaaaccatttactctgcatgtagctgctgttgcttcaacaaaaatgtcctgcaaatgcaactcatgggaagtgaatttgcaaagtatttctgaatttatcattaataatagaaactattcaacaaagaaaataggttgcggtaatgtatgtgagaattcacctttcaaaattaactttgagaaaactcagactggagagaaattttatgaacataataaaaacatgaaagctctcaattataatgaaaatcttcccaagcatccaaagtttcaaactttggagcaagcttttgaatgtaataaaattggaaaagcctttaatgataaggctaactgtgttaaacataacagttctcacacaggagaaacatcctctaaagatgatgaatttaggaaaaattgtgataagaaaactctctttgaccacaggagaactggcacagggaagaaacacctgcatcttaatcaatgtgggaaatcctttgagaagtcaactgtggaggaatataataaacttaatatgggtataaaacattatgaattaaatccaagtggaaataatttcaacagaaaggcacacctcactgatcctcaaacagctgtcatagaagagaacccattggtaagtaatgacagaacacagacttgggttaaatcctctgaatatcatgaaaataagaaatcctaccagacgtcggttcacagagttcgccgaagaagtcactcaatgatgaaaccctataaatgtaatgaatgtgggaaatccttctgtcagaaaggacatctcattcaacatcagagaactcacacaggagagaaaccatttgaatgtagtgaatgtggaaaaactttctcccagaagtcacacctcagtactcatcagagaattcatacagcagaaaaaccctataaatgtaatgaatgtggaaaaacatttgtccagaagtcaaccctcaggggacatcaaagaattcacacaggagaaaaaccctatgaatgtagtgaatgtgggaaaacttttgttcagaagtccaccctcagagatcatcacagaattcacacaggggagaaatcctttcaatgcaatcaatgtggaaaaacatttggccagaagtcaaacctcagaatacatcagagaactcacactggggagaaaacttaccagtgtaatgaatgtgaaaaatccttctggcgaaaagatcatctcattcaacatcagaaaactcacacgggagagaaaccattcaaatgtaacgaatgtgggaaaacttttgcccggacatcaaccctcagagtgcatcaaagaattcacactggggagaaaccatttaaatgtaatgaatgtgggaagaaatttgtccggaaagcaatccttagtgatcatcagagaattcacacaggggagaaaccctttcagtgtaataaatgtgggaaaacttttggccagaaatcaaacctcagaatacatcaaaggactcacagtggggagaaatcttatgaatgcaatgaatatgggaaattatgtaagaagtctaccctaagcttataccagaaaattcagggagaggggaatccctattgatgtaataactagaaaatccttttgacaaaaggaataccccatttgatatcagagatacacaaaaaaccaattgagggtagtgaatgtaagaagacagtcccagaagtaaaccctcactgtgaatcagagaattcacataggaaagaaaccagatgaagatgaatgcaggaagaattgtgtccaaaatgcaaccttcagagtgtatcaaagaattcagacaggcttctgttttcagagtactatggataggcctgaatgaagtcataccctattagatagctcccacacatcacacaggctggtaatctcttcaccagcaccaatttcattttactccaggcacatagtccagatttcccaatctccttttcatccaggttggtctttgtgactggctactaagatgtggatgtccatgatgtatatcacatcccagtctgaaacataagagacttccctaataaattaccagggccctgtcacaacaaaatggatatcatttctaggacaagcttggtgccgtgctttaatgtggcatggtacaagataaagaagtctgtgcctgaatgaatacacgcagcaaaattctcctcttctgtgtctttcccagttgaacattatgtgagcaaaatttaagcttatacagtagtccccccttatctgtattttcactttacgcaatttccattaaccatggtcaactgtactttaaagttattaaatggatccagaaataaacaattcctacattttaaactgcacccgattctgagtagtgggatgaagtctcatgccctcctgctctcccatgagggttattgaatcattccttagtctagcatatccacagtgtatacactatctgccagttagtcacttacttgacattttagttatcagatcacctgtcagggtatgacagtgcttgtattcaagtaacccttgttttactaaataatggcctgaaattgcaagagcatttctggcatgttgttgtaattattccattattagtccttaatttataaattaggcacagcaagagattaaactatcataggcatgtgtatatgtaggaaaaaaatatagtatatacagggttcagtatacccgtggtttcaaacatcaacttggaattcttggagagcattccttgtagttaagcagggactactgtattctgttgagctttcacatgtttgagtctatttgtttctacacataatttagttatcttctgctaggaaggcagaaagcttctgtgtaagccaggcttaagtcaatcagagggcacaaaccttattaggaggctagagagtcaaggagaacctcaaatatgatcagagaattgtggaaaagacatcctttcaatgtaatgaaattgatagtaccacctgatacagggctttgcatgaacctaaaagtcttttggctgaatggtgagcagccactgtgcagttcaacgtaagtgtgccttaattgcacagaggtactgcccccacacctcctgacacctccatataccccagctatatctgctttaaggagttttccctggctccaaaggccattggcacccacccaagtattatgggaaacctccagagaggggagggactcagatttatatggctttattgaatccatgcccaaggcaacatcttactagttcctgtgggggtacaggacacctagatttagctaatggggtttggcaatgggaaggcaaacaaatttaataactttatgggtgaggtactttgggccagtagagtatactacagttatgtttacatctgaaagtgtagtagggattaattcccataagttatagagagaattctaattccctgtaattcgcataagtcatagaattctaatcaggaataattgtatgtaaagatacctctgaggtccaacagctctgatcattttgggcttcaagtctctctctgtgactggtgattttgtgggttgaaacttctggcaaaagggggcagcccttgggagctgggggccaggggattgacttggttccctgacaagggtaccaggtccaccccttctgaaaagcagctgttagtttactcttgggctcttttacacattggatatctcttccttgggtagagggttctgacctaaaattccactttaggagtttgtcgtcttggactcaacaactaacaaaatgaaaaggacccagcaagcctcacttgtggaatgaaaatggggcattcaggaaagcacctgtcctggccccacagtatgtcagctgtataggcaatagtagtagctgtctcttagaagggaaataatgtatcacctctttccagaacgaagcaaagttgctggcttagtagagccctcaattcatagaggttactgtaattgggcctggctcactgatgctttcgccaactgaaactactaggatcctgtgtgtgttcaaactcagtgccattaacaaacccaaagtgaagcggtcactcctctcagtggaaagagcacgaggatgttctcagctctggccaatactccatttcataaaccatgttacatttttgttaagccttggctctggatgtggcctagatatttgatattctaattggaaattacagattaaaaagcaccctttctttgtacagtgggggtaaaagtcacagctgcttagtacaaccatctgggttgctcaagtagatgcccataataagagactattttctgataagactgactggaatcaagctgccgacagctttctccatccagattgtgacggttgctacctggatccatcattttactggtatggcaaaaaatcacccatgtgacactgggtgacatggtaaaagtacatggtacttttacagtaccatgtactgtacaaaataaaggtctctttatctg

SEQ ID NO: 202741 - DNA, 2004 bp, Homo sapiens
  Payload ID: 19986
  Gene Name: zinc finger protein 511
  Uniprot ID: Q8NB15
  ENST ID: ENST00000359035
  CDS Start-End: 4-792
gtgatgcagttgccccccgcgctgtgcgcccgcctcgctgcggggcccggggcggcggagccgctgcctgtagagcgggatcccgcggctggggccgcgccctttcgcttcgttgcgcgccccgtgcgcttcccgcgggagcaccagttcttcgaggatggggacgtgcagcgccacctctacctccaggacgtgatcatgcaggtggccgacgtgcctgagaagcccagggtgcccgcgtttgcctgccaggtggccggctgctgccaggtgttcgatgccctggacgactacgagcaccactaccacacgctgcacggaaatgtttgctccttttgcaagcgggccttcccttccggacacctgctggacgcccacatcctggagtggcacgattcgctcttccagatcctgtctgagaggcaggacatgtatcagtgcttggtagaaggctgcacagagaagttcaagaccagcagagaccggaaggatcacatggtgaggatgcacctgtaccccgcggacttccggtttgataagccaaagaaaagcagaagcccagcctcagcagaagccccaggggacagtggagagcggtcagaaggggaggccatggaaatctgctctgagcctgtggcagcctcccctgcaccggcaggtgagaggcggatctacagacataggtcagtgtctgagctctttctgaaacccgttctcaacatgtgttcggtgctgaggattctgggctgcacctgggccgcagctcttctcatactgaattcagaaaggtaacgctgggtaagaaaatcggcttccgccagagaagaaagtccagatatctcaggtcctgtgaataacttagtttctctcgcatactctgtttttgagccattgaagcgcaggaatgccaagcaccactcacttttcctcattgtctgagtgggatggaaagagtctcacttgcagttgcttcagtcacaacccaggcgtctgccttaatagcatcacctgtgccgtctgcgtttctagcgtcacctgtgccgtctgcgtttctagcgtcacctgtgccgtctgccttcctagcatgacctgtgccgtctgcctttctagcatgacctgtactgtctgcctttctagcgtcacctgtgccgtctgcctttctagttaaagttgattttaaattaatttgggaaaaacggtgaacaagtggggaaaaacatcaccaaagactccaaacaggtggaacgatgaacttaatgttccctgcaccctccttacagatgcctggactttggcctgtgaatgagccccggggggctgggacagtaggggttttcatggaatggacatggggtagcaggaagtctcagccccagagggcttggcaggagccgccctctctgcggagttcttcccagcgggtgtgcgttggtggctggcggggaccccccacaggaactaggtctcaggctgtggaaagggagctgccccagggcccaggagggccggctctgcattccgcatgttcccagagtgaaagagaatgagaaggagacacacaagtgctgttatgacctgggttgttggttggcaaatacagcatctaatagaaactttcttccatcccagaataccctctaccatctgctttggtcagggtgccgctcgaggatttaaaagcaacaagaagaaaaccaaacaatgctgatagactcagaaaaggagtggggggcagtcaccactgctgggcgtggcatccgccttgggcctttctccgaccttctggtgtggccgccctgggggccaggccctcgccatcctccccatccttgttcctcagcaaatggcattagcagctgtcatcagaagctgtgagggacccacagattttggaaacgacctggacacactattgggaaggagatgtggacggcctgtctcctcctgcagggcccaccctaagaatgtatttttaaacacatgaaataagtatttttcactgat

SEQ ID NO: 202742 - DNA, 1520 bp, Homo sapiens
  Payload ID: 19986
  Gene Name: zinc finger protein 511
  Uniprot ID: Q8NB15
  ENST ID: ENST00000361518
  CDS Start-End: 470-1228
ccagggactgcagcgggagacgacaggcggggcaaggcggacgggagagggcgtgcgagagggggacctgcgacccggcttcccagggctgggaggggacacccgggacgacccggaggcccgctccgccccgccccggctgagtgtcgggccgcggggcaagacgctggcctggccggtgcaggcccgaagggcttcggccccagagttcggggaccgctgcacagccagagggagcgcgcgggaagagccgcgtcccgccagccccgtcgcctcgtgggcccccccgggcctggcagtcccccaaccccctcatcacgcccgcgcccgcgttcggccaggactcaccgcagtcccggagccacagcccccgcgcagcccccgacggcggcggaagtgagcgtgacgtcacgtccggctcggctcgcggacggtggccgacaggctgcgcccgcccgcgcccggggtgatgcagttgccccccgcgctgtgcgcccgcctcgctgcggggcccggggcggcggagccgctgcctgtagagcgggatcccgcggctggggccgcgccctttcgcttcgttgcgcgccccgtgcgcttcccgcgggagcaccagttcttcgaggatggggacgtgcagcgccacctctacctccaggacgtgatcatgcaggtggccgacgtgcctgagaagcccagggtgcccgcgtttgcctgccaggtggccggctgctgccaggtgttcgatgccctggacgactacgagcaccactaccacacgctgcacggaaatgtttgctccttttgcaagcgggccttcccttccggacacctgctggacgcccacatcctggagtggcacgattcgctcttccagatcctgtctgagaggcaggacatgtatcagtgcttggtagaaggctgcacagagaagttcaagaccagcagagaccggaaggatcacatggtgaggatgcacctgtaccccgcggacttccggtttgataagccaaagaaaagcagaagcccagcctcagcagaagccccaggggacagtggagagcggtcagaaggggaggccatggaaatctgctctgagcctgtggcagcctcccctgcaccggcaggtgagaggcggatctacagacatagaataccctctaccatctgctttggtcagggtgccgctcgaggatttaaaagcaacaagaagaaaaccaaacaatgctgatagactcagaaaaggagtggggggcagtcaccactgctgggcgtggcatccgccttgggcctttctccgaccttctggtgtggccgccctgggggccaggccctcgccatcctccccatccttgttcctcagcaaatggcattagcagctgtcatcagaagctgtgagggacccacagattttggaaacgacctggacacactattgggaaggagatgtggacggcctgtctcctcctgcagggcccaccctaagaatgtatttttaaacacatgaaataagtatttttcac

SEQ ID NO: 202743 - DNA, 3541 bp, Homo sapiens
  Payload ID: 19987
  Gene Name: zinc finger protein 512
  Uniprot ID: Q96ME7
  ENST ID: ENST00000355467
  CDS Start-End: 84-1787
cccacatccgggagaggagagcggaagtggcgttggtctggccggagcccttgggtgaaattgttaggcgtggagagggagtgatgtcttccagactcggtgctgtacccgccacttcgggacccacaacctttaagcagcagaggagcacgaggatcgtgggagctaagaatagcaggacccagtgctccataaaggataatagtttccagtacactatccctcatgatgactccttaagtggttcatcgtctgcatcttcgtgtgaaccagtgagtgattttccagcatctttccgaaaatctacctactggatgaagatgagaagaatcaagccagctgctacttctcatgtcgaagggtcaggtggagtatcagccaaggggaaaaggaaacccaggcaggaagaagatgaagactatcgagaatttcctcagaagaagcataagctttatgggaggaagcaacggcctaaaactcagcccaatcccaaatcccaggcccgtcgtattcggaaggaaccaccagtttatgcagcaggcagtttggaggagcaatggtacttagaaatcgttgataaaggcagtgtctcctgccctacctgccaggcagtggggaggaagaccatagagggtttaaagaaacacatggaaaactgcaagcaggaaatgtttacttgtcatcattgtgggaaacaacttcgttcactggcagggatgaagtatcatgtcatggcaaatcataatagtttgcccattttgaaagccggagatgaaatagatgagccaagtgagagggaaaggctccgaacagttctaaagagactgggaaagctcaggtgcatgcgtgagagttgctccagtagcttcaccagcatcatgggatatctctaccatgtcagaaaatgtggcaaaggggctgcagagctggaaaagatgaccctgaaatgtcaccactgtggaaaaccatataggtcgaaggctggacttgcatatcacctgaggtcagagcatgggcctatatccttctttccagagtcaggacagccagagtgcttaaaggagatgaacctagagtcaaagagtgggggccgagttcagagacgttctgccaagatagctgtataccacctacaggagctggcctctgctgaactggccaaggaatggcccaagaggaaggtgcttcaggacctggtacctgatgatcgaaagttaaaatatactcgtccagggctccctaccttcagccaggaagtactacataaatggaagacagatatcaagaaatatcatcgtattcagtgtcctaaccagggctgtgaggctgtctacagcagtgtatctggccttaaagctcacctgggctcttgtacattgggaaactttgtggctggaaaatacaaatgtcttctatgtcagaaagaatttgtgtcagagagtggtgtcaagtatcacatcaactccgtccatgctgaggactggttcgttgtaaacccaacaacaaccaaaagctttgaaaagctgatgaagataaagcagcggcagcaagaagaagaaaagcggaggcagcagcacaggagcagaaggtctctaagaaggcggcagcagcctggcattgagcttcccgagacagagctgagtcttagagtagggaaggatcagaggaggaataatgaggaactggtagtgtcagcctcctgtaaggaaccagagcaggagccagtgccagcacagttccagaaagtaaagcccccaaagactaatcataaacgaggaaggaaataggcagtcagtgtaaaagtgctcctaggaaagcagatgtgatgctgttgtcacggggacctgtgctgggaggactgagtgaagattctttcagctgtttgtgtaaggctgtgactttctcagctccttcctcctgtgtaaatttcactgtcttcccttcttacattttgattcccccctccccttttagtaggttttcctgctattcctcgtcaagtcctcttgtttttttatcttgcccaaagagctccctctcaaggccaactataggctcctcttgccctgtacaaaactaagaaacctctttggttgtcctttccttcctggggtatagaatgttcttggaagctccattgatttagtagctgctccatcatctagcttgtgaaaccattccaaactaattttttaaaaccataactgatttgtcattttgtatttgtgatataacaagtctagaagttagaactgttgtcattcacataataagattactctgtctccttgggaaaaaaactttatggaggctgtttgtcctctcaatatggttttaagattgaaagtaagaaaacggatttaggatgaaaactctagaactaccctatgctgtttatactgggaaatgctttgtaccaagtagcagtgactagacccacagacatgaaaagcaaccttaggagtaaagtgacccaaacattaaaatgacaggaaagagaaagtagaagcagcaataaatactgccccaactttcctggagcccgaggcctcatccatagctatgatcacttgccctctgaagcttatttttgcttctttggttttaagaattgagaaatatcacattgcccctgatgttttgacagtctcctagtgctcctggtagtgccactaagggaaaaccaaggtgcgcattccttctccctggactttaccttacttgttagtctacgccccactgtttccacccatccccttagccaacctctgtctttttgaattttctgagaatattgtcctatcctcttttatatatggagttctctcctctttatatcctgagactttgacaccagatgtagatatttatctggagctggaaagaaaaattctttttctgtacctcatgcctatctggtaatgtttaatgggttatttctctttgagggtggctttctctggaacattggttagagcagctttgttgtcgtgtttctggattctcttccccattttgcgtaaatattggtcttatatattcttgcctattttgtggcatatgccacataaaaaatgaacctgatatagacaagtactaccttttcaaattctgaaaggctattaccactttaactctttgtgctcctccaaatagctttaaaatgtgggcttttgtgaagaccactttcaaacaagggagcactgaaacctgaattggatactgccagaataggtagttttgaaacaagttaaggacatggtatatgcactctgcattttcattggcagtgtgcccttaaagccctttcagtagatgagggttgtcagggaggagaaatgaagaagctatgttaatttctggtgagtaagacctggggaatgtttggcaatgacaaaagaaataaatgactctcagaaagatgtttccagtgttctttgacgccgacctgctgcatgactccttgacactgtatgggggtaagaagatggctagagatgggggtgagtttgaaataaattccacatgcagttgtctcagt

SEQ ID NO: 202744 - DNA, 3417 bp, Homo sapiens
  Payload ID: 19987
  Gene Name: zinc finger protein 512
  ENST ID: ENST00000379717
  CDS Start-End: 84-1784
cccacatccgggagaggagagcggaagtggcgttggtctggccggagcccttgggtgaaattgttaggcgtggagagggagtgatgtcttccagactcggtgctgtacccgccacttcgggacccacaacctttaagcagcagaggagcacgaggatcgtgggagctaagaacaggacccagtgctccataaaggataatagtttccagtacactatccctcatgatgactccttaagtggttcatcgtctgcatcttcgtgtgaaccagtgagtgattttccagcatctttccgaaaatctacctactggatgaagatgagaagaatcaagccagctgctacttctcatgtcgaagggtcaggtggagtatcagccaaggggaaaaggaaacccaggcaggaagaagatgaagactatcgagaatttcctcagaagaagcataagctttatgggaggaagcaacggcctaaaactcagcccaatcccaaatcccaggcccgtcgtattcggaaggaaccaccagtttatgcagcaggcagtttggaggagcaatggtacttagaaatcgttgataaaggcagtgtctcctgccctacctgccaggcagtggggaggaagaccatagagggtttaaagaaacacatggaaaactgcaagcaggaaatgtttacttgtcatcattgtgggaaacaacttcgttcactggcagggatgaagtatcatgtcatggcaaatcataatagtttgcccattttgaaagccggagatgaaatagatgagccaagtgagagggaaaggctccgaacagttctaaagagactgggaaagctcaggtgcatgcgtgagagttgctccagtagcttcaccagcatcatgggatatctctaccatgtcagaaaatgtggcaaaggggctgcagagctggaaaagatgaccctgaaatgtcaccactgtggaaaaccatataggtcgaaggctggacttgcatatcacctgaggtcagagcatgggcctatatccttctttccagagtcaggacagccagagtgcttaaaggagatgaacctagagtcaaagagtgggggccgagttcagagacgttctgccaagatagctgtataccacctacaggagctggcctctgctgaactggccaaggaatggcccaagaggaaggtgcttcaggacctggtacctgatgatcgaaagttaaaatatactcgtccagggctccctaccttcagccaggaagtactacataaatggaagacagatatcaagaaatatcatcgtattcagtgtcctaaccagggctgtgaggctgtctacagcagtgtatctggccttaaagctcacctgggctcttgtacattgggaaactttgtggctggaaaatacaaatgtcttctatgtcagaaagaatttgtgtcagagagtggtgtcaagtatcacatcaactccgtccatgctgaggactggttcgttgtaaacccaacaacaaccaaaagctttgaaaagctgatgaagataaagcagcggcagcaagaagaagaaaagcggaggcagcagcacaggagcagaaggtctctaagaaggcggcagcagcctggcattgagcttcccgagacagagctgagtcttagagtagggaaggatcagaggaggaataatgaggaactggtagtgtcagcctcctgtaaggaaccagagcaggagccagtgccagcacagttccagaaagtaaagcccccaaagactaatcataaacgaggaaggaaataggcagtcagtgtaaaagtgctcctaggaaagcagatgtgatgctgttgtcacggggacctgtgctgggaggactgagtgaagattctttcagctgtttgtgtaaggctgtgactttctcagctccttcctcctgtgtaaatttcactgtcttcccttcttacattttgattcccccctccccttttagtaggttttcctgctattcctcgtcaagtcctcttgtttttttatcttgcccaaagagctccctctcaaggccaactataggctcctcttgccctgtacaaaactaagaaacctctttggttgtcctttccttcctggggtatagaatgttcttggaagctccattgatttagtagctgctccatcatctagcttgtgaaaccattccaaactaattttttaaaaccataactgatttgtcattttgtatttgtgatataacaagtctagaagttagaactgttgtcattcacataataagattactctgtctccttgggaaaaaaactttatggaggctgtttgtcctctcaatatggttttaagattgaaagtaagaaaacggatttaggatgaaaactctagaactaccctatgctgtttatactgggaaatgctttgtaccaagtagcagtgactagacccacagacatgaaaagcaaccttaggagtaaagtgacccaaacattaaaatgacaggaaagagaaagtagaagcagcaataaatactgccccaactttcctggagcccgaggcctcatccatagctatgatcacttgccctctgaagcttatttttgcttctttggttttaagaattgagaaatatcacattgcccctgatgttttgacagtctcctagtgctcctggtagtgccactaagggaaaaccaaggtgcgcattccttctccctggactttaccttacttgttagtctacgccccactgtttccacccatccccttagccaacctctgtctttttgaattttctgagaatattgtcctatcctcttttatatatggagttctctcctctttatatcctgagactttgacaccagatgtagatatttatctggagctggaaagaaaaattctttttctgtacctcatgcctatctggtaatgtttaatgggttatttctctttgagggtggctttctctggaacattggttagagcagctttgttgtcgtgtttctggattctcttccccattttgcgtaaatattggtcttatatattcttgcctattttgtggcatatgccacataaaaaatgaacctgatatagacaagtactaccttttcaaattctgaaaggctattaccactttaactctttgtgctcctccaaatagctttaaaatgtgggcttttgtgaagaccactttcaaacaagggagcactgaaacctgaattggatactgccagaataggtagttttgaaacaagttaaggacatggtatatgcactctgcattttcattggcagtgtgcccttaaagccctttcagtagatgagggttgtcagggaggagaaatgaagaagctatgttaatttctggtgagtaagacctggggaatgtttggcaatgacaaaagaaataaatgactctcagaaa

SEQ ID NO: 202745 - DNA, 3703 bp, Homo sapiens
  Payload ID: 19987
  Gene Name: zinc finger protein 512
  Uniprot ID: Q96ME7
  ENST ID: ENST00000413371
  CDS Start-End: 477-1949
agccccctcggaagctgctaggcggaagtagaagttcagaagagggctaggcggagccgagcccacatccgggagaggagagcggaagtggcgttggtctggccggagcccttgggtgaaattgttaggcgtggagagggagtgatgtcttccagactcggtgctgtacccgccagcctgggacagggctttgagaatgggggaagacgaaggctctggtattgttacccgcctttgcactgctggaagataggacagcatatttttcctaaaagacttcgggacccacaacctttaagcagcagaggagcacgaggatcgtgggagctaagaatagcaggacccagtgctccataaaggataatagtttccagtacactatccctcatgatgactccttaagtggttcatcgtctgcatcttcgtgtgaaccagtgagtgattttccagcatctttccgaaaatctacctactggatgaagatgagaagaatcaagccagctgctacttctcatgtcgaagggtcaggtggagtatcagccaaggggaaaaggaaacccaggcaggaagaagatgaagactatcgagaatttcctcagaagaagcataagctttatgggaggaagcaacggcctaaaactcagcccaatcccaaatcccaggcccgtcgtattcggaaggaaccaccagtttatgcagcaggcagtttggaggagcaatggtacttagaaatcgttgataaaggcagtgtctcctgccctacctgccaggcagtggggaggaagaccatagagggtttaaagaaacacatggaaaactgcaagcaggaaatgtttacttgtcatcattgtgggaaacaacttcgttcactggcagggatgaagtatcatgtcatggcaaatcataatagtttgcccattttgaaagccggagatgaaatagatgagccaagtgagagggaaaggctccgaacagttctaaagagactgggaaagctcaggtgcatgcgtgagagttgctccagtagcttcaccagcatcatgggatatctctaccatgtcagaaaatgtggcaaaggggctgcagagctggaaaagatgaccctgaaatgtcaccactgtggaaaaccatataggtcgaaggctggacttgcatatcacctgaggtcagagcatgggcctatatccttctttccagagtcaggacagccagagtgcttaaaggagatgaacctagagtcaaagagtgggggccgagttcagagacgttctgccaagatagctgtataccacctacaggagctggcctctgctgaactggccaaggaatggcccaagaggaaggtgcttcaggacctggtacctgatgatcgaaagttaaaatatactcgtccagggctccctaccttcagccaggaagtactacataaatggaagacagatatcaagaaatatcatcgtattcagtgtcctaaccagggctgtgaggctgtctacagcagtgtatctggccttaaagctcacctgggctcttgtacattgggaaactttgtggctggaaaatacaaatgtcttctatgtcagaaagaatttgtgtcagagagtggtgtcaagtatcacatcaactccgtccatgctgaggactggttcgttgtaaacccaacaacaaccaaaagctttgaaaagctgatgaagataaagcagcggcagcaagaagaagaaaagcggaggcagcagcacaggagcagaaggtctctaagaaggcggcagcagcctggcattgagcttcccgagacagagctgagtcttagagtagggaaggatcagaggaggaataatgaggaactggtagtgtcagcctcctgtaaggaaccagagcaggagccagtgccagcacagttccagaaagtaaagcccccaaagactaatcataaacgaggaaggaaataggcagtcagtgtaaaagtgctcctaggaaagcagatgtgatgctgttgtcacggggacctgtgctgggaggactgagtgaagattctttcagctgtttgtgtaaggctgtgactttctcagctccttcctcctgtgtaaatttcactgtcttcccttcttacattttgattcccccctccccttttagtaggttttcctgctattcctcgtcaagtcctcttgtttttttatcttgcccaaagagctccctctcaaggccaactataggctcctcttgccctgtacaaaactaagaaacctctttggttgtcctttccttcctggggtatagaatgttcttggaagctccattgatttagtagctgctccatcatctagcttgtgaaaccattccaaactaattttttaaaaccataactgatttgtcattttgtatttgtgatataacaagtctagaagttagaactgttgtcattcacataataagattactctgtctccttgggaaaaaaactttatggaggctgtttgtcctctcaatatggttttaagattgaaagtaagaaaacggatttaggatgaaaactctagaactaccctatgctgtttatactgggaaatgctttgtaccaagtagcagtgactagacccacagacatgaaaagcaaccttaggagtaaagtgacccaaacattaaaatgacaggaaagagaaagtagaagcagcaataaatactgccccaactttcctggagcccgaggcctcatccatagctatgatcacttgccctctgaagcttatttttgcttctttggttttaagaattgagaaatatcacattgcccctgatgttttgacagtctcctagtgctcctggtagtgccactaagggaaaaccaaggtgcgcattccttctccctggactttaccttacttgttagtctacgccccactgtttccacccatccccttagccaacctctgtctttttgaattttctgagaatattgtcctatcctcttttatatatggagttctctcctctttatatcctgagactttgacaccagatgtagatatttatctggagctggaaagaaaaattctttttctgtacctcatgcctatctggtaatgtttaatgggttatttctctttgagggtggctttctctggaacattggttagagcagctttgttgtcgtgtttctggattctcttccccattttgcgtaaatattggtcttatatattcttgcctattttgtggcatatgccacataaaaaatgaacctgatatagacaagtactaccttttcaaattctgaaaggctattaccactttaactctttgtgctcctccaaatagctttaaaatgtgggcttttgtgaagaccactttcaaacaagggagcactgaaacctgaattggatactgccagaataggtagttttgaaacaagttaaggacatggtatatgcactctgcattttcattggcagtgtgcccttaaagccctttcagtagatgagggttgtcagggaggagaaatgaagaagctatgttaatttctggtgagtaagacctggggaatgtttggcaatgacaaaagaaataaatgactctcagaaagatgtttccagtgttctttgacgccgacctgctgcatgactccttgacactgtatgggggtaagaagatggctagagatgggggtgagtttgaaataaattccacatgcagttgtctcagt

SEQ ID NO: 202746 - DNA, 3515 bp, Homo sapiens
  Payload ID: 19987
  Gene Name: zinc finger protein 512
  Uniprot ID: Q96ME7
  ENST ID: ENST00000416005
  CDS Start-End: 145-1761
agccccctcggaagctgctaggcggaagtagaagttcagaagagggctaggcggagccgagcccacatccgggagaggagagcggaagtggcgttggtctggccggagcccttgggtgaaattgttaggcgtggagagggagtgatgtcttccagactcggtgctgtacccgccacttcgggacccacaacctttaagcagcagaggagcacgaggatcgtgggagctaagaacaggacccagtgctccataaaggataatagtttccagtacactatccctcatgatgactccttaagtggttcatcgtctgcatcttcgtgtgaaccagtgagtgattttccagcatctttccgaaaatctacctactggatgaagatgagaagaatcaagccagctgctacttctcatgtcgaagggtcaggtggagtatcagccaaggggaaaaggaaacccaggcaggaagaagatgaagactatcgagaatttcctcagaagaagcataagctttatggcagtttggaggagcaatggtacttagaaatcgttgataaaggcagtgtctcctgccctacctgccaggcagtggggaggaagaccatagagggtttaaagaaacacatggaaaactgcaagcaggaaatgtttacttgtcatcattgtgggaaacaacttcgttcactggcagggatgaagtatcatgtcatggcaaatcataatagtttgcccattttgaaagccggagatgaaatagatgagccaagtgagagggaaaggctccgaacagttctaaagagactgggaaagctcaggtgcatgcgtgagagttgctccagtagcttcaccagcatcatgggatatctctaccatgtcagaaaatgtggcaaaggggctgcagagctggaaaagatgaccctgaaatgtcaccactgtggaaaaccatataggtcgaaggctggacttgcatatcacctgaggtcagagcatgggcctatatccttctttccagagtcaggacagccagagtgcttaaaggagatgaacctagagtcaaagagtgggggccgagttcagagacgttctgccaagatagctgtataccacctacaggagctggcctctgctgaactggccaaggaatggcccaagaggaaggtgcttcaggacctggtacctgatgatcgaaagttaaaatatactcgtccagggctccctaccttcagccaggaagtactacataaatggaagacagatatcaagaaatatcatcgtattcagtgtcctaaccagggctgtgaggctgtctacagcagtgtatctggccttaaagctcacctgggctcttgtacattgggaaactttgtggctggaaaatacaaatgtcttctatgtcagaaagaatttgtgtcagagagtggtgtcaagtatcacatcaactccgtccatgctgaggactggttcgttgtaaacccaacaacaaccaaaagctttgaaaagctgatgaagataaagcagcggcagcaagaagaagaaaagcggaggcagcagcacaggagcagaaggtctctaagaaggcggcagcagcctggcattgagcttcccgagacagagctgagtcttagagtagggaaggatcagaggaggaataatgaggaactggtagtgtcagcctcctgtaaggaaccagagcaggagccagtgccagcacagttccagaaagtaaagcccccaaagactaatcataaacgaggaaggaaataggcagtcagtgtaaaagtgctcctaggaaagcagatgtgatgctgttgtcacggggacctgtgctgggaggactgagtgaagattctttcagctgtttgtgtaaggctgtgactttctcagctccttcctcctgtgtaaatttcactgtcttcccttcttacattttgattcccccctccccttttagtaggttttcctgctattcctcgtcaagtcctcttgtttttttatcttgcccaaagagctccctctcaaggccaactataggctcctcttgccctgtacaaaactaagaaacctctttggttgtcctttccttcctggggtatagaatgttcttggaagctccattgatttagtagctgctccatcatctagcttgtgaaaccattccaaactaattttttaaaaccataactgatttgtcattttgtatttgtgatataacaagtctagaagttagaactgttgtcattcacataataagattactctgtctccttgggaaaaaaactttatggaggctgtttgtcctctcaatatggttttaagattgaaagtaagaaaacggatttaggatgaaaactctagaactaccctatgctgtttatactgggaaatgctttgtaccaagtagcagtgactagacccacagacatgaaaagcaaccttaggagtaaagtgacccaaacattaaaatgacaggaaagagaaagtagaagcagcaataaatactgccccaactttcctggagcccgaggcctcatccatagctatgatcacttgccctctgaagcttatttttgcttctttggttttaagaattgagaaatatcacattgcccctgatgttttgacagtctcctagtgctcctggtagtgccactaagggaaaaccaaggtgcgcattccttctccctggactttaccttacttgttagtctacgccccactgtttccacccatccccttagccaacctctgtctttttgaattttctgagaatattgtcctatcctcttttatatatggagttctctcctctttatatcctgagactttgacaccagatgtagatatttatctggagctggaaagaaaaattctttttctgtacctcatgcctatctggtaatgtttaatgggttatttctctttgagggtggctttctctggaacattggttagagcagctttgttgtcgtgtttctggattctcttccccattttgcgtaaatattggtcttatatattcttgcctattttgtggcatatgccacataaaaaatgaacctgatatagacaagtactaccttttcaaattctgaaaggctattaccactttaactctttgtgctcctccaaatagctttaaaatgtgggcttttgtgaagaccactttcaaacaagggagcactgaaacctgaattggatactgccagaataggtagttttgaaacaagttaaggacatggtatatgcactctgcattttcattggcagtgtgcccttaaagccctttcagtagatgagggttgtcagggaggagaaatgaagaagctatgttaatttctggtgagtaagacctggggaatgtttggcaatgacaaaagaaataaatgactctcagaaagatgtttccagtgttctttgacgccgacctgctgcatgactccttgacactgtatgggggtaagaagatggctagagatgggggtgagtttgaaataaattccacatgcagttgtctcagt

SEQ ID NO: 202747 - DNA, 3543 bp, Homo sapiens
  Payload ID: 19987
  Gene Name: zinc finger protein 512
  Uniprot ID: Q96ME7
  ENST ID: ENST00000556601
  CDS Start-End: 317-1789
agccccctcggaagctgctaggcggaagtagaagttcagaagagggctaggcggagccgagcccacatccgggagaggagagcggaagtggcgttggtctggccggagcccttgggtgaaattgttaggcgtggagagggagtgatgtcttccagactcggtgctgtacccgcctagcaggacccagtgctccataaaggataatagtttccagtacactatccctcatgatgactccttaagtggttcatcgtctgcatcttcgtgtgaaccagtgagtgattttccagcatctttccgaaaatctacctactggatgaagatgagaagaatcaagccagctgctacttctcatgtcgaagggtcaggtggagtatcagccaaggggaaaaggaaacccaggcaggaagaagatgaagactatcgagaatttcctcagaagaagcataagctttatgggaggaagcaacggcctaaaactcagcccaatcccaaatcccaggcccgtcgtattcggaaggaaccaccagtttatgcagcaggcagtttggaggagcaatggtacttagaaatcgttgataaaggcagtgtctcctgccctacctgccaggcagtggggaggaagaccatagagggtttaaagaaacacatggaaaactgcaagcaggaaatgtttacttgtcatcattgtgggaaacaacttcgttcactggcagggatgaagtatcatgtcatggcaaatcataatagtttgcccattttgaaagccggagatgaaatagatgagccaagtgagagggaaaggctccgaacagttctaaagagactgggaaagctcaggtgcatgcgtgagagttgctccagtagcttcaccagcatcatgggatatctctaccatgtcagaaaatgtggcaaaggggctgcagagctggaaaagatgaccctgaaatgtcaccactgtggaaaaccatataggtcgaaggctggacttgcatatcacctgaggtcagagcatgggcctatatccttctttccagagtcaggacagccagagtgcttaaaggagatgaacctagagtcaaagagtgggggccgagttcagagacgttctgccaagatagctgtataccacctacaggagctggcctctgctgaactggccaaggaatggcccaagaggaaggtgcttcaggacctggtacctgatgatcgaaagttaaaatatactcgtccagggctccctaccttcagccaggaagtactacataaatggaagacagatatcaagaaatatcatcgtattcagtgtcctaaccagggctgtgaggctgtctacagcagtgtatctggccttaaagctcacctgggctcttgtacattgggaaactttgtggctggaaaatacaaatgtcttctatgtcagaaagaatttgtgtcagagagtggtgtcaagtatcacatcaactccgtccatgctgaggactggttcgttgtaaacccaacaacaaccaaaagctttgaaaagctgatgaagataaagcagcggcagcaagaagaagaaaagcggaggcagcagcacaggagcagaaggtctctaagaaggcggcagcagcctggcattgagcttcccgagacagagctgagtcttagagtagggaaggatcagaggaggaataatgaggaactggtagtgtcagcctcctgtaaggaaccagagcaggagccagtgccagcacagttccagaaagtaaagcccccaaagactaatcataaacgaggaaggaaataggcagtcagtgtaaaagtgctcctaggaaagcagatgtgatgctgttgtcacggggacctgtgctgggaggactgagtgaagattctttcagctgtttgtgtaaggctgtgactttctcagctccttcctcctgtgtaaatttcactgtcttcccttcttacattttgattcccccctccccttttagtaggttttcctgctattcctcgtcaagtcctcttgtttttttatcttgcccaaagagctccctctcaaggccaactataggctcctcttgccctgtacaaaactaagaaacctctttggttgtcctttccttcctggggtatagaatgttcttggaagctccattgatttagtagctgctccatcatctagcttgtgaaaccattccaaactaattttttaaaaccataactgatttgtcattttgtatttgtgatataacaagtctagaagttagaactgttgtcattcacataataagattactctgtctccttgggaaaaaaactttatggaggctgtttgtcctctcaatatggttttaagattgaaagtaagaaaacggatttaggatgaaaactctagaactaccctatgctgtttatactgggaaatgctttgtaccaagtagcagtgactagacccacagacatgaaaagcaaccttaggagtaaagtgacccaaacattaaaatgacaggaaagagaaagtagaagcagcaataaatactgccccaactttcctggagcccgaggcctcatccatagctatgatcacttgccctctgaagcttatttttgcttctttggttttaagaattgagaaatatcacattgcccctgatgttttgacagtctcctagtgctcctggtagtgccactaagggaaaaccaaggtgcgcattccttctccctggactttaccttacttgttagtctacgccccactgtttccacccatccccttagccaacctctgtctttttgaattttctgagaatattgtcctatcctcttttatatatggagttctctcctctttatatcctgagactttgacaccagatgtagatatttatctggagctggaaagaaaaattctttttctgtacctcatgcctatctggtaatgtttaatgggttatttctctttgagggtggctttctctggaacattggttagagcagctttgttgtcgtgtttctggattctcttccccattttgcgtaaatattggtcttatatattcttgcctattttgtggcatatgccacataaaaaatgaacctgatatagacaagtactaccttttcaaattctgaaaggctattaccactttaactctttgtgctcctccaaatagctttaaaatgtgggcttttgtgaagaccactttcaaacaagggagcactgaaacctgaattggatactgccagaataggtagttttgaaacaagttaaggacatggtatatgcactctgcattttcattggcagtgtgcccttaaagccctttcagtagatgagggttgtcagggaggagaaatgaagaagctatgttaatttctggtgagtaagacctggggaatgtttggcaatgacaaaagaaataaatgactctcagaaagatgtttccagtgttctttgacgccgacctgctgcatgactccttgacactgtatgggggtaagaagatggctagagatgggggtgagtttgaaataaattccacatgcagttgtctcagt

SEQ ID NO: 202748 - DNA, 2974 bp, Homo sapiens
  Payload ID: 19988
  Gene Name: zinc finger protein 512B
  Uniprot ID: Q96KM6
  ENST ID: ENST00000217130
  CDS Start-End: 52-2730
ccgcgcccggcccggcccgggaagggagacgcgacccagcccgacgcagagatgacggatcctttctgcgttggaggccgtcggctcccggggtccagcaagagtggtcccgggaaggatggcagccgaaaggaggtccgacttccaatgctgcatgacccaccgaagatggggatgccggtggtccgtggtggacagacagtgcccggccaggcccctctctgctttgacccgggaagtccagccagtgacaagacagaagggaagaaaaaggggcggccaaaagccgagaaccaggccctccgagacattcctctctccctgatgaacgactggaaggatgagttcaaggcacactcgagggtgaagtgtccaaactcagggtgctggctggagttccccagcatctacgggctcaagtaccattaccagcggtgccaagggggtgccatctcagatcgcctggccttcccctgccccttctgcgaggccgcattcacctctaagacccagctggagaaacaccggatctggaaccacatggaccgacccctgcctgcctccaagcctgggcccatcagcaggccggtcaccatcagccggcctgttggggtcagcaagcccatcggagtgagcaaacctgtcactattggcaaacctgtgggtgtcagcaaacccattggcatcagcaagccagtctcggtcggcagacccatgccagtcaccaaggccatcccggtcactaggcccgtgccagtcaccaaacctgtcacagtcagcaggcccatgcccgtcaccaaggccatgccggtcaccaaacccatcacagtcaccaagtctgtgccggtcaccaaacccgtacctgtcaccaaacccattacggtaacaaagcttgtgacagttacgaaacccgtgccggtcaccaagccagtgacagtcagcaggcccattgtggtcagcaagccggtgacagtcagcaggcccattgctatcagcagacacacaccgccctgcaaaatggtgctgctgaccaggtcggagaacaaagcacctcgtgccacagggaggaacagtggtaagaaaagggctgcggacagcctggacacctgcccaattccacccaagcaggccaggccagagaatggggagtacggcccctcctccatgggccagagctcggccttccagctgagtgcagacaccagcagtggctccttgtcgccaggcagcaggccgtcagggggcatggaggcactgaaggctgcaggccctgcgtccccgcctgaggaggacccggagcgcacaaagcacagaaggaaacagaaaacacccaaaaagtttacaggggagcagccatccatctcagggacctttgggctcaaaggcctggtcaaagctgaggacaaggcccgagttcaccgctccaagaagcaggaggggccaggccctgaggacgcccggaagaaggtgccagctgcccccatcactgtcagcaaggaggcaccggcccctgtggcccacccagctccaggtggccctgaagagcagtggcagagggccatccatgagcgcggggaagccgtctgccccacctgcaacgtggtcacccggaagactctcgtggggcttaagaagcacatggaggtgtgtcagaagcttcaggatgcactcaagtgccagcactgccggaagcagttcaagtccaaagccggcctcaactaccacactatggccgagcacagtgccaagccctctgacgccgaggcctccgaagggggcgagcaggaggagcgcgagaggctgcgcaaggtgctgaagcagatgggacggctgcgctgcccccaggagggttgcggggctgccttctccagcctcatgggctaccagtaccaccagcggcgctgcgggaagccgccctgcgaggtggacagcccctccttcccctgcacccactgtggcaagacgtaccgatccaaggctggccacgactaccacgtgcgctcggagcacacggcccccccccctgaggagcccacagacaagtcccctgaggctgaggacccgctgggtgtggagcggaccccaagcgggcgtgtccgccgcacgtcggcccaggtggcggtgttccacctgcaggagatagcggaggacgagctggcccgcgactggaccaagcggcgcatgaaggatgaccttgtgcccgagaccgcacggctcaactacactcgaccagggctccccacgctgaacccccagctgctagaggcatggaagaatgaagtgaaggagaaaggccacgtcaactgtcccaacgactgctgtgaagccatctactccagcgtgtccggactcaaggctcatctcgccagctgcagtaagggggcccacctggcagggaagtaccgctgtctgctgtgtccgaaggagttcagttctgagagtggcgtcaaataccacatcctgaagacccacgcagagaactggttccgaacatcagcagacccacctcccaaacacaggagccaggactcattggtgcccaagaaggaaaagaagaaaaatctggcaggtggaaagaagcggggccgaaagcccaaggagcggaccccagaggagcctgtggccaagctgcccccgcgccgggacgactggcctccaggatgcagagacaagggggcccggggctccaccggccggaaggtgggagtcagcaaggcgcctgaaaagtgagcatggtgcgtggggcctggcccccatgcagccgccacaccgccctctgttcaaggcagggccagctccgggacctctgtcctccagttctccatcccccacccccgcctcttcatccgtccagtggggcagccagccactctcccttccctgaaggtggcccttcccctgttaaggctgccacagggcacacctgggttggggctccccaaggtgtgcccagcagaagtgcaatagccaggag

SEQ ID NO: 202749 - DNA, 5919 bp, Homo sapiens
  Payload ID: 19988
  Gene Name: zinc finger protein 512B
  Uniprot ID: Q96KM6
  ENST ID: ENST00000369888
  CDS Start-End: 55-2733
ccccccgccccggcccggcccggcccggccgcagccccgctgggcgccgcagagatgacggatcctttctgcgttggaggccgtcggctcccggggtccagcaagagtggtcccgggaaggatggcagccgaaaggaggtccgacttccaatgctgcatgacccaccgaagatggggatgccggtggtccgtggtggacagacagtgcccggccaggcccctctctgctttgacccgggaagtccagccagtgacaagacagaagggaagaaaaaggggcggccaaaagccgagaaccaggccctccgagacattcctctctccctgatgaacgactggaaggatgagttcaaggcacactcgagggtgaagtgtccaaactcagggtgctggctggagttccccagcatctacgggctcaagtaccattaccagcggtgccaagggggtgccatctcagatcgcctggccttcccctgccccttctgcgaggccgcattcacctctaagacccagctggagaaacaccggatctggaaccacatggaccgacccctgcctgcctccaagcctgggcccatcagcaggccggtcaccatcagccggcctgttggggtcagcaagcccatcggagtgagcaaacctgtcactattggcaaacctgtgggtgtcagcaaacccattggcatcagcaagccagtctcggtcggcagacccatgccagtcaccaaggccatcccggtcactaggcccgtgccagtcaccaaacctgtcacagtcagcaggcccatgcccgtcaccaaggccatgccggtcaccaaacccatcacagtcaccaagtctgtgccggtcaccaaacccgtacctgtcaccaaacccattacggtaacaaagcttgtgacagttacgaaacccgtgccggtcaccaagccagtgacagtcagcaggcccattgtggtcagcaagccggtgacagtcagcaggcccattgctatcagcagacacacaccgccctgcaaaatggtgctgctgaccaggtcggagaacaaagcacctcgtgccacagggaggaacagtggtaagaaaagggctgcggacagcctggacacctgcccaattccacccaagcaggccaggccagagaatggggagtacggcccctcctccatgggccagagctcggccttccagctgagtgcagacaccagcagtggctccttgtcgccaggcagcaggccgtcagggggcatggaggcactgaaggctgcaggccctgcgtccccgcctgaggaggacccggagcgcacaaagcacagaaggaaacagaaaacacccaaaaagtttacaggggagcagccatccatctcagggacctttgggctcaaaggcctggtcaaagctgaggacaaggcccgagttcaccgctccaagaagcaggaggggccaggccctgaggacgcccggaagaaggtgccagctgcccccatcactgtcagcaaggaggcaccggcccctgtggcccacccagctccaggtggccctgaagagcagtggcagagggccatccatgagcgcggggaagccgtctgccccacctgcaacgtggtcacccggaagactctcgtggggcttaagaagcacatggaggtgtgtcagaagcttcaggatgcactcaagtgccagcactgccggaagcagttcaagtccaaagccggcctcaactaccacactatggccgagcacagtgccaagccctctgacgccgaggcctccgaagggggcgagcaggaggagcgcgagaggctgcgcaaggtgctgaagcagatgggacggctgcgctgcccccaggagggttgcggggctgccttctccagcctcatgggctaccagtaccaccagcggcgctgcgggaagccgccctgcgaggtggacagcccctccttcccctgcacccactgtggcaagacgtaccgatccaaggctggccacgactaccacgtgcgctcggagcacacggcccccccccctgaggagcccacagacaagtcccctgaggctgaggacccgctgggtgtggagcggaccccaagcgggcgtgtccgccgcacgtcggcccaggtggcggtgttccacctgcaggagatagcggaggacgagctggcccgcgactggaccaagcggcgcatgaaggatgaccttgtgcccgagaccgcacggctcaactacactcgaccagggctccccacgctgaacccccagctgctagaggcatggaagaatgaagtgaaggagaaaggccacgtcaactgtcccaacgactgctgtgaagccatctactccagcgtgtccggactcaaggctcatctcgccagctgcagtaagggggcccacctggcagggaagtaccgctgtctgctgtgtccgaaggagttcagttctgagagtggcgtcaaataccacatcctgaagacccacgcagagaactggttccgaacatcagcagacccacctcccaaacacaggagccaggactcattggtgcccaagaaggaaaagaagaaaaatctggcaggtggaaagaagcggggccgaaagcccaaggagcggaccccagaggagcctgtggccaagctgcccccgcgccgggacgactggcctccaggatgcagagacaagggggcccggggctccaccggccggaaggtgggagtcagcaaggcgcctgaaaagtgagcatggtgcgtggggcctggcccccatgcagccgccacaccgccctctgttcaaggcagggccagctccgggacctctgtcctccagttctccatcccccacccccgcctcttcatccgtccagtggggcagccagccactctcccttccctgaaggtggcccttcccctgttaaggctgccacagggcacacctgggttggggctccccaaggtgtgcccagcagaagtgcaatagccaggagggttgcccctcctcatgggaatgtgtctggggtcttggtgccacaggggctgcagcgcagagtaggcagatggcctttggccccccggctccgcttcctcaggccctgccgggtcccttccctggctaccccaaggctcaggcatccctggtgacctgtggttctgggctggtgagggcacctgagcaacctggcacgggcagccaccatcctggcctcacctccacccaacactggaactccagcacccccagctacctcccaggacagacccctgtctgaccactgccatgctgacctgacaggctccggcctgcccttggccacccacttggtccccttgcttctgttttctacctctccaggcctgcccactacccccacccctgctcctcctttgtcagtgcgatccctgctgtgctcaggccctgccccccaggcctgtctgtaattctcccagcttggggcaagggaggggttttgcttcttgtacctacagggcagcagaagcttgatgcccttcaacacagctgccagccctgggggtgtggggcccctggagtgtgctctcctccagtgttcagccttctggcactgcaggcctaggttggagcagcctcgtggagtagggacggactagttcgggccctggggtcttgctggggcccataggcatgtggggcaggaagctgggcagagctggcctggctctgagtggccactgggggaaaggcagccttctgtctgccaatctgggtaggcccagtggccaagctctcatgggagccccctccccacttttttttttaacctgcccccattgtttctggttgtgtggtcatttgatatgggaactgaaggccagccaggggaggggcttggccaaagtcacagcaggttgatggcagctccagagctgtctttgcccctttgtggccctgaggacggctgggtctataggtagggcaggggtcaggcagggagtccagggtgcctggaagaggtggccacagcctgtggctccctccctggggtcctgccttccaaccacggcattgcagggaggatgaggctcagagggggtaggtttggagggaggccattttccagggtgggtgggagtgggctgagggctcggccccactgaccctggacgatgagaattttgatgtttgcccgtgtgcgtgtgtctcctgggtgtagtggatgccagtcttgttgctgtgacaagtaacaaccttttttttaaattgttttttatacaaacactcgcaatccgacatttggtgctaagggtttcctggtgcagacggtgggcctgggggctgggctggaccagggcgtgggtctctggggttggggtcccttgctgctcagggaggcagtactgactgggcactgcctctgcccccagcacccaccctcccccattccccagggagaaggggccccactgggcttggcctgcagtagtagggagacaagttccaggagcactttggggactggggttgcagaacacttcctgtctctggcttcatccttgggccagaaggctccaaccctcagcagcccttgccagatgtgccagggagtgggtgtggagacccggactccccccacccacgcacacctcggcctgatgagaggatggaggctggggcagagatgggcgtgacccagcgtcagagggtcgggggaggcattccttcctgtgtcccagagcttcactggtggagctggaggagccggaggtggagggtggggtctggcagctgctgctggggcagcctcatgaggggaggggaggggaggggaggggagcaggcactgggcgggggcctaggtgcactttgtccttgccaccaatggcgggaggagggtggacctgaacacctgcagggtgtggtgcctgccccagcctctcaggtacttggcccttggggagaagagaagagggtctggtttttgctgggggtgagtttccgggacactcccaaagcccacagataatccctggtgtgggaagaggagtcctggataccttgatgtttagcactttaaccccctttgtctttaaggtaggcgtgggggctactgccagaagtggctgttgggtctgaccccctcctttctgccctccctctgccacatgctggtccgcagagccctcctcccaaggggtggggccctgggtggagctcagcagggtctgcccactccctacgctggcccacataggcctccaggagccctcagtgagagggaccagcatagctgacccccagagtgtggtgggcgccggccctgcccgaggcccagtcggggccctttctgcagatctacctctggctcagcgcacgccccctgccctgagaacaggaaagggcccggaagggctgactcaccgggccgacgctcacacgaaaatgggatgcactttatttgctggtgcaaaggcaggtgagggtgcctcctgtgtgaccgttggccctcctgcctggtggcgctgaagggaaggagccagtgagcctgaccccgggaggggccgtccccgtgtgccgcgtttggcggggccccaggcggctcccccaggcccgggtctggggccccaggctttcccctgcctcgcggccgggcgtcccgtgctttgggtttcttggtttgggttttttaatgccagttctcagtacataagtgcattttgaaagaggttccagctatcacttgtaaccatatatatatacatatatattctatctacaaagtgtttatttgcgagatgtttcaacggtgagttcgggccccgcccgccttgtgaccatctgtccccggtcctcgtccccgccccgcgccctggtcccgagtggcgtggggacgggccatcactgtatgtattaaaatgactgtatcaaataaatgtttattgatttttttccagg

SEQ ID NO: 202750 - DNA, 5921 bp, Homo sapiens
  Payload ID: 19988
  Gene Name: zinc finger protein 512B
  Uniprot ID: Q96KM6
  ENST ID: ENST00000450537
  CDS Start-End: 60-2738
ccgcggcgtctggctcggctcgcgccttccgcgagctgcccccgctgggcgccgcagagatgacggatcctttctgcgttggaggccgtcggctcccggggtccagcaagagtggtcccgggaaggatggcagccgaaaggaggtccgacttccaatgctgcatgacccaccgaagatggggatgccggtggtccgtggtggacagacagtgcccggccaggcccctctctgctttgacccgggaagtccagccagtgacaagacagaagggaagaaaaaggggcggccaaaagccgagaaccaggccctccgagacattcctctctccctgatgaacgactggaaggatgagttcaaggcacactcgagggtgaagtgtccaaactcagggtgctggctggagttccccagcatctacgggctcaagtaccattaccagcggtgccaagggggtgccatctcagatcgcctggccttcccctgccccttctgcgaggccgcattcacctctaagacccagctggagaaacaccggatctggaaccacatggaccgacccctgcctgcctccaagcctgggcccatcagcaggccggtcaccatcagccggcctgttggggtcagcaagcccatcggagtgagcaaacctgtcactattggcaaacctgtgggtgtcagcaaacccattggcatcagcaagccagtctcggtcggcagacccatgccagtcaccaaggccatcccggtcactaggcccgtgccagtcaccaaacctgtcacagtcagcaggcccatgcccgtcaccaaggccatgccggtcaccaaacccatcacagtcaccaagtctgtgccggtcaccaaacccgtacctgtcaccaaacccattacggtaacaaagcttgtgacagttacgaaacccgtgccggtcaccaagccagtgacagtcagcaggcccattgtggtcagcaagccggtgacagtcagcaggcccattgctatcagcagacacacaccgccctgcaaaatggtgctgctgaccaggtcggagaacaaagcacctcgtgccacagggaggaacagtggtaagaaaagggctgcggacagcctggacacctgcccaattccacccaagcaggccaggccagagaatggggagtacggcccctcctccatgggccagagctcggccttccagctgagtgcagacaccagcagtggctccttgtcgccaggcagcaggccgtcagggggcatggaggcactgaaggctgcaggccctgcgtccccgcctgaggaggacccggagcgcacaaagcacagaaggaaacagaaaacacccaaaaagtttacaggggagcagccatccatctcagggacctttgggctcaaaggcctggtcaaagctgaggacaaggcccgagttcaccgctccaagaagcaggaggggccaggccctgaggacgcccggaagaaggtgccagctgcccccatcactgtcagcaaggaggcaccggcccctgtggcccacccagctccaggtggccctgaagagcagtggcagagggccatccatgagcgcggggaagccgtctgccccacctgcaacgtggtcacccggaagactctcgtggggcttaagaagcacatggaggtgtgtcagaagcttcaggatgcactcaagtgccagcactgccggaagcagttcaagtccaaagccggcctcaactaccacactatggccgagcacagtgccaagccctctgacgccgaggcctccgaagggggcgagcaggaggagcgcgagaggctgcgcaaggtgctgaagcagatgggacggctgcgctgcccccaggagggttgcggggctgccttctccagcctcatgggctaccagtaccaccagcggcgctgcgggaagccgccctgcgaggtggacagcccctccttcccctgcacccactgtggcaagacgtaccgatccaaggctggccacgactaccacgtgcgctcggagcacacggcccccccccctgaggagcccacagacaagtcccctgaggctgaggacccgctgggtgtggagcggaccccaagcgggcgtgtccgccgcacgtcggcccaggtggcggtgttccacctgcaggagatagcggaggacgagctggcccgcgactggaccaagcggcgcatgaaggatgaccttgtgcccgagaccgcacggctcaactacactcgaccagggctccccacgctgaacccccagctgctagaggcatggaagaatgaagtgaaggagaaaggccacgtcaactgtcccaacgactgctgtgaagccatctactccagcgtgtccggactcaaggctcatctcgccagctgcagtaagggggcccacctggcagggaagtaccgctgtctgctgtgtccgaaggagttcagttctgagagtggcgtcaaataccacatcctgaagacccacgcagagaactggttccgaacatcagcagacccacctcccaaacacaggagccaggactcattggtgcccaagaaggaaaagaagaaaaatctggcaggtggaaagaagcggggccgaaagcccaaggagcggaccccagaggagcctgtggccaagctgcccccgcgccgggacgactggcctccaggatgcagagacaagggggcccggggctccaccggccggaaggtgggagtcagcaaggcgcctgaaaagtgagcatggtgcgtggggcctggcccccatgcagccgccacaccgccctctgttcaaggcagggccagctccgggacctctgtcctccagttctccatcccccacccccgcctcttcatccgtccagtggggcagccagccactctcccttccctgaaggtggcccttcccctgttaaggctgccacagggcacacctgggttggggctccccaaggtgtgcccagcagaagtgcaatagccaggagggttgcccctcctcatgggaatgtgtctggggtcttggtgccacaggggctgcagcgcagagtaggcagatggcctttggccccccggctccgcttcctcaggccctgccgggtcccttccctggctaccccaaggctcaggcatccctggtgacctgtggttctgggctggtgagggcacctgagcaacctggcacgggcagccaccatcctggcctcacctccacccaacactggaactccagcacccccagctacctcccaggacagacccctgtctgaccactgccatgctgacctgacaggctccggcctgcccttggccacccacttggtccccttgcttctgttttctacctctccaggcctgcccactacccccacccctgctcctcctttgtcagtgcgatccctgctgtgctcaggccctgccccccaggcctgtctgtaattctcccagcttggggcaagggaggggttttgcttcttgtacctacagggcagcagaagcttgatgcccttcaacacagctgccagccctgggggtgtggggcccctggagtgtgctctcctccagtgttcagccttctggcactgcaggcctaggttggagcagcctcgtggagtagggacggactagttcgggccctggggtcttgctggggcccataggcatgtggggcaggaagctgggcagagctggcctggctctgagtggccactgggggaaaggcagccttctgtctgccaatctgggtaggcccagtggccaagctctcatgggagccccctccccacttttttttttaacctgcccccattgtttctggttgtgtggtcatttgatatgggaactgaaggccagccaggggaggggcttggccaaagtcacagcaggttgatggcagctccagagctgtctttgcccctttgtggccctgaggacggctgggtctataggtagggcaggggtcaggcagggagtccagggtgcctggaagaggtggccacagcctgtggctccctccctggggtcctgccttccaaccacggcattgcagggaggatgaggctcagagggggtaggtttggagggaggccattttccagggtgggtgggagtgggctgagggctcggccccactgaccctggacgatgagaattttgatgtttgcccgtgtgcgtgtgtctcctgggtgtagtggatgccagtcttgttgctgtgacaagtaacaaccttttttttaaattgttttttatacaaacactcgcaatccgacatttggtgctaagggtttcctggtgcagacggtgggcctgggggctgggctggaccagggcgtgggtctctggggttggggtcccttgctgctcagggaggcagtactgactgggcactgcctctgcccccagcacccaccctcccccattccccagggagaaggggccccactgggcttggcctgcagtagtagggagacaagttccaggagcactttggggactggggttgcagaacacttcctgtctctggcttcatccttgggccagaaggctccaaccctcagcagcccttgccagatgtgccagggagtgggtgtggagacccggactccccccacccacgcacacctcggcctgatgagaggatggaggctggggcagagatgggcgtgacccagcgtcagagggtcgggggaggcattccttcctgtgtcccagagcttcactggtggagctggaggagccggaggtggagggtggggtctggcagctgctgctggggcagcctcatgaggggaggggaggggaggggaggggagcaggcactgggcgggggcctaggtgcactttgtccttgccaccaatggcgggaggagggtggacctgaacacctgcagggtgtggtgcctgccccagcctctcaggtacttggcccttggggagaagagaagagggtctggtttttgctgggggtgagtttccgggacactcccaaagcccacagataatccctggtgtgggaagaggagtcctggataccttgatgtttagcactttaaccccctttgtctttaaggtaggcgtgggggctactgccagaagtggctgttgggtctgaccccctcctttctgccctccctctgccacatgctggtccgcagagccctcctcccaaggggtggggccctgggtggagctcagcagggtctgcccactccctacgctggcccacataggcctccaggagccctcagtgagagggaccagcatagctgacccccagagtgtggtgggcgccggccctgcccgaggcccagtcggggccctttctgcagatctacctctggctcagcgcacgccccctgccctgagaacaggaaagggcccggaagggctgactcaccgggccgacgctcacacgaaaatgggatgcactttatttgctggtgcaaaggcaggtgagggtgcctcctgtgtgaccgttggccctcctgcctggtggcgctgaagggaaggagccagtgagcctgaccccgggaggggccgtccccgtgtgccgcgtttggcggggccccaggcggctcccccaggcccgggtctggggccccaggctttcccctgcctcgcggccgggcgtcccgtgctttgggtttcttggtttgggttttttaatgccagttctcagtacataagtgcattttgaaagaggttccagctatcacttgtaaccatatatatatacatatatattctatctacaaagtgtttatttgcgagatgtttcaacggtgagttcgggccccgcccgccttgtgaccatctgtccccggtcctcgtccccgccccgcgccctggtcccgagtggcgtggggacgggccatcactgtatgtattaaaatgactgtatcaaataaatgtttattgatttttttcc

SEQ ID NO: 202751 - DNA, 2139 bp, Homo sapiens
  Payload ID: 19989
  Gene Name: zinc finger protein 513
  Uniprot ID: Q8N8E2
  ENST ID: ENST00000323703
  CDS Start-End: 200-1825
catgaatggaagcggcggcggcggcgggagcggcctgagctgggcgccggggccagggccgggggctgcccagggcccgcgccgctgcatgggggcggcccgcgggccctgagaggaagggcagacaggcgggccgagataggaggggcggggtcgggcggccgcaggccggaggcgcgtcgggctggagccggtcacgatgccccgaaggaagcaaagccacccgcagcccgtgaaatgcgagggggtcaaagtggatactgaagactccctcgacgaaggacccggggccctggtattggagagtgatttgctactaggccaggatctggagtttgaggaggaagaggaagaggaggaaggcgacggcaacagtgaccagctcatgggcttcgagagagactcggaaggagactctctgggggccaggcctgggcttccctatgggctgagcgacgatgagtctgggggcggccgggcactaagtgcggagagtgaagttgaggagccagccaggggtccaggggaggccaggggtgagaggccaggcccagcctgccagctgtgtggggggccgacaggtgaggggccgtgttgtggggcaggagggccgggtggggggcccctgctgcccccacggctactgtactcatgccgcctctgcaccttcgtgtcccactactcgagccacctgaagcggcacatgcagacacacagcggagagaagccgttccgctgtggccgctgcccctacgcctcagcccagctcgtcaacctgacacgacatacccgcacccacactggcgagaagccctaccgctgtccccactgcccctttgcctgcagcagcctgggcaacctgaggcggcatcagcgtacccacgcagggccccccactcctccctgcccgacctgtggcttccgctgctgtactccacgaccagcccggcctcccagtcccacagagcaggagggggcggtgccccggcgacctgaagatgctctgctccttccagatttgagcctccatgtgccaccaggtggtgccagtttcctgccagactgtgggcagctgcggggtgaaggggagggcctctgcgggactggatcagaaccactgccagagctgctattcccttggacctgccggggctgtggacaagagctggaggagggtgagggtagtcggctgggagctgccatgtgtgggcgctgcatgcgaggagaggctggagggggtgccagtggggggccccagggccccagtgacaaaggctttgcctgtagcctctgcccctttgccactcactatcccaaccacctggcccggcacatgaagacacacagtggtgagaagcccttccgctgcgcccgctgtccttatgcctctgctcatctggataacctgaaacggcaccagcgcgtccatacaggagagaagccctacaagtgccccctctgcccttatgcctgtggcaatctggccaacctcaagcgtcatggtcgcatccactctggtgacaaaccttttcggtgtagcctttgcaactacagctgcaaccagagcatgaacctcaaacgtcacatgctgcggcacacaggcgagaagcccttccgctgtgccacctgcgcctataccacgggccactgggacaactacaagcgccaccagaaggtgcatggccacggtggggcaggagggcctggtctctctgcctctgagggctgggccccacctcatagcccaccctctgttttgagctctcggggcccaccagccctggggactgctggcagccgggctgtccacacagactcatcctgaactaggtccttcttccccatgttttatacagacggaccagaagccacctttttctcccccgctggccaggggctccacacagactaacgtaggcactataaggaccagcccaaccccatgggcgggggggcccatatggaccaggggaccttgccttgactgaggcacttcacgagctcagtgagaagggccctgtattcacctccactgcccccaggggctgtggacaaaccggctgggggactgcccagcctcccacctgtttatttaacttatttcagtgctttataataaaggaaacactaacaaagcca

SEQ ID NO: 202752 - DNA, 2077 bp, Homo sapiens
  Payload ID: 19989
  Gene Name: zinc finger protein 513
  Uniprot ID: Q8N8E2
  ENST ID: ENST00000407879
  CDS Start-End: 328-1767
aggagcgggggtggggtcagtggagtgggctcaggtcagggtggagggggactcctgagggatgaagtgggcgatccagactcctagcttcccaccgaggcactaagggaatcagagtgggtcagcgagtacgggaagtgtggtccacgagggctggttcctgagggagaatccacaagccccctcccctcttcagtggatactgaagactccctcgacgaaggacccggggccctggtattggagagtgatttgctactaggccaggatctggagtttgaggaggaagaggaagaggaggaaggcgacggcaacagtgaccagctcatgggcttcgagagagactcggaaggagactctctgggggccaggcctgggcttccctatgggctgagcgacgatgagtctgggggcggccgggcactaagtgcggagagtgaagttgaggagccagccaggggtccaggggaggccaggggtgagaggccaggcccagcctgccagctgtgtggggggccgacaggtgaggggccgtgttgtggggcaggagggccgggtggggggcccctgctgcccccacggctactgtactcatgccgcctctgcaccttcgtgtcccactactcgagccacctgaagcggcacatgcagacacacagcggagagaagccgttccgctgtggccgctgcccctacgcctcagcccagctcgtcaacctgacacgacatacccgcacccacactggcgagaagccctaccgctgtccccactgcccctttgcctgcagcagcctgggcaacctgaggcggcatcagcgtacccacgcagggccccccactcctccctgcccgacctgtggcttccgctgctgtactccacgaccagcccggcctcccagtcccacagagcaggagggggcggtgccccggcgacctgaagatgctctgctccttccagatttgagcctccatgtgccaccaggtggtgccagtttcctgccagactgtgggcagctgcggggtgaaggggagggcctctgcgggactggatcagaaccactgccagagctgctattcccttggacctgccggggctgtggacaagagctggaggagggtgagggtagtcggctgggagctgccatgtgtgggcgctgcatgcgaggagaggctggagggggtgccagtggggggccccagggccccagtgacaaaggctttgcctgtagcctctgcccctttgccactcactatcccaaccacctggcccggcacatgaagacacacagtggtgagaagcccttccgctgcgcccgctgtccttatgcctctgctcatctggataacctgaaacggcaccagcgcgtccatacaggagagaagccctacaagtgccccctctgcccttatgcctgtggcaatctggccaacctcaagcgtcatggtcgcatccactctggtgacaaaccttttcggtgtagcctttgcaactacagctgcaaccagagcatgaacctcaaacgtcacatgctgcggcacacaggcgagaagcccttccgctgtgccacctgcgcctataccacgggccactgggacaactacaagcgccaccagaaggtgcatggccacggtggggcaggagggcctggtctctctgcctctgagggctgggccccacctcatagcccaccctctgttttgagctctcggggcccaccagccctggggactgctggcagccgggctgtccacacagactcatcctgaactaggtccttcttccccatgttttatacagacggaccagaagccacctttttctcccccgctggccaggggctccacacagactaacgtaggcactataaggaccagcccaaccccatgggcgggggggcccatatggaccaggggaccttgccttgactgaggcacttcacgagctcagtgagaagggccctgtattcacctccactgcccccaggggctgtggacaaaccggctgggggactgcccagcctcccacctgtttatttaacttatttcagtgctttataataaaggaaacactaacaaa

SEQ ID NO: 202753 - DNA, 510 bp, Homo sapiens
  Payload ID: 19989
  Gene Name: zinc finger protein 513
  ENST ID: ENST00000436006
  CDS Start-End: 162-510
gcggcggcggaagcggaagcgagtacggagtggatactgaagactccctcgacgaaggacccggggccctggtattggagagtgatttgctactaggccaggatctggagtttgaggaggaagaggaagaggaggaaggcgacggcaacagtgaccagctcatgggcttcgagagagactcggaaggagactctctgggggccaggcctgggcttccctatgggctgagcgacgatgagtctgggggcggccgggcactaagtgcggagagtgaagttgaggagccagccaggggtccaggggaggccaggggtgagaggccaggcccagcctgccagctgtgtggggggccgacaggtgaggggccgtgttgtggggcaggagggccgggtggggggcccctgctgcccccacggctactgtactcatgccgcctctgcaccttcgtgtcccactactcgagccacctgaagcggcacatgcagacacacagcggagagaagccgttcc

SEQ ID NO: 202754 - DNA, 3011 bp, Homo sapiens
  Payload ID: 19990
  Gene Name: zinc finger protein 514
  Uniprot ID: Q96K75
  ENST ID: ENST00000295208
  CDS Start-End: 464-1666
ggcgcggggtggcgggcggggcctggtcctgtgagcgttcggagactgcgggcgcgcagacctgtactgggcccgcgccccggccccttacagagctgggtgtgtccctccgagtgccccccgctagggactgtgcaggccggagctaggcagggacagcggggcgaaccgggctgatagagtcggtccctgctcctgtgaggctctcaccgaatccctgctgtttccgggcagctgaagagcgctgggccctcgcgtcgcgggcgtggctgtggccgtgtctcctggtagtctgagcccactgtgcgtgtggatccacgtgggagctgggttccagagcctggtcctgaggaggagccgagccggggcttccccttctcagaatcctgctcttcctccagagagattcccaggagaagagggaacaaccaattcattcctgaaagccaggcctcgggacctgatgacatttgaagatgtggctgtggaattcagccagtgggagtgggggcagctgaaccctgctcagaaggacctctacagggaggtgatgctggagaacttcaggaacttggccattctgggccttctagtatccaaaccatatgtgatctgccagttggaggaagggggtgagcccttcatggtggagagagaaatctcaacaggagcccactcagactggaagagaaggtctaaatccaaggaatcaatgccaagttggggaatttccaaagaagaattattccaggtagtatcagtggaaaaacacattcaagatgtgctgcagttctcgaagttgaaagcagcctgcggttgtgatggccagttagagatgcagcagataaaacaggagagacacctgaaacaaatgtcaaccattcacaaatctgccaccacccttagcagagattataaatggaatggatttgggagaagcttaggtttaagatcagtccttgttaaccaacacagcattctcatgggagaaggatcttataaatgtgatacagaattcaggcagactttagggggaaacaactctcagagaacccacccagaaaagaaatcttgtaaatgtaatgagtgtgggaagtcctttcacttccagtcagaacttaggcgccatcagcgatgtcacactggagaaaagccgtatgaatgcagtgactgtggaagagcctttggtcatatttcatcccttattaaacatcaaagaactcatactggagaaaagccctatgaatgcagtgaatgtgggagagccttcagccagagttcgtctcttgttctgcactatagatttcacactggagagaaaccctacaaatgtaatgaatgtggacgagcctttggtcacacttcatcccttattaagcatcagaggactcatactggagaaaagccctatgaatgccgggaatgtgggagaaccttcagccagagctcatcactcattgtgcattacagatttcatactggagagaaaccttacaaatgtaataaatgtgggagagccttcagccagagttcatctctcactcaacattacagatttcacactggagagaaaccctacaaatgtaatgagtgtggaagggcctttgctcatactgcatcccttattaaacatcagagaagtcatgctggaaaaaaaaccctataaattcagtgaatatagaagggctttcagctggagtgcagacatcactggaacttaaagaattcatatcagagagagatcctaaaggtgtaatgtatgtgggaagaccacatcttgttccacatcaggcaataattactaaagagaatccctgtcaatgtcaagagggggtgggcttcccctctcttaccaaacatgggagaatccatactagtgagaaaccacgtgaatgtaatgaatgtgggaacgctttgatcagaggatgcatattattcagcatcagacagccgacactggggaggagccttatcaatgcagtgagtgtggcaagccttcagttacatactgattctttaagaaaatcagataacttgtactggagagaaatcctacaagtgtggtaagtatggaaaaatcttcagttgtatctcttcctttactaagcatcaagaacacatactagagagaggccctatgaaagcaggaaatagaggaaggccttcagtcagggctcatcccttattaagcatcagaaaattcatacctgagaaaaacctgtgaatgtgggtaatgtgggagagccttcagccaaacctcattgctttataaaccccttagaactctccctactagctggaaactctggtgacgtgatgaatgtgggaagggctttggtggatgttccaccaaaacacgttagagaatttgtacattagagaatttgtgctagagcaactcttcaaatttagtgaaactgggaaaacccattagtagagttcaagcttcagtattcatctcaaagagaaaccttgggaacatgatgaatgtgaggaaagttcctttccaacttgagatgtataaaactagagctgaaaagaagctgagaaatcaccttgtctggtgattttctgcctggtggggccatttgtataacgacacttgtgcattgcctcctcatgctgttactgacggggcagggtgtcatgcatgggtgcagaggatggaggctgagaaaggtagacagctacccatgatctagcccagtcgtattttagagctaataaaactgatgttcagaaagtgacatgccttggcctatagtcctaactgggctgggcctctttcctgtggttcacagctgtagtatggagattaatagactggatctttgcagtacaacacctctatgcacttctttctctgtagcacatgttacctttctttgtgaggcaatggagtggtctaggattgagcaaaaagcaatttttgttacatctttatgctaatagatttggaatttttgaaatgaaatgaaaccttgtttaaacattaaaattactaaaatagg

SEQ ID NO: 202755 - DNA, 554 bp, Homo sapiens
  Payload ID: 19990
  Gene Name: zinc finger protein 514
  ENST ID: ENST00000447814
  CDS Start-End: 342-554
gcttgcccactttcaggaatttgattctgagagcagggctgcggttccaggcagggtttgtacacatatttgcgttggaaggagagaggagcctaggacacatatgtattaactgtgcagctggtccgactcccgacagcttcagcgcacaccagccagccttggagttgctggaacggccctggctgcaagctggaatcacccggagagctttcgacattgatgcctgaggcccagctgtggagcgacagtttgaaaagagctgcaggtgactctaatgtgcagctaaagctaggaaccactgagctacatctcagggaagactgaaaattacaaagaatatgataaaatcttacttcaggaacaaagctacgtttttccaggacctgatgacatttgaagatgtggctgtggaattcagccagtgggagtgggggcagctgaaccctgctcagaaggacctctacagggaggtgatgctggagaacttcaggaacttggccattctgggccttctagtatccaaaccatatgtgatctgccagttggaggaa

SEQ ID NO: 202756 - DNA, 2755 bp, Homo sapiens
  Payload ID: 19990
  Gene Name: zinc finger protein 514
  Uniprot ID: Q96K75
  ENST ID: ENST00000411425
  CDS Start-End: 574-1776
tgtggccgtgtctcctggtagtctgagcccactgtgcgtgtggatccacgtgggagctgggttccagagcctggtcctgaggaggagccgagccgggggtaggaggccggacttggcgagggaagagcacgaccccgggcagcagtgcgccgcgctgggcgcaccggggtttgccggccctgctctgggccctgcaggtccgctggccccgccgcgcctagtggggatgccccgtgtcccccaggcagccccagcctgcgtcccgctccctgaaccctcgggaggaccacagggctgtggccgaaagacagagatttggacctagtgaaaggacgccgctccttagccccagctatggactccacagcatcaggtttggctctggagcgtgcagagggccaggagccctcttggggagctagtaccgagcccgatatcaggaggaccccaggaagaggccggggaatcccactgaaggcttccccttctcagaatcctgctcttcctccagagagattcccaggagaagagggaacaaccaattcattcctgaaagccaggcctcgggacctgatgacatttgaagatgtggctgtggaattcagccagtgggagtgggggcagctgaaccctgctcagaaggacctctacagggaggtgatgctggagaacttcaggaacttggccattctgggccttctagtatccaaaccatatgtgatctgccagttggaggaagggggtgagcccttcatggtggagagagaaatctcaacaggagcccactcagactggaagagaaggtctaaatccaaggaatcaatgccaagttggggaatttccaaagaagaattattccaggtagtatcagtggaaaaacacattcaagatgtgctgcagttctcgaagttgaaagcagcctgcggttgtgatggccagttagagatgcagcagataaaacaggagagacacctgaaacaaatgtcaaccattcacaaatctgccaccacccttagcagagattataaatggaatggatttgggagaagcttaggtttaagatcagtccttgttaaccaacacagcattctcatgggagaaggatcttataaatgtgatacagaattcaggcagactttagggggaaacaactctcagagaacccacccagaaaagaaatcttgtaaatgtaatgagtgtgggaagtcctttcacttccagtcagaacttaggcgccatcagcgatgtcacactggagaaaagccgtatgaatgcagtgactgtggaagagcctttggtcatatttcatcccttattaaacatcaaagaactcatactggagaaaagccctatgaatgcagtgaatgtgggagagccttcagccagagttcgtctcttgttctgcactatagatttcacactggagagaaaccctacaaatgtaatgaatgtggacgagcctttggtcacacttcatcccttattaagcatcagaggactcatactggagaaaagccctatgaatgccgggaatgtgggagaaccttcagccagagctcatcactcattgtgcattacagatttcatactggagagaaaccttacaaatgtaataaatgtgggagagccttcagccagagttcatctctcactcaacattacagatttcacactggagagaaaccctacaaatgtaatgagtgtggaagggcctttgctcatactgcatcccttattaaacatcagagaagtcatgctggaaaaaaaaccctataaattcagtgaatatagaagggctttcagctggagtgcagacatcactggaacttaaagaattcatatcagagagagatcctaaaggtgtaatgtatgtgggaagaccacatcttgttccacatcaggcaataattactaaagagaatccctgtcaatgtcaagagggggtgggcttcccctctcttaccaaacatgggagaatccatactagtgagaaaccacgtgaatgtaatgaatgtgggaacgctttgatcagaggatgcatattattcagcatcagacagccgacactggggaggagccttatcaatgcagtgagtgtggcaagccttcagttacatactgattctttaagaaaatcagataacttgtactggagagaaatcctacaagtgtggtaagtatggaaaaatcttcagttgtatctcttcctttactaagcatcaagaacacatactagagagaggccctatgaaagcaggaaatagaggaaggccttcagtcagggctcatcccttattaagcatcagaaaattcatacctgagaaaaacctgtgaatgtgggtaatgtgggagagccttcagccaaacctcattgctttataaaccccttagaactctccctactagctggaaactctggtgacgtgatgaatgtgggaagggctttggtggatgttccaccaaaacacgttagagaatttgtacattagagaatttgtgctagagcaactcttcaaatttagtgaaactgggaaaacccattagtagagttcaagcttcagtattcatctcaaagagaaaccttgggaacatgatgaatgtgaggaaagttcctttccaacttgagatgtataaaactagagctgaaaagaagctgagaaatcaccttgtctggtgattttctgcctggtggggccatttgtataacgacacttgtgcattgcctcctcatgctgttactgacggggcagggtgt

SEQ ID NO: 202757 - DNA, 8118 bp, Homo sapiens
  Payload ID: 19991
  Gene Name: zinc finger protein 516
  Uniprot ID: Q92618
  ENST ID: ENST00000443185
  CDS Start-End: 319-3810
cggggcgtgcgcgtcctcctccccaggcccgccgcctccctgccaagaatctgagagaggccgagtggagttcggtccttctctgaacacttttagctgagagtaccagcatccaactgggagcgttgtcattgcatttccacattcccaggaaagcccaggtgctggctgccagctgctgcgccccccatgtagaaggtgcacctcctgggagcaggcacgtcttttggctcttctgaccatggagagataggacggtccctgcagcccgcgcgacagaaagctgtgccgccaccaccggccgcgcccgtccttcggatggatcgcaacagagaggccgagatggagctgaggcgaggccccagccccaccagggccggccggggccacgaggtggatggggacaaggctacctgccacacctgctgcatctgcggcaagagcttccccttccagagctcgctttcgcagcacatgcgcaagcacacgggcgagaagccctacaagtgtccctactgcgaccaccgggcttcccagaagggcaacctgaagattcacatccggagccaccgcacggggactctgattcagggacacgagccggaggcgggcgaggcgccgctgggtgagatgcgcgcctccgagggcctggacgcctgcgccagccccaccaagagcgcctcggcctgcaaccggctgctgaacggggcctcgcaggccgacggcgccagggtcctgaacggggcctcgcaggccgacagcggcagagtcctgctgcggagcagcaagaagggggcagaggggtccgcatgcgccccgggggaggccaaggcagcggtccagtgctccttctgcaagagccagttcgagcgtaagaaggacctggagctgcacgtgcaccaggcgcacaagccgttcaagtgcaggctgtgcagctacgcgacgctgcgggaggagtcgctgctgagccacatcgagagggaccacatcaccgcgcaggggcccggcagcggcgaggcctgcgtggagaacggcaagcccgagctgagccccggggagttcccgtgcgaggtgtgtggccaggccttcagccagacctggttcctgaaggcgcacatgaagaagcaccggggctccttcgaccacggctgccacatctgcggccgtaggttcaaggagccctggttcctcaagaaccacatgaaggcgcacggccccaagacgggcagcaagaacaggcccaagagtgagctggaccccatcgccaccatcaacaacgtggtccaggaggaggtgatcgtcgccggcctgagcctctacgaggtctgcgccaagtgcgggaacctgtttacaaacctggacagcttgaacgcccacaatgccatccaccgcagagtcgaggccagccgcacgcgcgccccggccgaggagggggcggaggggccctcggacaccaagcagttcttcctccagtgcctgaacctgaggccgtcggcggccggcgactcgtgccctggcacgcaggccggacggcgggtggctgagctggacccggtcaacagctaccaggcctggcagctggccacgcggggtaaggtggccgagccggccgagtacctcaagtacggggcctgggacgaggcgctggccggggacgtggccttcgacaaggacaggcgcgagtacgtcctggtgagccaggagaagcgcaagcgtgagcaggatgcaccagccgcgcaggggcccccgcggaagcgcgcgagcgggcctggggaccccgcgcccgccggccacctcgatccccgctcggccgcgcgccccaaccgcagggccgcagccaccaccggccagggcaagtcctccgagtgcttcgagtgcggcaagatcttccgcacctatcatcagatggtgctgcactcacgcgtgcatcgccgcgcgcgccgcgagagggacagtgacggggacagggcggcgcgggcccgctgcggatcactcagtgagggtgactcggcctcccagcccagcagccctggctccgcctgtgccgctgctgactccccgggctctggcctggccgacgaggctgccgaagacagtggtgaggagggcgcccctgaacctgcaccagggggacagccgcgccgctgctgcttttccgaagaggtgacttcgaccgagctctccagtggagaccagagtcacaagatgggagataacgcctcggaaagagacaccggcgagtccaaggcagggatcgcagcttctgtgtccatacttgaaaacagtagcagagagacttctagaaggcaagagcagcacagattttctatggacttaaagatgccagcatttcaccccaagcaggaggtgcccgtccctggtgatggtgtggagttcccttccagtacgggagcggagggccagacgggtcaccctgcagaaaagctgtccgatttgcacaacaaggaacactctgggggagggaagcgggcgctggccccagacctcatgccgctagatttaagtgcgaggtcgacgcgggatgaccccagcaataaggagacggcctcctccctgcaggcggctttagtcgttcacccgtgtccttactgcagccacaagacctactaccccgaggtcctgtggatgcacaaacgcatctggcaccgcgtcagctgcaactccgtggctcccccgtggattcagcccaatggttacaaaagcatcagaagcaatttggttttcctttcccggagcggacgcacgggccccccgcctgccctcggtggcaaagaatgccagcctttgctccttgctcggttcacccgcactcaggtgccaggggggatgccggggtccaaaagtggctcttctcccctgggagtggtcacaaaagccgctagcatgcctaagaataaggagagccattccggaggtccctgcgctctgtgggcgcccggccctgacgggtatcgacagaccaaaccttgtcacggccaggagccacatggcgcggccacacaggggcccctggccaagcccaggcaggaggctagctccaaaccggtgcctgccccgggtggcgggggcttcagcaggagcgccacccctacgcccaccgtcatcgcccgggctggcgcgcagccctcggccaatagcaagcctgtggagaagtttggggtccccccagcgggggctggctttgcccccacaaataagcacagtgccccggactccctgaaagccaaattcagtgctcagcctcagggtccacctcctgcaaagggcgaagggggcgctcctcctctacctccccgcgagcccccctcgaaggcagcccaggagctgaggactctggccacctgtgctgcggggtccaggggcgacgcggccttgcaggcccagcccggcgtggctggggcgccccccgtcctacactccatcaaacaggagccggtggccgaggggcatgagaagcgcctggacatcctcaacatctttaagacgtacattccaaaggactttgcgaccctctaccagggatggggtgtcagcggccctgggttggagcacagagggacactccggacgcaggcccggccaggagagttcgtctgcatcgagtgcggaaagagcttccaccagcccggccacctcagggcccacatgcgggcacactcagtggtgtttgagtccgatgggcctcggggttctgaagttcataccacctccgcagacgcccccaaacaagggagagaccattctaacacaggtaccgtccagacagtgcctctgagaaagggaacctaaaggcgtgtttccgacgcaccccaggtccccgtaacggccattagcagtaccctcacgatgtcccagcagcctcccacctgtgacctggccgctccatggaagaacagccggggaactcctgagcagacacctcacatcccgagccgctgcgctggagtggaaactgaaggcagatgcctctccttgttaaacgttcagaaataaatgaagatgctatattctagaaatacatgtagatactatatacgcatttacgtgctcatcgtccatagtcccatattttcttataataaacagtagtactggcaggcacagtaggggcacaaggcatctgtcttattcaagacaagtttgagacactggaaaaaaagatacttgttgtgtgtgttggacagagtggcgaggctgagcactgtcacaggggcctcccatgttaagagggactgtggggatgatgtcagaacaagacgtggtggatttgaggttgatcgagtattaatactactgcctctccttgtcttagtgggtatttaaaatagtaaataagagagaggaaggaggtgacgttcaggtgctgtgggaagcaggcttggcggaggggtatgatgatgagaccctcattgttcactggctccatcgcactcctccctggggccgtgtgcctgttccattcttcccaccattcgaactgagcgaatctggcaaaggagacacgtctgtgggaatgcgtagattccgcctcggaagagagctagcgcaacactaagaaaagcaggcttcttgtttattctcaggacctttttgtaacagggctacattctgcaaactgcttacaaaggaagactatacgtcttaacaaattatttagccactgagtcctcccgattcggacctgttttagtaatggcagaagaatccctgagcaggttcaggtgccctagatgactagggtgctgagctctggcgccttctgtccccactctttgcctccccgccccttccctgagccaccccagcaagtgggtgtcttttctccctgggcctggtgacctccacaggatgagtgactttgttcataaagggtggggatcaccagccccttgggtgggggacggcttcatatacctcttcctcagtaatgcaaatgcgagtttttgtggtgggggttaaggcccataacaaaggatcttaaaccatgcagtgtacgcaattgaaatggtattccacagatataaatattttcttttcccattgccgtgacactatgtgtgatggtaatatttctgagagtttcagatttttgcacatatgattttatgcattatcaaaagttactgctgccttgaatgaaaatgttctgtgaaattttttgcaaaagctttactaggtttttttttaattgtgaaattttgtaaaggcaggaaatggattaaaacgagcatgctaaatatatttttcaaaaaagcaataattttacatgtacagaaattatcctaacctttaatactggcgagagcaacagtttacttaatacggtaatggactagtgcagtttttgtagacagtgggcttctgatacaaagtcttgtttaaacacagacacacacacacacaaacacacacacacaccctaaagtgtgggtttcctgttctaatgatttgttgaatattattatattattattattattattattattattgttattgttattagtaatgtttggttctggattctacttgttactgagtttaaattacttgacggttcaggttactttgcaacactttcaaacgatgcaatgtaactggctagcttatatatatatatatatatatatatatatatatttttttttttttttacttatttttttctgatattcttacaccagatatgtacgaaaatgatctgtcctgttggtgtaattaggaatgtccatgcagatacagttaaacaactgtaattgactgttctgtaaagttattttgggcaaagttgcggagacacattcctctgtccacctaagaaatcagaagactcttctgttgatttatgtttaatcatttcagtagtttccccacagtgatcatttctgcattttctggcttttgttttcttggctgaaagtgaatggtgactgttaggaatgtcagggactagtgacccagtcctgtttctctgtgttttagttattaaaaagaaattctgtacccaaagtgacacgaaagtgtagtctacatttttactgtttcagaagcggcatggaaaagtgcagttggcctttggagctggaagtgtcttgctggtgaggctccatcctggaggctctggtggggagtgggctggcgctggggccctgccggccgcgtgctggatccttcctggcttgcaggagagcaggcgtggaggacagtcagcttgcggggccgcgcagggtgcacagagtgcaggaggaaggttttcacccagttaaacagactggggagcccccccaagaacgccatcccttgaggccagctgtgggcaggcctggatgtgtggtcccttccttccacccatcgtcagtattgtgttggtttgttaatttgttgatttggtcatagtatttaatatgatttgtgtttccttatttatttagccaccgttttgattgcctttttttttccgaatggtaatttctgcatgatacacttctgtacgttgtcttctgactgttacagactttctactacctctcccgatctgctgtttccttgtttcttaacaggattttttacagtgttgcgtctaatgtaacttagacaataaagggtttggttgtctacactgcagcttctcggtgtctctcccctgctttccgctcgctgcttcccgctctgcccctgctggggcctggctgcaccctggcctgccttcctatactctcctgtttcctgctcatatctcttcctcatttttgcgttcaaataacacacagctaatgagcttctaaaaatcttttcaggttgttcacttgtattccttaatttgaagaatgaatatttaaattctctcaaaagtcagatattgaggatcttctctgggaaattggccactgtacctgcccacctttctgcctggttccctggaaggtcttattgtcatcttagacggacagatttcattctcagcaccatacagatttggcttcaaagccaggtgaattttgcctttgaggctctgaaaagtattaagtgttttaagaggtcccccaatatttacttatttattttttaaaccaagaaagacactggttccctgaaaagcaggtgcttcaggaagtagcaattgggagttgcatacagttacttcgtcagagaaaggagcgcccagtatgacaggcccccacccctgatccggccactgtgcacaggtcgctgagggtgtgagaacacctctgcaggggctccggcacatgtgggtttcatcgtctcacactccttcaggctgcaggggttgagtgcagaaagggcaagcttcatctccatggtgcctctccaggctggcaactctggtcggcctctgttctttggacagagagggtgtaggttacagggtcagtagggatgctttctggatcaaagaaagtgggtgtagtgcttagtctgttgtgtggaagagggcacctcctgggctttcgtggctggagactgtctaccaacattccttccttcaaactagacaaaccctcctctgccacccccagcaaattctcagaggtttccaagctgtagaaaaaggaaggaaggaaggacggcattcacatagctttactttctgcttcaaaatgtcttaagtagcatatgttgttttactgcttttaactttggtgagttctaatttcagaacgttttgttcactgagcaaaaaaacagatgaaacaaccacaggccaggacttcaagtgaggaggacgcctttgtttgccgtggttggtgggagcacacgccggagcccggtaacgtgcctgtgggagtgaccaagggccacccgcccaagggaaaatgttcattcttcatcagctttgctaattctgctttgaggcagtaaaatgcaaaagaccatagaatttgtatttctttttttaaaatacaatttataacattatattttgtactctttatattagaatttgtaactagattgatgtatttaactatttctgaaaaagtaattcaatgttttagttgtgtgataaaaatatttagataaaacatattcattctattggaatttgaaataaataaaaacatcttggagttctga

SEQ ID NO: 202758 - DNA, 346 bp, Homo sapiens
  Payload ID: 19991
  Gene Name: zinc finger protein 516
  ENST ID: ENST00000542818
  CDS Start-End: 1-76
ggactttgcgaccctctaccagggatggggtgtcagcggccctgggttggagcacagaggggagagaccattctaacacaggtaccgtccagacagtgcctctgagaaagggaacctaaaggcgtgtttccgacgcaccccaggtccccgtaacggccattagcagtaccctcacgatgtcccagcagcctcccacctgtgacctggccgctccatggaagaacagccggggaactcctgagcagacacctcacatcccgagccgctgcgctggagtggaaactgaaggcagatgcctctccttgttaaacgttcagaaataaatgaagatgctatattctagaaa

SEQ ID NO: 202759 - DNA, 482 bp, Homo sapiens
  Payload ID: 19991
  Gene Name: zinc finger protein 516
  ENST ID: ENST00000532857
  CDS Start-End: 257-482
aagtcacaaaaggaactttagtggggatcctacttacacatacagcagaaaggcattgcccccgtcagcctgccatgcagtttcgaatcttgattgaaggtgctggctgccagctgctgcgccccccatgtagaaggtgcacctcctgggagcaggcacgtcttttggctcttctgaccatggagagataggacggtccctgcagcccgcgcgacagaaagctgtgccgccaccaccggccgcgcccgtccttcggatggatcgcaacagagaggccgagatggagctgaggcgaggccccagccccaccagggccggccggggccacgaggtggatggggacaaggctacctgccacacctgctgcatctgcggcaagagcttccccttccagagctcgctttcgcagcacatgcgcaagcacacgggcgagaagccctacaagtgtccctactgcgaccaccgggcttcccagaagggca

SEQ ID NO: 202760 - DNA, 2326 bp, Homo sapiens
  Payload ID: 19991
  Gene Name: zinc finger protein 516
  ENST ID: ENST00000617840
  CDS Start-End: 1-1553
gctgcttttccgaagaggtgacttcgaccgagctctccagtggagaccagagtcacaagatgggagataacgcctcggaaagagacaccggcgagtccaaggcagggatcgcagcttctgtgtccatacttgaaaacagtagcagagagacttctagaaggcaagagcagcacagattttctatggacttaaagatgccagcatttcaccccaagcaggaggtgcccgtccctggtgatggtgtggagttcccttccagtacgggagcggagggccagacgggtcaccctgcagaaaagctgtccgatttgcacaacaaggaacactctgggggagggaagcgggcgctggccccagacctcatgccgctagatttaagtgcgaggtcgacgcgggatgaccccagcaataaggagacggcctcctccctgcaggcggctttagtcgttcacccgtgtccttactgcagccacaagacctactaccccgaggtcctgtggatgcacaaacgcatctggcaccgcgtcagctgcaactccgtggctcccccgtggattcagcccaatggttacaaaagcatcagaagcaatttggttttcctttcccggagcggacgcacgggccccccgcctgccctcggtggcaaagaatgccagcctttgctccttgctcggttcacccgcactcaggtgccaggggggatgccggggtccaaaagtggctcttctcccctgggagtggtcacaaaagccgctagcatgcctaagaataaggagagccattccggaggtccctgcgctctgtgggcgcccggccctgacgggtatcgacagaccaaaccttgtcacggccaggagccacatggcgcggccacacaggggcccctggccaagcccaggcaggaggctagctccaaaccggtgcctgccccgggtggcgggggcttcagcaggagcgccacccctacgcccaccgtcatcgcccgggctggcgcgcagccctcggccaatagcaagcctgtggagaagtttggggtccccccagcgggggctggctttgcccccacaaataagcacagtgccccggactccctgaaagccaaattcagtgctcagcctcagggtccacctcctgcaaagggcgaagggggcgctcctcctctacctccccgcgagcccccctcgaaggcagcccaggagctgaggactctggccacctgtgctgcggggtccaggggcgacgcggccttgcaggcccagcccggcgtggctggggcgccccccgtcctacactccatcaaacaggagccggtggccgaggggcatgagaagcgcctggacatcctcaacatctttaagacgtacattccaaaggactttgcgaccctctaccagggatggggtgtcagcggccctgggttggagcacagagggacactccggacgcaggcccggccaggagagttcgtctgcatcgagtgcggaaagagcttccaccagcccggccacctcagggcccacatgcgggcacactcaggggagagaccattctaacacaggtaccgtccagacagtgcctctgagaaagggaacctaaaggcgtgtttccgacgcaccccaggtccccgtaacggccattagcagtaccctcacgatgtcccagcagcctcccacctgtgacctggccgctccatggaagaacagccggggaactcctgagcagacacctcacatcccgagccgctgcgctggagtggaaactgaaggcagatgcctctccttgttaaacgttcagaaataaatgaagatgctatattctagaaatacatgtagatactatatacgcatttacgtgctcatcgtccatagtcccatattttcttataataaacagtagtactggcaggcacagtaggggcacaaggcatctgtcttattcaagacaagtttgagacactggaaaaaaagatacttgttgtgtgtgttggacagagtggcgaggctgagcactgtcacaggggcctcccatgttaagagggactgtggggatgatgtcagaacaagacgtggtggatttgaggttgatcgagtattaatactactgcctctccttgtcttagtgggtatttaaaatagtaaataagagagaggaaggaggtgacgttcaggtgctgtgggaagcaggcttggcggaggggtatgatgatgagaccctcattgttcactggctccatcgcactcctccctggggccgtgtgcctgttccattcttcccaccattcgaactgagcgaatctggcaaaggagacacgtctgtgggaatgcgt

SEQ ID NO: 202761 - DNA, 2335 bp, Homo sapiens
  Payload ID: 19992
  Gene Name: zinc finger protein 517
  Uniprot ID: Q6ZMY9
  ENST ID: ENST00000359971
  CDS Start-End: 108-1586
ggaaccggagcctgagagccgggcgccgtgcgctcctccccgcgctgtctcggcggcccaggaattcactgtctgtagcatctgctcctccacagagggaccctggaatggcgatggcactcccgatgcctggacctcaggaggcggttgtgttcgaggatgtggctgtgtacttcacaaggatagagtggagttgcctggcccccgaccagcaggcactctacagggacgtgatgctggagaactatgggaacctggcctcactaggctttcttgttgccaaaccagcactgatctccctattggagcaaggagaggagccgggggccttgattctgcaggtggctgaacagagcgtggccaaagccagcctgtgcacagattccaggatggaggctgggatcatggagtctcctctgcagagaaagctctccaggcaggcaggactgccgggcaccgtgtgggggtgcctcccctgggggcaccctgtgggggggcaccctgcaccaccccacccgcatggcggtcctgaggacgggtcagataaacccacccacccccgggctcgggagcacagcgcctccccaagggttctgcaggaagacctgggccggcctgtggggagctcagccccccgctacaggtgcgtgtgcggcaaggcgttcagatacaactcgctgcttctcaggcaccagatcatccacaccggcgccaagcccttccagtgcacagagtgcgggaaggccttcaagcaaagctccatcctgctgcggcaccagctgatccacactgaggagaagccgttccagtgcggcgagtgcgggaaggccttccggcagagcacgcagctggctgcccaccaccgcgtccacacccgcgagcggccctacgcatgcggcgagtgcggcaaggccttcagccgcagctcccggctgctgcagcaccagaagttccacaccggggagaagcccttcgcgtgcacagagtgcggcaaggcgttctgccgcaggttcaccctcaacgagcacggccgcatccacagcggggagcggccctaccggtgcctgcggtgtgggcagcgcttcatccgagggtcctcgctcctgaagcaccaccggctgcacgcgcaggagggtgcccaggacggcggcgtggggcagggcgccctgctcggagctgcgcagaggccccaggcgggggacccgccccacgagtgcccggtgtgcgggaggccgttccgacacaactccctgctgctgctgcacctgcgcctacacacgggcgagaagccgttcgagtgcgcggagtgcggcaaggccttcggtcgcaagtccaacctcactctgcaccagaagatccacaccaaggagaagcccttcgcgtgcaccgagtgcggcaaggcgttccgcaggagctacacgctgaacgagcactaccggctccacagcggcgagaggccataccggtgccgcgcctgcgggagggcctgcagccggctgtccaccctcatccagcaccagaaggtgcacggccgcgagcccggggaggacacagagggcaggcgggcgccctgttgggcttcctgatgacggggacgacaggccgaggattcacgctggaagcccacccaagccggcggggccctagcgcagaaattcagaaccccctgtcctgaaggtgaagcaaagtctaaagaaagggccagctcccatcaggagctcggcttcttgctccagccgggcactggggagggaaagggcaccaggcagcccgtggtgtggcctcaggaaccactatcagccaccatttcctggggccttccggaaatgtccaggagcgggcagaagggagagagggaggggcagctatgctcagtccccaaagagcagggcacagggggcgccacagacgcatatgcagctgagctccccacaggccggcccgggtcttcgtgcagaaccattgggcacagccaggccttagcgccaggctccgtgtggcggtcaattccaggtgctgtaaagccgactaacagggtacagggagccttagctggctgccatgtctcctgcctgtaatcccatcactttgggaggctgaggtgggaggtttgcttaagcccaggagtttgagaccagcttgggcaacatggtgaaacttctctacaaaaaatttaaaaataagtcaggtatcgtggtctgtgcctgtacgctgtagtcccagctactcaggaggctgaggtgggaggatgggttgagcctgggaagtcaaggctgcagtgagctatgatagcaccacggcactccaacctggttgacagagtgacaccctgttt

SEQ ID NO: 202762 - DNA, 1460 bp, Homo sapiens
  Payload ID: 19992
  Gene Name: zinc finger protein 517
  ENST ID: ENST00000529429
  CDS Start-End: 1-1379
tctgctcctccacagagggaccctggaatggcgatggcactcccgatgcctggacctcaggctttcttgttgccaaaccagcactgatctccctattggagcaaggagaggagccgggggccttgattctgcaggtggctgaacagagcgtggccaaagccagcctgtgcacagattccaggatggaggctgggatcatggagtctcctctgcagagaaagctctccaggcaggcaggactgccgggcaccgtgtgggggtgcctcccctgggggcaccctgtgggggggcaccctgcaccaccccacccgcatggcggtcctgaggacgggtcagataaacccacccacccccgggctcgggagcacagcgcctccccaagggttctgcaggaagacctgggccggcctgtggggagctcagccccccgctacaggtgcgtgtgcggcaaggcgttcagatacaactcgctgcttctcaggcaccagatcatccacaccggcgccaagcccttccagtgcacagagtgcgggaaggccttcaagcaaagctccatcctgctgcggcaccagctgatccacactgaggagaagccgttccagtgcggcgagtgcgggaaggccttccggcagagcacgcagctggctgcccaccaccgcgtccacacccgcgagcggccctacgcatgcggcgagtgcggcaaggccttcagccgcagctcccggctgctgcagcaccagaagttccacaccggggagaagcccttcgcgtgcacagagtgcggcaaggcgttctgccgcaggttcaccctcaacgagcacggccgcatccacagcggggagcggccctaccggtgcctgcggtgtgggcagcgcttcatccgagggtcctcgctcctgaagcaccaccggctgcacgcgcaggagggtgcccaggacggcggcgtggggcagggcgccctgctcggagctgcgcagaggccccaggcgggggacccgccccacgagtgcccggtgtgcgggaggccgttccgacacaactccctgctgctgctgcacctgcgcctacacacgggcgagaagccgttcgagtgcgcggagtgcggcaaggccttcggtcgcaagtccaacctcactctgcaccagaagatccacaccaaggagaagcccttcgcgtgcaccgagtgcggcaaggcgttccgcaggagctacacgctgaacgagcactaccggctccacagcggcgagaggccataccggtgccgcgcctgcgggagggcctgcagccggctgtccaccctcatccagcaccagaaggtgcacggccgcgagcccggggaggacacagagggcaggcgggcgccctgttgggcttcctgatgacggggacgacaggccgaggattcacgctggaagcccacccaagccggcggggccctagcgcagaaattcagaaccccc

SEQ ID NO: 202763 - DNA, 1383 bp, Homo sapiens
  Payload ID: 19992
  Gene Name: zinc finger protein 517
  ENST ID: ENST00000525105
  CDS Start-End: 46-474
aattcactgtctgtagcatctgctcctccacagagggaccctggaatggcgatggcactcccgatgcctggacctcaggaggcggttgtgttcgaggatgtggctgtgtacttcacaaggatagagtggagttgcctggcccccgaccagcaggcactctacagggacgtgatgctggagaactatgggaacctggcctcactaggctttcttgttgccaaaccagcactgatctccctattggagcaaggagaggagccgggggccttgattctgcaggtggctgaacagagcgtggccaaagccagcctgtgcacagaggaccctaatacactgcccagcagaagccaggaaggaagccctgccagctcagaaggtgggccaggagagaagggtgtggccggaagggtagccggtgggggtgctgcatcctcttggccccacggggagcaccctgtcacccctaacagatgaagagaaggtgaggggggattgagttacctgcccactggtgtgtcaaactccatgatgggggtgggaacatgcagacctggcccctccaaggcccactgctccccgggctgtgcgccccacagtctgtgccaggggctgcagaaagagccatgggaagcctggccctggtagggcaccaagatggggagggctggatccaccctccagagaacaagaatcctgggcagtagccgggacatggtgggggaggctgaagggttgtccctgagcatccccaacatggagctcggaagtctgggccatgggcaggaaagcacgaaggtcagggccagcctggggaaccaagagctgtgccacgatcccttccacctggggcagctgcccacatgcccgccactgggttccatcacctgagactcctggcaggtgcctctctgagtctttgtcctgtgctggaaactgggatgtgcagcacacatcttcacacccacagcacggacagcgggaataacacttcctttggggatccagggtttctggtgtctccagatttttcaggcgccaccatgttcctctcatccagacgtcagcacccaaggtggaagcaggtcatggcatgcccggcccagctgcagtccgagtgcagatcccatggcgagcgtgggatccagcccaaagcacaagccacgcacagcccgccaggttgagtgggcaggtacctccaacagccagcccaggttgagtgggcaggtacctccaacagcctggagccgtgaggccttgcgcaggggcgttgccggccgtggaggtctctggctggcaaagtggcaccgaaagagtcctgtgtcataaccagactcacttgtagcttctgttgctctccctagctatttgcaaagcatccaggat

SEQ ID NO: 202764 - DNA, 2536 bp, Homo sapiens
  Payload ID: 19992
  Gene Name: zinc finger protein 517
  Uniprot ID: Q6ZMY9
  ENST ID: ENST00000533965
  CDS Start-End: 108-1586
ggaaccggagcctgagagccgggcgccgtgcgctcctccccgcgctgtctcggcggcccaggaattcactgtctgtagcatctgctcctccacagagggaccctggaatggcgatggcactcccgatgcctggacctcaggaggcggttgtgttcgaggatgtggctgtgtacttcacaaggatagagtggagttgcctggcccccgaccagcaggcactctacagggacgtgatgctggagaactatgggaacctggcctcactaggctttcttgttgccaaaccagcactgatctccctattggagcaaggagaggagccgggggccttgattctgcaggtggctgaacagagcgtggccaaagccagcctgtgcacagattccaggatggaggctgggatcatggagtctcctctgcagagaaagctctccaggcaggcaggactgccgggcaccgtgtgggggtgcctcccctgggggcaccctgtgggggggcaccctgcaccaccccacccgcatggcggtcctgaggacgggtcagataaacccacccacccccgggctcgggagcacagcgcctccccaagggttctgcaggaagacctgggccggcctgtggggagctcagccccccgctacaggtgcgtgtgcggcaaggcgttcagatacaactcgctgcttctcaggcaccagatcatccacaccggcgccaagcccttccagtgcacagagtgcgggaaggccttcaagcaaagctccatcctgctgcggcaccagctgatccacactgaggagaagccgttccagtgcggcgagtgcgggaaggccttccggcagagcacgcagctggctgcccaccaccgcgtccacacccgcgagcggccctacgcatgcggcgagtgcggcaaggccttcagccgcagctcccggctgctgcagcaccagaagttccacaccggggagaagcccttcgcgtgcacagagtgcggcaaggcgttctgccgcaggttcaccctcaacgagcacggccgcatccacagcggggagcggccctaccggtgcctgcggtgtgggcagcgcttcatccgagggtcctcgctcctgaagcaccaccggctgcacgcgcaggagggtgcccaggacggcggcgtggggcagggcgccctgctcggagctgcgcagaggccccaggcgggggacccgccccacgagtgcccggtgtgcgggaggccgttccgacacaactccctgctgctgctgcacctgcgcctacacacgggcgagaagccgttcgagtgcgcggagtgcggcaaggccttcggtcgcaagtccaacctcactctgcaccagaagatccacaccaaggagaagcccttcgcgtgcaccgagtgcggcaaggcgttccgcaggagctacacgctgaacgagcactaccggctccacagcggcgagaggccataccggtgccgcgcctgcgggagggcctgcagccggctgtccaccctcatccagcaccagaaggtgcacggccgcgagcccggggaggacacagagggcaggcgggcgccctgttgggcttcctgatgacggggacgacaggccgaggattcacgctggaagcccacccaagccggcggggccctagcgcagaaattcagaaccccctgtcctgaaggatctctctgtcagccagcctggagtgcaatggcacaatcatggcttactgcagcctccagctcccaggctcaagcgtttctcccaccttagcctcctgagtagctgggactaaggcacacacactgtacttggcagctggcgaagcattgtttctgagtgtgtgaggatgttttcagtggactcagtgaagatctgccctcagcgtgggcaggcacatccacttggttggggacccagatggaacacaaagggagaagacaagcaaattctcttttctggagggagacacccatctcctgcccttggacatcaggactccaggttcttcggcctttggactcaggcttgccacagaggcctcccagggctctcggccagtcagcctcagaatgagagttacaccactggcttccttggttcaaccaccttcttacctggactgagcctcacttacagcttctctaggtctccagcttgcagacagcctatgggaggacttctcagcctccataagtgtgtgggccagttcgcctaataaatcccctctcctggccgggcgcggtagctctcccctgtaatctcagcattttgggaggcagaggtaggtggatcacctgaggtcaggagttcaagaccagcctggccaacatggtgagacccccgtctctactaaaagtacaaaaagtagctgggtgtggtgctgggtgcctgtaatcccagctactcgggaggctgaagcaggagaatcacttcaacctgggaggtagaggttgcagtgagccgagatcgagccactgcactccagcctgggtgacagggcaagactctgtctcaaacaaataaaaatcccctctcct

SEQ ID NO: 202765 - DNA, 456 bp, Homo sapiens
  Payload ID: 19992
  Gene Name: zinc finger protein 517
  ENST ID: ENST00000528012
  CDS Start-End: 67-456
gcgctgtctcggcggcccaggaattcactgtctgtagcatctgctcctccacagagggaccctggaatggcgatggcactcccgatgcctggacctcaggaggcggttgtgttcgaggatgtggctgtgtacttcacaaggatagagtggagttgcctggcccccgaccagcaggcactctacagggacgtgatgctggagaactatgggaacctggcctcactagcactgatctccctattggagcaaggagaggagccgggggccttgattctgcaggtggctgaacagagcgtggccaaagccagcctgtgcacagattccaggatggaggctgggatcatggagtctcctctgcagagaaagctctccaggcaggcaggactgccgggcaccgtgtgggggtgcctcccctgggggcaccctgtgggggggcaccctgcaccaccccacccg

SEQ ID NO: 202766 - DNA, 1615 bp, Homo sapiens
  Payload ID: 19992
  Gene Name: zinc finger protein 517
  Uniprot ID: Q6ZMY9
  ENST ID: ENST00000531720
  CDS Start-End: 46-1524
aattcactgtctgtagcatctgctcctccacagagggaccctggaatggcgatggcactcccgatgcctggacctcaggaggcggttgtgttcgaggatgtggctgtgtacttcacaaggatagagtggagttgcctggcccccgaccagcaggcactctacagggacgtgatgctggagaactatgggaacctggcctcactaggctttcttgttgccaaaccagcactgatctccctattggagcaaggagaggagccgggggccttgattctgcaggtggctgaacagagcgtggccaaagccagcctgtgcacagattccaggatggaggctgggatcatggagtctcctctgcagagaaagctctccaggcaggcaggactgccgggcaccgtgtgggggtgcctcccctgggggcaccctgtgggggggcaccctgcaccaccccacccgcatggcggtcctgaggacgggtcagataaacccacccacccccgggctcgggagcacagcgcctccccaagggttctgcaggaagacctgggccggcctgtggggagctcagccccccgctacaggtgcgtgtgcggcaaggcgttcagatacaactcgctgcttctcaggcaccagatcatccacaccggcgccaagcccttccagtgcacagagtgcgggaaggccttcaagcaaagctccatcctgctgcggcaccagctgatccacactgaggagaagccgttccagtgcggcgagtgcgggaaggccttccggcagagcacgcagctggctgcccaccaccgcgtccacacccgcgagcggccctacgcatgcggcgagtgcggcaaggccttcagccgcagctcccggctgctgcagcaccagaagttccacaccggggagaagcccttcgcgtgcacagagtgcggcaaggcgttctgccgcaggttcaccctcaacgagcacggccgcatccacagcggggagcggccctaccggtgcctgcggtgtgggcagcgcttcatccgagggtcctcgctcctgaagcaccaccggctgcacgcgcaggagggtgcccaggacggcggcgtggggcagggcgccctgctcggagctgcgcagaggccccaggcgggggacccgccccacgagtgcccggtgtgcgggaggccgttccgacacaactccctgctgctgctgcacctgcgcctacacacgggcgagaagccgttcgagtgcgcggagtgcggcaaggccttcggtcgcaagtccaacctcactctgcaccagaagatccacaccaaggagaagcccttcgcgtgcaccgagtgcggcaaggcgttccgcaggagctacacgctgaacgagcactaccggctccacagcggcgagaggccataccggtgccgcgcctgcgggagggcctgcagccggctgtccaccctcatccagcaccagaaggtgcacggccgcgagcccggggaggacacagagggcaggcgggcgccctgttgggcttcctgatgacggggacgacaggccgaggattcacgctggaagcccacccaagccggcggggccctagcgcagaaattcagaaccccctgtcctgaag

SEQ ID NO: 202767 - DNA, 7277 bp, Homo sapiens
  Payload ID: 19993
  Gene Name: zinc finger protein 518A
  Uniprot ID: Q6AHZ1
  ENST ID: ENST00000316045
  CDS Start-End: 858-5309
ggagaccattcccagtcagcaagggcttgggaagtgcatacagttcctgctcctggtgtctactctgaagagcacagagtagacgtttgtctgccatttcaccggcagtaagatcagcagctgctggtgagcaaagaggtagtagtgggtcactggactggtgggcgccggggccgcgcgctagatggagaggtcagcggcgaacccagctccatggcctagtctcgtcagaccgagcgcggaccctgccggcctccgttctcttccgcttgtctcagatatcatctcttcttttgatcactgttcctgattgtgacattgtgcaagtgttaaattgtgtgccttttgttcctgaagaaagagatgtctcctactctttgtgttggataggtcctgggatctttgaaatgctaagattcttggataccacagtatcataaaattcctctaaatgcattggtgctagcaatcccctactctgtctggcctctggatctagcttgaagttctggattcatttccttcttccttgtacctcagcctgagccttctgtcacccaaagggctccagctggtttttcactcaggcctcactttatcttccaagatgaggaaactgaggtccagagaagttgaagttttcccaaggtcacacagcagagctggaactagagcttgcatttcctgacttccagattagtgttatttttacttcaaactattacttcttggtgagttattgtgggaaaaatcctgtatattgaagatgtctctacacagtatcgtttcctgtttaaattacagataacttcaagagttttcagaaaaaaagaaattgggacttttttggttaaatcatgccatctgaacagaaacagttattttgtgatgaaaaacaaactactttaaaaaaagattatgatgtgaaaaatgagatagttgataggtcggcacctaaaccaaaaatttcaggaagtattcattatgcactaaaaaatgtgaaaattgatttgccaaaaataaatattccaaatgaagtcctattgaaacatgaagttgacaaatacagaaaattatttcagagtaaacagcagactgcaagaaaatctatcagtataaagactgtaagctgtgtagaggagtgtacattgcttcataagtctgagagagctgaagaagagggtgtaaaaatgtctgcaaaaatactcaatttcagctgtttaaaatgccgagacaacactcgatatagcccaaatgatttgcagaaacactttcaaatgtggcaccatggcgaattaccttcatatccttgtgaaatgtgcaacttttcagcaaatgactttcaggtatttaaacaacacagacgaacccatagaagcactttagtaaaatgtgacatttgtaacaatgagagtgtatatactttactgaacttgacaaagcatttcacatccacacattgtgttaatggtaattttcaatgtgaaaagtgtaagttctccacccaggatgttggcacatttgttcagcacattcatagacataatgaaattcattataagtgtggtaaatgtcatcatgtatgttttaccaaaggagagcttcagaagcaccttcatattcattctggtacttttcccttcacttgtcaatattgtagctatggtgccaccaggagagaacaccttgtaagacatgttataactttgcacaaagaacatttatatgcaaaagaaaaactggaaaaagacaaatatgaaaaaagaatggcaaagacttctgcaggacttaagctaatactgaaaagatataaaataggtgcatcaaggaagacgttctggaaacgtaagaaaattaacagtggaagtgacagaagtatagaaaagaacactcaagtgcttaagaaaatgaacaaaacacagactaaatctgaagaccagagccatgttgttcaagagcatttaagtgaagaaaaggatgaaagactacactgtgagaataatgataaagcccctgaatcagagtcagagaagccaactcctctgtccactgggcaaggtaatagagctgaagagggaccaaacgctagttcaggtttcatgaagactgctgtactaggacctacactgaaaaatgtaatgatgaaaaataataaactagcagtttcccctaactataatgctacgtttatgggcttcaagatgatggatggaaaacagcatattgtattaaaattggtgcctatcaaacaaaatgtatgttcaccaggctcacagtcaggtgctgcaaaggacggtactgctaatttgcagccccagactttggacactaatggatttttaacaggagtaacaactgagttaaatgacacagtttatatgaaagcagctactccattttcatgttcatcttctatactttcagggaaagcaagttcagaaaaagaaatgactttgatatctcaaaggaataatatgcttcaaacaatggattatgagaaaagtgtatcttctttgtcagcaacatcagaattggttacagcatcagtgaatttgaccacaaaatttgaaacaagagataatgttgacttctggggaaatcatctcactcagagtcaccccgaggtattaggtaccaccattaaaagtccagataaagtcaactgtgttgccaaaccaaatgcatacaacagtggagatatgcataattattgcattaattatggcaactgtgagttacctgttgaatcctccaaccaaggatcattaccttttcataattactcaaaagtgaataattctaataaacgtcgtaggttttcaggaacagcagtgtatgaaaaccctcaaagagaatcttcatccagcaaaacagttgtccaacaaccaattagtgaatcatttttatcactagtgaggcaggagagctcaaaaccagatagcctattagcatctattagccttttaaatgataaagatggaactttaaaagcaaaatctgaaattgaagaacagtatgttttagaaaaaggacaaaacattgatggacaaaacctgtacagtaatgaaaatcaaaatttagagtgtgcgactgaaaaatctaaatgggaagacttttctaatgtcgattcacctatgatgcctagaatcacatctgttttctctctccagagccaacaggcatcagaatttctgccacctgaagtaaaccaattgcttcaggatgtattgaaaataaaacctgatgtaaaacaagactctagtaacactccaaataaaggcttgccacttcattgtgaccagtcatttcaaaaacacgagagagaaggcaaaattgttgaatcttcgaaagatttcaaagtgcaaggcatcttcccagttccacctggcagtgtgggtattaatgtgcctacaaatgatttgaatttgaaatttggaaaagaaaaacaagtgtcatcaataccacaagatgtgagagattcagagaagatgcctagaatttcaggttttggcacattacttaagactcagtcagatgcgataataacacagcagcttgtaaaagacaaactacgagccaccacacaaaatttaggttctttttatatgcagagtccacttttaaattcagaacaaaaaaaaactataattgttcagacttcaaaaggattcttaataccattgaacattactaacaagcctgggctaccagttattcctggaaatgcacttccattggttaattcacaaggtatccctgcttctctttttgtaaacaagaaacctgggatggttttaacacttaataatgggaaacttgaaggtgtttccgctgtcaaaaccgagggtgccccagctcgtggaactgtgactaaggagccttgcaaaacacctattttgaaggtagaaccaaacaataattgtcttacacctggactttgttccagcattggcagttgtttgagcatgaaaagtagctcagaaaatactttgccattaaaaggcccttacattttgaaaccaacgagttctgtgaaagctgttcttattcctaacatgctatctgagcaacagagcactaagttgaatatctccgattcagtaaaacagcagaatgagatttttccaaaaccacctctttataccttcttgcctgatggcaaacaagctgtttttttaaagtgtgtgatgccaaataaaactgagctgcttaagcccaaattagtccaaaatagtacttatcaaaatatacagccaaagaaacctgaaggaacaccacaaagaatattgctgaaaatttttaaccctgttttaaatgtgactgctgctaataatctgtcagtaagcaactctgcatcctcattgcaaaaagacaacgtaccatctaatcagattataggaggagagcagaaagagccagaatctagagatgccttacccttcttactagatgacttaatgccagcaaatgaaattgtgataacttctactgcaacatgcccagaatcttctgaggaaccaatatgtgtcagtgactgttcagagtccagggtattaaggtgtaaaacaaattgtagaattgagaggaacttcaatagaaaaaagacttccaaaaaaattttttcaaaaacaaaaactcatggaagtaaagactctgaaactgcctttgtatctagaaacagaaactgtaaacgaaagtgtagggatagttaccaagaacctccaagaagaaaagcaacattgcatagaaagtgtaaagaaaaggcaaaacctgaagatgtccgtgaaacatttggatttagcagacctaggctttcaaaagattccatcagaactttgcggcttttcccttttagttctaaacagcttgtgaaatgtcctaggagaaaccaaccagttgtagttttgaatcatcctgacgcagatgcaccagaagtagtaagtgtaatgaaaactattgctaaatttaatggacatgtacttaaggtttcattgtcaaaaagaactataaatgctttactgaaaccagtttgttataaccctcctaaaacaacttatgatgatttttccaagaggcacaaaacatttaaacctgttagttctgtgaaagaaagatttgtgctaaaattaacactcaaaaagacaagcaaaaacaattaccagattgtgaagactacctctgaaaatattttgaaggctaaatttaactgttggttttgtggtagagtatttgacaatcaggatacttgggctggtcatgggcagagacatttaatggaagctactcgggattggaacatgttagaatagtttaccataattaccaaggaaaagaaaagtaaaattaccttagaagaaaacaacgggttcagttaccataatgcagacattttctacttcagtatagtacctgaaatcgaacattttaaaagttgattgtatttctgtggaagagtaaaagttgtatgtatgatatttgaaaatgctatccctgcactcaaaagttttgaaagaaactaatcacagcacagaagtaccttgatttaattttttaaacgtgttctcgggaagttagggctaaagaaaattttgataaaacaattttcccactttagttctttagtgactcttagtagagggtaatggctgacacccccattccctctcttcttccaccagccttatgcatctaagtgtagctcctctggagatggagagctctttcatcgtagaactgaaggagtttctcacatttgtgaagatactttgagagaacctgggtaaagaagtcactctatatctgctaaatatagttattttgaaggatattaggctccttgaaagtacatttaactcactacagttacacctcatacaatgcttgaagagtttttggcaagtaaattttttttccagttgaactctgtcacttgttagagattgggaacactctcccaaggtgattttctttttctaagtgactgtgtcaaatgttgcagtagatgggcagcttcaagagaagaatttaaactctttgtctcattgaaagtttggttaaagaacttgaacatatttctaaatttgattatattctctgatgatccctttgcacagaactatgcttatctcatgtttgtcctccataaacaaatggccatttttttcttcttggttcccatccctttaaaaagagtggaacataggagcacttccaagggagtggcttttcttgaaaattaaaattgtttaccaaaacagtattttgaagcaagatcatatttttgtctgtattcactttattatttgaacatgtccaaattaggacaaagcatttctgttagctgcttctcagtgtgactgacaacccaaaacatatatacagattgttggcatttgcaaaaggaagcatcaatagtggacccagaggcagtgcataaaaccttaggatagattcctaagggacatgcccaacagagttttaaaatggatgttttcatgatgacaacagaatcatagatttagatttttcaccttgtaagtttggatcaaattttgctggttctttggataatggagttcttgtgttaacaaattacgtgctatatgattttttgttacattgttacaagtgttaatgacattttcattaatggatgaaaacttcagggcttcttttctgtatataacaaattaagtctgtacatatttttgtaccttttatgtaaattttgcacagaaatttttggcataagtttattttctttcagtttagttcagtgcatgcactaataaaactggttgtttaatttaaaaggaatatataagactttacccatgttattttcttggtttttatttcagatgtagattttgtttttgaggtaaattcgttcttcagggattgaacactattgttagcaagtgcctaaaaaagatgtgaaacagtttacatatgtcaactgtaacagtaggtcccaaatgggcccattcccctaatagttttatttttaaagaaagccatacatagaatgcttcaagctatcttgctatgcacattatacttgtactgttttgtgcagtttgtctactttcttagtgaagtattttttgtataaaatgttacaattgtgtttcttaaattgagcctaagaatggagttaattggaaatatacagtatatattaataatgtacatggtgtttaaagaatggtaagcattgttaatttctgtaatgaacattttcaattaaatttatcttgtttgtgtttacacaataa

SEQ ID NO: 202768 - DNA, 1579 bp, Homo sapiens
  Payload ID: 19993
  Gene Name: zinc finger protein 518A
  ENST ID: ENST00000478086
  CDS Start-End: 565-1579
aatacccggatggaagtgtaatggccgccatcagggactcgcaggcaatgggtactacgacagatatcatctcttcttttgatcactgttcctgattgtgacattgtgcaagtgttaaattgtgtgccttttgttcctgaagaaagagatgtctcctactctttgtgttggataggtcctgggatctttgaaatgctaagattcttggataccacagtatcataaaattcctctaaatgcaatgaaggaactgagacacagaggttgagacttgtctaaagtaacatgaccagtaagtgcttgaattaatgcagatgaggaaactgaggtccagagaagttgaagttttcccaaggtcacacagcagagctggaactagagcttgcatttcctgacttccagattagtgttatttttacttcaaactattacttcttggtgagttattgtgggaaaaatcctgtatattgaagatgtctctacacagtatcgtttcctgtttaaattacagataacttcaagagttttcagaaaaaaagaaattgggacttttttggttaaatcatgccatctgaacagaaacagttattttgtgatgaaaaacaaactactttaaaaaaagattatgatgtgaaaaatgagatagttgataggtcggcacctaaaccaaaaatttcaggaagtattcattatgcactaaaaaatgtgaaaattgatttgccaaaaataaatattccaaatgaagtcctattgaaacatgaagttgacaaatacagaaaattatttcagagtaaacagcagactgcaagaaaatctatcagtataaagactgtaagctgtgtagaggagtgtacattgcttcataagtctgagagagctgaagaagagggtgtaaaaatgtctgcaaaaatactcaatttcagctgtttaaaatgccgagacaacactcgatatagcccaaatgatttgcagaaacactttcaaatgtggcaccatggcgaattaccttcatatccttgtgaaatgtgcaacttttcagcaaatgactttcaggtatttaaacaacacagacgaacccatagaagcactttagtaaaatgtgacatttgtaacaatgagagtgtatatactttactgaacttgacaaagcatttcacatccacacattgtgttaatggtaattttcaatgtgaaaagtgtaagttctccacccaggatgttggcacatttgttcagcacattcatagacataatgaaattcattataagtgtggtaaatgtcatcatgtatgttttaccaaaggagagcttcagaagcaccttcatattcattctggtacttttcccttcacttgtcaatattgtagctatggtgccaccaggagagaacaccttgtaagacatgttataactttgcacaaagaacatttatatgcaaaagaaaaactggaaaaagacaaatatgaaaaaagaatggcaaagacttctgcaggacttaagctaatactgaaaagatataaaataggtgcatcaaggaagacgttctggaaacgtaagaaaattaacagtggaagtgaca

SEQ ID NO: 202769 - DNA, 7911 bp, Homo sapiens
  Payload ID: 19993
  Gene Name: zinc finger protein 518A
  Uniprot ID: Q6AHZ1
  ENST ID: ENST00000614149
  CDS Start-End: 482-4933
ctaacagttggtgctagcaatcccctactctgtctggcctctggatctagcttgaagttctggattcatttccttcttccttgtacctcagcctgagccttctgtcacccaaagggctccagctggtttttcactcaggcctcactttatcttccaagatgaaggaactgagacacagaggttgagacttgtctaaagtaacatgaccagtaagtgcttgaattaatgcagatgaggaaactgaggtccagagaagttgaagttttcccaaggtcacacagcagagctggaactagagcttgcatttcctgacttccagattagtgttatttttacttcaaactattacttcttggtgagttattgtgggaaaaatcctgtatattgaagatgtctctacacagtatcgtttcctgtttaaattacagataacttcaagagttttcagaaaaaaagaaattgggacttttttggttaaatcatgccatctgaacagaaacagttattttgtgatgaaaaacaaactactttaaaaaaagattatgatgtgaaaaatgagatagttgataggtcggcacctaaaccaaaaatttcaggaagtattcattatgcactaaaaaatgtgaaaattgatttgccaaaaataaatattccaaatgaagtcctattgaaacatgaagttgacaaatacagaaaattatttcagagtaaacagcagactgcaagaaaatctatcagtataaagactgtaagctgtgtagaggagtgtacattgcttcataagtctgagagagctgaagaagagggtgtaaaaatgtctgcaaaaatactcaatttcagctgtttaaaatgccgagacaacactcgatatagcccaaatgatttgcagaaacactttcaaatgtggcaccatggcgaattaccttcatatccttgtgaaatgtgcaacttttcagcaaatgactttcaggtatttaaacaacacagacgaacccatagaagcactttagtaaaatgtgacatttgtaacaatgagagtgtatatactttactgaacttgacaaagcatttcacatccacacattgtgttaatggtaattttcaatgtgaaaagtgtaagttctccacccaggatgttggcacatttgttcagcacattcatagacataatgaaattcattataagtgtggtaaatgtcatcatgtatgttttaccaaaggagagcttcagaagcaccttcatattcattctggtacttttcccttcacttgtcaatattgtagctatggtgccaccaggagagaacaccttgtaagacatgttataactttgcacaaagaacatttatatgcaaaagaaaaactggaaaaagacaaatatgaaaaaagaatggcaaagacttctgcaggacttaagctaatactgaaaagatataaaataggtgcatcaaggaagacgttctggaaacgtaagaaaattaacagtggaagtgacagaagtatagaaaagaacactcaagtgcttaagaaaatgaacaaaacacagactaaatctgaagaccagagccatgttgttcaagagcatttaagtgaagaaaaggatgaaagactacactgtgagaataatgataaagcccctgaatcagagtcagagaagccaactcctctgtccactgggcaaggtaatagagctgaagagggaccaaacgctagttcaggtttcatgaagactgctgtactaggacctacactgaaaaatgtaatgatgaaaaataataaactagcagtttcccctaactataatgctacgtttatgggcttcaagatgatggatggaaaacagcatattgtattaaaattggtgcctatcaaacaaaatgtatgttcaccaggctcacagtcaggtgctgcaaaggacggtactgctaatttgcagccccagactttggacactaatggatttttaacaggagtaacaactgagttaaatgacacagtttatatgaaagcagctactccattttcatgttcatcttctatactttcagggaaagcaagttcagaaaaagaaatgactttgatatctcaaaggaataatatgcttcaaacaatggattatgagaaaagtgtatcttctttgtcagcaacatcagaattggttacagcatcagtgaatttgaccacaaaatttgaaacaagagataatgttgacttctggggaaatcatctcactcagagtcaccccgaggtattaggtaccaccattaaaagtccagataaagtcaactgtgttgccaaaccaaatgcatacaacagtggagatatgcataattattgcattaattatggcaactgtgagttacctgttgaatcctccaaccaaggatcattaccttttcataattactcaaaagtgaataattctaataaacgtcgtaggttttcaggaacagcagtgtatgaaaaccctcaaagagaatcttcatccagcaaaacagttgtccaacaaccaattagtgaatcatttttatcactagtgaggcaggagagctcaaaaccagatagcctattagcatctattagccttttaaatgataaagatggaactttaaaagcaaaatctgaaattgaagaacagtatgttttagaaaaaggacaaaacattgatggacaaaacctgtacagtaatgaaaatcaaaatttagagtgtgcgactgaaaaatctaaatgggaagacttttctaatgtcgattcacctatgatgcctagaatcacatctgttttctctctccagagccaacaggcatcagaatttctgccacctgaagtaaaccaattgcttcaggatgtattgaaaataaaacctgatgtaaaacaagactctagtaacactccaaataaaggcttgccacttcattgtgaccagtcatttcaaaaacacgagagagaaggcaaaattgttgaatcttcgaaagatttcaaagtgcaaggcatcttcccagttccacctggcagtgtgggtattaatgtgcctacaaatgatttgaatttgaaatttggaaaagaaaaacaagtgtcatcaataccacaagatgtgagagattcagagaagatgcctagaatttcaggttttggcacattacttaagactcagtcagatgcgataataacacagcagcttgtaaaagacaaactacgagccaccacacaaaatttaggttctttttatatgcagagtccacttttaaattcagaacaaaaaaaaactataattgttcagacttcaaaaggattcttaataccattgaacattactaacaagcctgggctaccagttattcctggaaatgcacttccattggttaattcacaaggtatccctgcttctctttttgtaaacaagaaacctgggatggttttaacacttaataatgggaaacttgaaggtgtttccgctgtcaaaaccgagggtgccccagctcgtggaactgtgactaaggagccttgcaaaacacctattttgaaggtagaaccaaacaataattgtcttacacctggactttgttccagcattggcagttgtttgagcatgaaaagtagctcagaaaatactttgccattaaaaggcccttacattttgaaaccaacgagttctgtgaaagctgttcttattcctaacatgctatctgagcaacagagcactaagttgaatatctccgattcagtaaaacagcagaatgagatttttccaaaaccacctctttataccttcttgcctgatggcaaacaagctgtttttttaaagtgtgtgatgccaaataaaactgagctgcttaagcccaaattagtccaaaatagtacttatcaaaatatacagccaaagaaacctgaaggaacaccacaaagaatattgctgaaaatttttaaccctgttttaaatgtgactgctgctaataatctgtcagtaagcaactctgcatcctcattgcaaaaagacaacgtaccatctaatcagattataggaggagagcagaaagagccagaatctagagatgccttacccttcttactagatgacttaatgccagcaaatgaaattgtgataacttctactgcaacatgcccagaatcttctgaggaaccaatatgtgtcagtgactgttcagagtccagggtattaaggtgtaaaacaaattgtagaattgagaggaacttcaatagaaaaaagacttccaaaaaaattttttcaaaaacaaaaactcatggaagtaaagactctgaaactgcctttgtatctagaaacagaaactgtaaacgaaagtgtagggatagttaccaagaacctccaagaagaaaagcaacattgcatagaaagtgtaaagaaaaggcaaaacctgaagatgtccgtgaaacatttggatttagcagacctaggctttcaaaagattccatcagaactttgcggcttttcccttttagttctaaacagcttgtgaaatgtcctaggagaaaccaaccagttgtagttttgaatcatcctgacgcagatgcaccagaagtagtaagtgtaatgaaaactattgctaaatttaatggacatgtacttaaggtttcattgtcaaaaagaactataaatgctttactgaaaccagtttgttataaccctcctaaaacaacttatgatgatttttccaagaggcacaaaacatttaaacctgttagttctgtgaaagaaagatttgtgctaaaattaacactcaaaaagacaagcaaaaacaattaccagattgtgaagactacctctgaaaatattttgaaggctaaatttaactgttggttttgtggtagagtatttgacaatcaggatacttgggctggtcatgggcagagacatttaatggaagctactcgggattggaacatgttagaatagtttaccataattaccaaggaaaagaaaagtaaaattaccttagaagaaaacaacgggttcagttaccataatgcagacattttctacttcagtatagtacctgaaatcgaacattttaaaagttgattgtatttctgtggaagagtaaaagttgtatgtatgatatttgaaaatgctatccctgcactcaaaagttttgaaagaaactaatcacagcacagaagtaccttgatttaattttttaaacgtgttctcgggaagttagggctaaagaaaattttgataaaacaattttcccactttagttctttagtgactcttagtagagggtaatggctgacacccccattccctctcttcttccaccagccttatgcatctaagtgtagctcctctggagatggagagctctttcatcgtagaactgaaggagtttctcacatttgtgaagatactttgagagaacctgggtaaagaagtcactctatatctgctaaatatagttattttgaaggatattaggctccttgaaagtacatttaactcactacagttacacctcatacaatgcttgaagagtttttggcaagtaaattttttttccagttgaactctgtcacttgttagagattgggaacactctcccaaggtgattttctttttctaagtgactgtgtcaaatgttgcagtagatgggcagcttcaagagaagaatttaaactctttgtctcattgaaagtttggttaaagaacttgaacatatttctaaatttgattatattctctgatgatccctttgcacagaactatgcttatctcatgtttgtcctccataaacaaatggccatttttttcttcttggttcccatccctttaaaaagagtggaacataggagcacttccaagggagtggcttttcttgaaaattaaaattgtttaccaaaacagtattttgaagcaagatcatatttttgtctgtattcactttattatttgaacatgtccaaattaggacaaagcatttctgttagctgcttctcagtgtgactgacaacccaaaacatatatacagattgttggcatttgcaaaaggaagcatcaatagtggacccagaggcagtgcataaaaccttaggatagattcctaagggacatgcccaacagagttttaaaatggatgttttcatgatgacaacagaatcatagatttagatttttcaccttgtaagtttggatcaaattttgctggttctttggataatggagttcttgtgttaacaaattacgtgctatatgattttttgttacattgttacaagtgttaatgacattttcattaatggatgaaaacttcagggcttcttttctgtatataacaaattaagtctgtacatatttttgtaccttttatgtaaattttgcacagaaatttttggcataagtttattttctttcagtttagttcagtgcatgcactaataaaactggttgtttaatttaaaaggaatatataagactttacccatgttattttcttggtttttatttcagatgtagattttgtttttgaggtaaattcgttcttcagggattgaacactattgttagcaagtgcctaaaaaagatgtgaaacagtttacatatgtcaactgtaacagtaggtcccaaatgggcccattcccctaatagttttatttttaaagaaagccatacatagaatgcttcaagctatcttgctatgcacattatacttgtactgttttgtgcagtttgtctactttcttagtgaagtattttttgtataaaatgttacaattgtgtttcttaaattgagcctaagaatggagttaattggaaatatacagtatatattaataatgtacatggtgtttaaagaatggtaagcattgttaatttctgtaatgaacattttcaattaaatttatcttgtttgtgtttacacaataatttttttactgtgctaaaatctgatggaaattttgttctctaggaaatacagattttaaagtgtatgtgttttttcaatgctagttaactctacaagatagataaaagtgtgggattttttttcttcccaaaatcatagatgatatattgtttaagaaaggtaacatataccataattttactatggttatgctggcaaggtgagccatagagaggcttatagtcttcagtaccctaacagcaataaaattaaaatgctctgtttgttacatatagatctgttatgagacatcacctgctgtaaatagcaaggagagagaaggaactttcctgctaatattcgcagcactataacattacatttcagaatagccatatcaggaaaataatgtcgagatatgtacttcttgcctttaagttttaacagccatttaaagtaagctttgtgctccagatattctagttggaactttttctgattttgttaacttaagttattctgagggaggcagacctgcttagagtttcattattgccattgcagaaaatccaaaacaaaagcctgtatcctttattttttgtgtgtggctttccaaagagggctttccaaaatatgattttcagtagttcgaggttcttattacaattgaagagttagttttagttttgcagttgaatttctgtgtgaggaatttgttttattttttctagtttgtccatctccactgaaatgggtttcttactatttggcaagtacttaaaaaacataattcagttttcaaagaatttatcttgctaagtattcagtaacacaaattgaaatgtaatagtttttttaatggaaaatattttcattggggggttagcaaattttttcaataaagggtcagataaataagcttcgtaggccttctagtttctgtcctaactactcaattctcataatgcagaaaaaaaccatagacaatatgtaaatgaattagtgtggctatgttttaataaaacaattt

SEQ ID NO: 202770 - DNA, 7994 bp, Homo sapiens
  Payload ID: 19993
  Gene Name: zinc finger protein 518A
  Uniprot ID: Q6AHZ1
  ENST ID: ENST00000624776
  CDS Start-End: 565-5016
aatacccggatggaagtgtaatggccgccatcagggactcgcaggcaatgggtactacgacagatatcatctcttcttttgatcactgttcctgattgtgacattgtgcaagtgttaaattgtgtgccttttgttcctgaagaaagagatgtctcctactctttgtgttggataggtcctgggatctttgaaatgctaagattcttggataccacagtatcataaaattcctctaaatgcaatgaaggaactgagacacagaggttgagacttgtctaaagtaacatgaccagtaagtgcttgaattaatgcagatgaggaaactgaggtccagagaagttgaagttttcccaaggtcacacagcagagctggaactagagcttgcatttcctgacttccagattagtgttatttttacttcaaactattacttcttggtgagttattgtgggaaaaatcctgtatattgaagatgtctctacacagtatcgtttcctgtttaaattacagataacttcaagagttttcagaaaaaaagaaattgggacttttttggttaaatcatgccatctgaacagaaacagttattttgtgatgaaaaacaaactactttaaaaaaagattatgatgtgaaaaatgagatagttgataggtcggcacctaaaccaaaaatttcaggaagtattcattatgcactaaaaaatgtgaaaattgatttgccaaaaataaatattccaaatgaagtcctattgaaacatgaagttgacaaatacagaaaattatttcagagtaaacagcagactgcaagaaaatctatcagtataaagactgtaagctgtgtagaggagtgtacattgcttcataagtctgagagagctgaagaagagggtgtaaaaatgtctgcaaaaatactcaatttcagctgtttaaaatgccgagacaacactcgatatagcccaaatgatttgcagaaacactttcaaatgtggcaccatggcgaattaccttcatatccttgtgaaatgtgcaacttttcagcaaatgactttcaggtatttaaacaacacagacgaacccatagaagcactttagtaaaatgtgacatttgtaacaatgagagtgtatatactttactgaacttgacaaagcatttcacatccacacattgtgttaatggtaattttcaatgtgaaaagtgtaagttctccacccaggatgttggcacatttgttcagcacattcatagacataatgaaattcattataagtgtggtaaatgtcatcatgtatgttttaccaaaggagagcttcagaagcaccttcatattcattctggtacttttcccttcacttgtcaatattgtagctatggtgccaccaggagagaacaccttgtaagacatgttataactttgcacaaagaacatttatatgcaaaagaaaaactggaaaaagacaaatatgaaaaaagaatggcaaagacttctgcaggacttaagctaatactgaaaagatataaaataggtgcatcaaggaagacgttctggaaacgtaagaaaattaacagtggaagtgacagaagtatagaaaagaacactcaagtgcttaagaaaatgaacaaaacacagactaaatctgaagaccagagccatgttgttcaagagcatttaagtgaagaaaaggatgaaagactacactgtgagaataatgataaagcccctgaatcagagtcagagaagccaactcctctgtccactgggcaaggtaatagagctgaagagggaccaaacgctagttcaggtttcatgaagactgctgtactaggacctacactgaaaaatgtaatgatgaaaaataataaactagcagtttcccctaactataatgctacgtttatgggcttcaagatgatggatggaaaacagcatattgtattaaaattggtgcctatcaaacaaaatgtatgttcaccaggctcacagtcaggtgctgcaaaggacggtactgctaatttgcagccccagactttggacactaatggatttttaacaggagtaacaactgagttaaatgacacagtttatatgaaagcagctactccattttcatgttcatcttctatactttcagggaaagcaagttcagaaaaagaaatgactttgatatctcaaaggaataatatgcttcaaacaatggattatgagaaaagtgtatcttctttgtcagcaacatcagaattggttacagcatcagtgaatttgaccacaaaatttgaaacaagagataatgttgacttctggggaaatcatctcactcagagtcaccccgaggtattaggtaccaccattaaaagtccagataaagtcaactgtgttgccaaaccaaatgcatacaacagtggagatatgcataattattgcattaattatggcaactgtgagttacctgttgaatcctccaaccaaggatcattaccttttcataattactcaaaagtgaataattctaataaacgtcgtaggttttcaggaacagcagtgtatgaaaaccctcaaagagaatcttcatccagcaaaacagttgtccaacaaccaattagtgaatcatttttatcactagtgaggcaggagagctcaaaaccagatagcctattagcatctattagccttttaaatgataaagatggaactttaaaagcaaaatctgaaattgaagaacagtatgttttagaaaaaggacaaaacattgatggacaaaacctgtacagtaatgaaaatcaaaatttagagtgtgcgactgaaaaatctaaatgggaagacttttctaatgtcgattcacctatgatgcctagaatcacatctgttttctctctccagagccaacaggcatcagaatttctgccacctgaagtaaaccaattgcttcaggatgtattgaaaataaaacctgatgtaaaacaagactctagtaacactccaaataaaggcttgccacttcattgtgaccagtcatttcaaaaacacgagagagaaggcaaaattgttgaatcttcgaaagatttcaaagtgcaaggcatcttcccagttccacctggcagtgtgggtattaatgtgcctacaaatgatttgaatttgaaatttggaaaagaaaaacaagtgtcatcaataccacaagatgtgagagattcagagaagatgcctagaatttcaggttttggcacattacttaagactcagtcagatgcgataataacacagcagcttgtaaaagacaaactacgagccaccacacaaaatttaggttctttttatatgcagagtccacttttaaattcagaacaaaaaaaaactataattgttcagacttcaaaaggattcttaataccattgaacattactaacaagcctgggctaccagttattcctggaaatgcacttccattggttaattcacaaggtatccctgcttctctttttgtaaacaagaaacctgggatggttttaacacttaataatgggaaacttgaaggtgtttccgctgtcaaaaccgagggtgccccagctcgtggaactgtgactaaggagccttgcaaaacacctattttgaaggtagaaccaaacaataattgtcttacacctggactttgttccagcattggcagttgtttgagcatgaaaagtagctcagaaaatactttgccattaaaaggcccttacattttgaaaccaacgagttctgtgaaagctgttcttattcctaacatgctatctgagcaacagagcactaagttgaatatctccgattcagtaaaacagcagaatgagatttttccaaaaccacctctttataccttcttgcctgatggcaaacaagctgtttttttaaagtgtgtgatgccaaataaaactgagctgcttaagcccaaattagtccaaaatagtacttatcaaaatatacagccaaagaaacctgaaggaacaccacaaagaatattgctgaaaatttttaaccctgttttaaatgtgactgctgctaataatctgtcagtaagcaactctgcatcctcattgcaaaaagacaacgtaccatctaatcagattataggaggagagcagaaagagccagaatctagagatgccttacccttcttactagatgacttaatgccagcaaatgaaattgtgataacttctactgcaacatgcccagaatcttctgaggaaccaatatgtgtcagtgactgttcagagtccagggtattaaggtgtaaaacaaattgtagaattgagaggaacttcaatagaaaaaagacttccaaaaaaattttttcaaaaacaaaaactcatggaagtaaagactctgaaactgcctttgtatctagaaacagaaactgtaaacgaaagtgtagggatagttaccaagaacctccaagaagaaaagcaacattgcatagaaagtgtaaagaaaaggcaaaacctgaagatgtccgtgaaacatttggatttagcagacctaggctttcaaaagattccatcagaactttgcggcttttcccttttagttctaaacagcttgtgaaatgtcctaggagaaaccaaccagttgtagttttgaatcatcctgacgcagatgcaccagaagtagtaagtgtaatgaaaactattgctaaatttaatggacatgtacttaaggtttcattgtcaaaaagaactataaatgctttactgaaaccagtttgttataaccctcctaaaacaacttatgatgatttttccaagaggcacaaaacatttaaacctgttagttctgtgaaagaaagatttgtgctaaaattaacactcaaaaagacaagcaaaaacaattaccagattgtgaagactacctctgaaaatattttgaaggctaaatttaactgttggttttgtggtagagtatttgacaatcaggatacttgggctggtcatgggcagagacatttaatggaagctactcgggattggaacatgttagaatagtttaccataattaccaaggaaaagaaaagtaaaattaccttagaagaaaacaacgggttcagttaccataatgcagacattttctacttcagtatagtacctgaaatcgaacattttaaaagttgattgtatttctgtggaagagtaaaagttgtatgtatgatatttgaaaatgctatccctgcactcaaaagttttgaaagaaactaatcacagcacagaagtaccttgatttaattttttaaacgtgttctcgggaagttagggctaaagaaaattttgataaaacaattttcccactttagttctttagtgactcttagtagagggtaatggctgacacccccattccctctcttcttccaccagccttatgcatctaagtgtagctcctctggagatggagagctctttcatcgtagaactgaaggagtttctcacatttgtgaagatactttgagagaacctgggtaaagaagtcactctatatctgctaaatatagttattttgaaggatattaggctccttgaaagtacatttaactcactacagttacacctcatacaatgcttgaagagtttttggcaagtaaattttttttccagttgaactctgtcacttgttagagattgggaacactctcccaaggtgattttctttttctaagtgactgtgtcaaatgttgcagtagatgggcagcttcaagagaagaatttaaactctttgtctcattgaaagtttggttaaagaacttgaacatatttctaaatttgattatattctctgatgatccctttgcacagaactatgcttatctcatgtttgtcctccataaacaaatggccatttttttcttcttggttcccatccctttaaaaagagtggaacataggagcacttccaagggagtggcttttcttgaaaattaaaattgtttaccaaaacagtattttgaagcaagatcatatttttgtctgtattcactttattatttgaacatgtccaaattaggacaaagcatttctgttagctgcttctcagtgtgactgacaacccaaaacatatatacagattgttggcatttgcaaaaggaagcatcaatagtggacccagaggcagtgcataaaaccttaggatagattcctaagggacatgcccaacagagttttaaaatggatgttttcatgatgacaacagaatcatagatttagatttttcaccttgtaagtttggatcaaattttgctggttctttggataatggagttcttgtgttaacaaattacgtgctatatgattttttgttacattgttacaagtgttaatgacattttcattaatggatgaaaacttcagggcttcttttctgtatataacaaattaagtctgtacatatttttgtaccttttatgtaaattttgcacagaaatttttggcataagtttattttctttcagtttagttcagtgcatgcactaataaaactggttgtttaatttaaaaggaatatataagactttacccatgttattttcttggtttttatttcagatgtagattttgtttttgaggtaaattcgttcttcagggattgaacactattgttagcaagtgcctaaaaaagatgtgaaacagtttacatatgtcaactgtaacagtaggtcccaaatgggcccattcccctaatagttttatttttaaagaaagccatacatagaatgcttcaagctatcttgctatgcacattatacttgtactgttttgtgcagtttgtctactttcttagtgaagtattttttgtataaaatgttacaattgtgtttcttaaattgagcctaagaatggagttaattggaaatatacagtatatattaataatgtacatggtgtttaaagaatggtaagcattgttaatttctgtaatgaacattttcaattaaatttatcttgtttgtgtttacacaataatttttttactgtgctaaaatctgatggaaattttgttctctaggaaatacagattttaaagtgtatgtgttttttcaatgctagttaactctacaagatagataaaagtgtgggattttttttcttcccaaaatcatagatgatatattgtttaagaaaggtaacatataccataattttactatggttatgctggcaaggtgagccatagagaggcttatagtcttcagtaccctaacagcaataaaattaaaatgctctgtttgttacatatagatctgttatgagacatcacctgctgtaaatagcaaggagagagaaggaactttcctgctaatattcgcagcactataacattacatttcagaatagccatatcaggaaaataatgtcgagatatgtacttcttgcctttaagttttaacagccatttaaagtaagctttgtgctccagatattctagttggaactttttctgattttgttaacttaagttattctgagggaggcagacctgcttagagtttcattattgccattgcagaaaatccaaaacaaaagcctgtatcctttattttttgtgtgtggctttccaaagagggctttccaaaatatgattttcagtagttcgaggttcttattacaattgaagagttagttttagttttgcagttgaatttctgtgtgaggaatttgttttattttttctagtttgtccatctccactgaaatgggtttcttactatttggcaagtacttaaaaaacataattcagttttcaaagaatttatcttgctaagtattcagtaacacaaattgaaatgtaatagtttttttaatggaaaatattttcattggggggttagcaaattttttcaataaagggtcagataaataagcttcgtaggccttctagtttctgtcctaactactcaattctcataatgcagaaaaaaaccatagacaatatgtaaatgaattagtgtggctatgttttaataaaacaattt

SEQ ID NO: 202771 - DNA, 6894 bp, Homo sapiens
  Payload ID: 19994
  Gene Name: zinc finger protein 518B
  Uniprot ID: Q9C0D4
  ENST ID: ENST00000326756
  CDS Start-End: 440-3664
gacgccccttcgccgggacctggcacccgaatccggcctgccgggcctctttgtgcagcgccttgctgacgcccagggttctgatgtagaagcctacaccagggcctgaggttgtgaaactcatggcagtccacgcctgagaagagaaggcctgaaagagaaggaagagcccatgggacttgccacggttttgacttacatctgcaactccaaggctacaggcaggaatgttacctggaatgtcagagagctgaaagcagtcatattttgggatcatgcacctactgcggcagtatataaagaaagataattaagtatgcacccaagaagtagctgcgcccctacccatcacaaactgtatagaaggatatctcctaaggattttatcatgtgaaaactttctgaattttagttggctctttttagaaatgcagataagatgaaggatattggacagcagctatacactacacacttgaacggcggacataattccttgaccatgtcacccaaacagcctgatgctaatggagcacctcggccaaatagacaagaagcacaaacccttttgtatcaaggctcagaggcagaggctgccatgatgaccattgctacatgtgcaaagtgcaaaagtgttcacaagatctctcttcaagatttgcagaagggtacagggaaggacggtatgtatgtctgcttccagtgcagcctcggtgcagctcctcccaattttcattttgtgagcaataattccagtgcgactcatgttggaaataaaactgaaaacttctcaagttctgtcaatagcaaatttaaggtaaggaactttaagccaggcaaatactattgtgataaatgtcgattctctacaaaggacccgctgcagtacaaaaagcacacccttcaacacgaggagattaaattcatttgttctcactgcagctacatttcgtatacgaaaggagagtttcagaggcatttggtgaaacacacaggcatatttccttatcagtgtgagtattgtgactatggtgctattagaaatgattatattgtcaaacacacgaagagagtacatgaaagggcaggtgcgaaacggccagtcaaagctgttgccaagctggagccaaaaagaaccggaacttcaaaacaaaacccagagcttctaaaagcttccaatccacggactacatttcaaaataagtggtcagaccaactgtcaggtttctctctccatgcaaataaagacaaaatgcacaatatcatgttgttacctgaaccaaaggaataccaaaaagatgtagtttgtattccaaataaaatgaccctgtctgagccaaatgaagtcaacctatttgagaacaaaaatgttgaagtagaagtgttatcccctgcaaaagaacctgttcagccaggtatgccattgacagttgttgcaccagcagaactagttgtccctgcaaactgtttagcccagttgatagatgtgaaggttgtcaatggtacacagcagcttgttctgaaactgtttccgctggaagaaaataattgccttgaagctgggagggataatggaggtaattctgaacgtatggtgaaagagaagggttcaaatgaacaagaaaaagtactttctgcagaaaaaacaaagtcactgacagttgacgggaatgttggaaaactcgtaggcattgatagttttcaaccttcagttcagaaacagcttaaaaatgtgaaatgggtaaggtcttatgattttattatgccaaattctagtgtgcacaacaatggaaaatccttcattaattcggaaacaattgaggattttcagaaaaaaaataatttgtatccacatagaactgcttttccttccgttgccttaaaaggtcattctctagcatctgtatttaaaaacagtgttttacgtagtcttggagctgcatcaaacccttttccatataaagctgctgtttgttttgctgaaagtggaagaaatttacacagtagctcacagcagttactcccatttgctgcatcacctgcaacctgttccttctctggagaaaagggcttattgcctgtaagtgaaaatgacttggaatctacaagtaaagtcaatattcctgtaaaagtggtttcctctaataggaagcaggaagataaccagacagaggaacacaaggcagtttcaactgtaggccagatttcctctcaacataagagtgagtatttacatataaacataactggagaagatagatctcaacagcctggggataagcctttggaattaaagaattctgaaaggactaacaacactaatgatggcccagtcatctcatcagtattttctctgagctctggatctgaaaatgtccccgagggcattaagtggaatagctcaacgtctaaaataaagtcaattgaactgttgcgcagaaagatagctcagttaattgagtcctgtgggaagccgtcatctttggcttcaaatagtgcacatcgtcgctctgtagggcaggcatcaaagggaacttcaaaagctacctctgaaggtattcaagaaatcaacgtgtcactcactggtcttggccattccacaggtactcttcagaaacctccgaatgatggtggtattactggtaatagacagcttactcatcaacaaatatatccacactttgcagatggcagtaataggaaaaccaaaagcagagtggccaggaaggctcatgttgccacgccagtgttaatccccaaaggggctgtgttgagggttcttaattcctctgagaatgcccacatcatagaggctacatgtgaagcacctgtcagcataccttgcagtgaaagacagttaataaaaccagttccattttgccctgtgagacaggcggactcagacttacagcctttaagaagtgaaagggggccaatagatatgtccccaaatatcgagacacctctgcggcctaaactgagaaaagagagtgctgtctgtagcaccatccatagaaaaactggcctcttgtatggacagcaaggaagcagtgaattaaataagcaagggagactgctttccagaagtctttctataagtagaaataaaaccaaacaagtacacttatccaggaagaaaaacaaaattcaagctgaacctagccgctgtctcaaggatccttcaatttttcaggttgcaaggcaactaagactgatagcagctaagccagatcagttgattaagtgtccccgtcggaaccagccagtcattgtgttaaaccaccctgatgtggactcgccagaagtgaccaatgtgatgaaggtaataaataaatacaaaggcaatgtcctcaaagttgttttatcagagaggactaggtgtcagctaggcatcagacggcatcatgtacgcctgacctaccagaatgcggaagaagccagtcaaattaaaaggcaaatgatgttgaaaatgaaactcaaaaaagttcataaaaacaactaccaggtagtggattccttgcctgatgattcttcacagtgtgtatttaagtgctggttttgtgggcgactgtatgaagaccaggaagagtggatgagtcatggccaacggcatttgatagaagcaactagagattgggatgttctttcctccaagggcaaataagtaaacagttactctttaaagcaagttatcttttagtttattctggtttggagtccctccaccaagattcagtagaagaaatacagactgtagaaatgagaggactgctaattcttcagaactgtaggaatattgggagctaggagtctgaacctgaagtatgtgattggaccccagaatgtatttgaaggctctgaaattgtacatgcaaattggtacatatgcatttttctggagagagcctgtgaaactgaacagattttcagtgggatctgagacttttctttgtttagcaccccgttttctgagtacatactgatctttcataatccattcagaggggcagattgagaatgttttacacatgctcttcatataaatgctacagaaaaacctttgttttggtgtgcacatccattttgtttttgctttaatttgtgttctgagtatttggtgcacaatggaaattatattttctactttactgtcttcaatttggttatagagaaatggccattcttttactccctccctggttttgtaatactcccgagtgttccgtatagcacaaagagttttgcttttactggccattttaaagaatgttttcaactgcttgcctgaatttactcctttcacagcaagtgttagaagaaagataacattttcaaatacttagcttttgctttctttaaaatacattggtttatgacatatgggaagggaacgtacctttttgcaaagacaaaaagagattacaaaaggaaaatatctaaaactattttctctttgcccttaccactcccagaaacataagtgaccaatttaaaatgctagggaacaggcttacaacataggtaaaactcgcaaacacagttcaaggtaggctcataaagttgtgaaaagggtttcatatgccctttagttttcatttgggattcatccaaagaccatgggtggatgctgtcttctctcttcttgatccctttgattcatggacactagactccctttgccatttcttctgaaccggccctcctgtggactagcacaacttccttgcccactgtttcttcctttctgtgcctttgagaccccttaaggttttccctcatgcgattactagaaaatggcaggaatcaacaaaatggagacctcccactgtttttgctaaagttacaggaacacgatccctagttttcattgatagtaacgctgtttctaatttgtcttaaccacattcatgcttaccctgctgctcagctttctcagggaagcaactccaggaacactccttccactcccctctctaccaacagatgtcaggactgtcatttatctacacatttgtgttctttagaaaaaggcccaccccctgcacaagcacagcctcttgggcagataggtggctgggtcagtgcttaagacaggattctagtcttcacttgcctgtgcagctgggcgctgaccttccaggtagagcacagatggcacaaccccgaggcagccccaacttgcatttccctccctccaggggctattcctgtcttaggcgatttgtggggtgcagtgaatgaaactaaagagttgttgcacctgaaaaagacaccagtgattgtttattgggtagtcgattggagactttgatttttttttttttttttcacatgggaaagtcttagattccagtagatggaattgcaatcctttgcagtttgttctcattacagataatcaacatttcttttgtataattcaatacatgatcatcaagttaattggtaaatttttattgaaatttaaaacttgcatttttatatatgtgtatgtgtacacataaaaatattttttaccatatgaaaattgcagtagctaattttctgatttcctattttataatgatacatgggctggaaaaatgtagaacgtttttatattctagaaatttattttggaagtacatttttataagggtctaatctcacttttggaaaatgaaagcacaggaatgatggggtctggtttatgtgaacaagtgagtagaaacccctttggatcattttattactgcatttttatttggtgctttttaggaagtagatctttggtaccacttcactacgtagagcattcgaagttttatccatgttatatattgtactcctgtggcatgaaaaatagctcccaagatatagagaggagaggagtgaagaaaaggctgtggtttttttttgttttgttttgtttgccacttttttatctcctattcctcaccacatagtgctttttcctgaaaagctggactgagaattggccttgaatcaggtcagagtgttaactgtcaacatgaagtattttcacttcgcagcatcaactttcaagcataagtaaaaacacaacttgcatactttgatggagcttaattgtgtgagtagaatatgtagcaaagctttttaggattttcagaactagaatactttttaaggaattaaaagtgtttctggaagtcaaaaatgggaaagcaaaaagtagctgtcctccctaaagagctttagaagatagcttaacctgtaggtacatgttatgaaataaacacatttctaacaatacaagggagtaggggcagacctgtgttgagtatttgtgtgggttcttaattttgaaggacctccaatcactacattttgttaatactgccaataaaatcattttcaacttattttttaaagtaggttttcttactttggtggaccagaagtgagagattgttatatttaggatataggcaaatacagtaaaagttaaaaaaaaaaaacctgacccaaagtatactctgatagactatattatattcaattttgtatccccagtcgagaacatcttgtaagccttcattaagggccacctgctgtctgttgaactagactgaacaaaatatattttctcacaagctccatccctttttctttaggacatgttatatataatccatctcagaagttgaagatgtgatgttgctcggcctttggaataatttttaaatctgtaaatgtctatatgagcagaaacaaaacattgtgtaacatgttttaagcattattgtaattcctgtgttaacagtttgtgtgtctgctgctctggttttgaaacatgtttgtatatagatacaggagttggcataaattttgttaaataaagcaacaaaaattttctttgccctttgatttcaa

SEQ ID NO: 202772 - DNA, 527 bp, Homo sapiens
  Payload ID: 19994
  Gene Name: zinc finger protein 518B
  ENST ID: ENST00000507515
  CDS Start-End: 301-527
gacctacagcgggcgcggcgccggcggtctgcggccggcggtgtagacgccccttcgccgggacctggcacccgaatccggcctgccggtgttacctggaatgtcagagagctgaaagcagtcatattttgggatcatgcacctactgcggcagtatataaagaaagataattaagtatgcacccaagaagtagctgcgcccctacccatcacaaactgtatagaaggatatctcctaaggattttatcatgtgaaaactttctgaattttagttggctctttttagaaatgcagataagatgaaggatattggacagcagctatacactacacacttgaacggcggacataattccttgaccatgtcacccaaacagcctgatgctaatggagcacctcggccaaatagacaagaagcacaaacccttttgtatcaaggctcagaggcagaggctgccatgatgaccattgctacatgtgcaaagtgcaaaagtgttcacaagatctctcttcaagatttgcagaa

SEQ ID NO: 202773 - DNA, 2830 bp, Homo sapiens
  Payload ID: 19995
  Gene Name: zinc finger protein 519
  Uniprot ID: Q8TB69
  ENST ID: ENST00000590202
  CDS Start-End: 154-1776
cacttcagccagagcgcggggttagggcttcattgccttgtgtcctctgctccgggagacttcggtgattctgccactcactccgtcgctctgtgacctgctggcattgaatgatttatagctaagactccaggacacccctgaagccgagaaatggaactcttaacattcagggatgtggccatagaattctctccagaagagtggaaatgcctagaccctgcccaacagaatttatatagagatgtgatgttggagaactacagaaacctcgtctccctggctgtgtattcttattacaaccaaggcattttaccagagcaaggcatacaagattcattcaaaaaagcaacactgggaagatatgggagctgtggccttgaaaatatatgcttatggaaaaactgggaaagtataggtgaaggtgaaggacaaaaggaatgttataatctatgtagccaatatttgacaactagtcataacaaacatttaactgtgaaaggagacaaagaatatagaatatttcagaagaagcctcagtttctgtcagctgctcctacagaaccatgtattcctatgaataaatatcaacataaatttttgaaatctgtcttttgtaataaaaatcagataaattttaaccatgactcaaatattagtaaacatcatagtactcattttctagaaaactattacaattgtaatgaatgtgaaaaagtattttaccaatcctcaaagcttattttccctgaaaatatccatattcaaaaaaagccttacaactctaatgaatgtggtgaaacttctgacccattctcaaagcttactcaacatcaaagaatttatattggagagagctcacaaagatgtaataaaaaatgtataatagtctttagtcaatcacatctaaagggacataagataattaacactggagaaaaatcagtgaaatataaagaacgtggcaaagcttttaccaggggcttacatcttggacatcagaaaattcatactggagagaaaccttacaaatgtaaaaaatgtgacaaagcctttaacaagagttcacaccttgctcaacatcagagaatccatactggagagaagcctttcaagtgtaaggaatgtggcaaagcttttaacagaggctcataccttactcaacatcagagaatccatactggagagagagctttcaaatgtgaagaatgtggcaaagcctttaacagggggtcataccttactcaacaccagagaatccataccggagagaaacctttcagatgtaaggaatgtggcaaagcctttaatagaagctcatacgttactcagcatcagagaatgcatactggagagaaacctttcaagtgtaaggaatgtggcaaagcttttaacagagcttcacaccttactcaacatcagagaatccatactggagagaaacacttcaaatgtaaagaatgtggcaaagcctttaacaggggctcacaccttactcgacatcaaagaatccatactggagagaagtctttcaaatgtgaagaatgtggcaaagcttttatctggggctcacaccttactcaacatcagagagtccatactggagagaaattcttcaaatgtaaagaatgtggcaaagcttttaccaggagctcacaccttactcaacatcagagaattcatactggagagaaacctttcaaatgtaaagaatgtggcaaagcttttaacagacgctcaacccttactcaacatcaaataattcataccaggtagaaaccctgcaagtgtaaagaatgtgctaaaaccctaaactggtgctcacaccttactcaacattagaaaatcaatactggatagaaatcccatatgtgtaatgatttttgaaacatcaaaatgaagattaaataaaaattagaagtgtcactttagaaagaactaaggtgctagcacttccgtaaattactctgaatcagtgtgtttattataacaaataattcaaactcaattagataattaaattgtatgtttaaaaagagggacgacattgatggagaggcataattatattcaatgttcacttatttttgtaatcacagtattcatgattgagaaagtattattgatgtaattaaattcaaattaaccttttttttccccactgtggttgattattgctgtctctgacatgagagtcccttctacgttaggtaggcatcattcacatgtctcattcacatgtcatcattcacatgtctcatgacgtcattcacaagtttcccatggaagactaagagcattggcatataggatgtatgatgaaatctaaatggagttgctctttttgtttgacttacaacactgaatataagtcatatatgagttaggtgttcagaatattattgttctgcattaaagtgtgagacagaaacactctgagttttagatatgaatagttttaccaactacccattaaaaggtcttgctagtccattaatattctaatgtatcttcatagcagcaagttagaagtcctgaatgttactgtgataacaataaagaaatcacaaatatcagagagtggtgcaaataacttctctctggtagaacatagattattaattcaatcctctaaatacttaggctcagtttaagaaaagagagaacacatttttttaacataggtcatggtatcagaataagaatgctttttgaatgtttgcagtctgtaattttgatgattgaggaaactggattttgaaatgctttattcagtctgtaaacttaatttttttttaagaataaaatgaaatgtcttttaatttgttaa

SEQ ID NO: 202774 - DNA, 2117 bp, Homo sapiens
  Payload ID: 19995
  Gene Name: zinc finger protein 519
  ENST ID: ENST00000589498
  CDS Start-End: 152-394
cttcagccagagcgcggggttagggcttcattgccttgtgtcctctgctccgggagacttcggtgattctgccactcactccgtcgctctgtgacctgctggcattgaatgatttatagctaagactccaggacacccctgaagccgagaaatggaactcttaacattcagggatgtggccatagaattctctccagaagagtggaaatgcctagaccctgcccaacagaatttatatagagatgtgatgttggagaactacagaaacctcgtctccctggagctccacacagaacatcatcaaagaactgatggacacttcatctccctgggtgaggggcaggtgtaccatgctgtcatggccattcctgcctcgattggggtgtgggtgtagagatggtctctataaccagggcccagacatggctgagaaggccttctgccaggactccaccttgatgactcacaggactttgtgccttggctttccctattgagtgacccacagttttaatccaagggaccctgagtctgtttccttccttcagccccaccatttcaccccagcactgttcaggtgtacaatcggctttcacatatttgtaagaatatctaggaaaattatttatattttactttcacttcatgttatgaccatgagtgtttttgcatttgctagggctcattgttttaattggcccccctttatccctctgagtgcggaaataaatcagccctaaatctggatgagacctgcaggtggactccatcagtgcaggcgtggtggggcagcaggaggagcccgtggtgcccaccttccagagctgccacctcttttacctcctcatgttccttcctgtgcacctagagagagttcacccccacccaacagctcctggacctgctgcccaaaaggtaagtgctccatccctccacagcacaagggggactcagccacctattatctgtgtcttgggaaagtcccttcacatttgtgggcttcagtttgcttctttggaactggggttctaagaagcctaacatgatatgattgtttcaagaactaaatgagataagctatggaaagtacttcagacttggccttgtagaaagcactgctgagggaatagattggttattcatattataaaactatttaaaactctagaaaactatagtaagatataagattataaaaatatcaaaactaagatattgacagtaatagaattaacctactcatctatttgcattttaccagattaattttttcttatgtgtgtgtgttctgtgcaattttattacatgtgtaggttcacctaccagaagattaactcgttttcctcttataaccacatccgcttcccttctccccaccatacccactctgattctgattctttgaaaccattaatttctatttctgcaaatttgtcattccaataatgttatataaatgaaatcataacctgtgcaaccttttgtaattggcccttttccttcagcataattccttggagattcatctaaattggtttatgttttagtttgttccttttgttattgctgtgggttttcatgtgtggatgttaccatgaaatactgtgtgtaacccttcactctttcaagaacatatttgttgttttcagtcagtgtgtggctattatgaataaaagtgctatgtacattcatgtactaggtttcatatgaatacatgttttcattactctggaaaatatttccagcatacaattcctggctcatagggtagttacaagtttaattttaatagaaactagcactctgttatccagagtgactatcattttacattcccatcatcaatgaatttctgttttttcaaatcctcttagccatactgactgatatgtattgatatcacattgttttaatgtacatttttctaaaggataataatgttgaactttatttaatgttctcatatgacatctgcctattatctctgatgaaatgtttattcatgtctgcatgttttctaattgtatttgttttcttgcaagttttgagagttctgtttatattctggttactagctcacataggcaataaataagttttttttccacaaagaaaaa

SEQ ID NO: 202775 - DNA, 2114 bp, Homo sapiens
  Payload ID: 19995
  Gene Name: zinc finger protein 519
  ENST ID: ENST00000587419
  CDS Start-End: 153-305
acttcagccagagcgcggggttagggcttcattgccttgtgtcctctgctccgggagacttcggtgattctgccactcactccgtcgctctgtgacctgctggcattgaatgatttatagctaagactccaggacacccctgaagccgagaaatggaactcttaacattcagggatgtggccatagaattctctccagaagagtggaaatgcctagaccctgcccaacagaatttatatagagatgtgatgttggagaactacagaaacctcgtctccctggtggaaaagcgagattgtctttgaccatttgctatggacattgtcagggatggtgcagcctgaatgagaatgtctgcggtatttcccgaaataagtatccctcaaggatgatactgtggacctcactcaggaagaatgtgtccttcagggaaagctgcacagagacgtgatgctggagaagcagtcatctggttactttagtacatgacttcaggctcctatgtgcagaagtcctcaacccccaggctgcagaccagtacctgtccatggcctgttaggaaactggccgcacagcaggaggtgaaatgattattgcagtttcgaggggagatgatgtcacaagatctcgaacccatatctcagaaccgcctgcctcctcccacacactctggctgtcctgaccatcacttcaagcccaccagccctgcagcaaaaaaaatcaaacgagtagttcagaaggcaaagtctgcaagggaaggaagtatattgggaggtacagtaagtattcctgtctggagaaggtcttctttggggctagaaactgagccagtgctaaagccatgcaggaaggaggaaataatcagtgagccacgggctgaacttgtggaaaagaaatggagggcaaggtcacaaaccagtccctaactgcttctaatttaatgtaatcctcactgtttgtcattattgcttttgatggccatgaaatctgttttttcccagttctctagtgtaatttggaattaatttcccagctgctttattttttttctagaagagtcggggacattttcaggattagtagaggtgtttctacaacaccttcatgccttcgatagtgtgtaagagttcaccaattgaattaccttattctgttcagaagtagtaactatggagtttaaccactctggacatattatatacttaatggagaccatagctgtgtggtgactgaaaacatgcattgtctactccttatggtgagactgctttccttcatgaagtcagtaaagaagggtaacttttctgtagatttttgtatttttaaaaaaggtcaagatcttcggcagttttctgaattgaattgtttgtgatatttgctctgtttttaaaatcttctaaggccattaccaggttcagtgcttatcttagtacaatttaaattgattccgtgaataatttttcctgcctccagtttcccttttacatagtgggctcatgttttaatatgttaaacaattctgacattgaaataattttattttatatttttgcatccacaaatactaattttctccatatattaatggtgatgtagtttctcctctgcaatattttattgcctactcatgttttatgtcccctggattacagcactgtcattccactgtgccctatttcttggttatgatgaaaagactcttaattccagtatgaaatcatttctgcattccataaatttcatttggcatctgtggaattaaggcatcttcattgtatttggatctctgaatcataagtgatatttgcctataaattaagcaatgatatttaaataagagattaccacaatcatattttataaatatacaaccatttttaaaaacctgacaaaatctacaaaaaaaagaaaatgaaatatatgtggagttttagaaaagactgactaggtccaaggttgaggcacatagtggttaagcacattgtcagctccggactctgcctcttacaaggaaggagggggctttagatgttatttagctgttatttagcctttctacacctaagttcccctcacctgtaaaaaaaaaaataataataaattgcttactttgt

SEQ ID NO: 202776 - DNA, 4871 bp, Homo sapiens
  Payload ID: 19996
  Gene Name: zinc finger protein 521
  Uniprot ID: Q96K83
  ENST ID: ENST00000361524
  CDS Start-End: 150-4085
aatgatttcctcagtgattacgtacagagcgagtccctgcgggttaggggccccctctggagccatcctgatggctttgggggccttgcttccattttccattattatgtggactaccggagcgacagcgcagtccaagaccttgcaggatgtctcgccgcaagcaagcgaaaccgagatccctcaaagaccccaactgtaaacttgaagacaagactgaagatggagaggcactagattgtaagaagaggccggaagacggggaggagttggaagacgaagctgtgcacagctgtgacagctgcctccaggtgtttgaatcgctgagcgatatcacagaacacaagattaatcaatgtcaactgacagatggagtggatgttgaagatgatccgacttgctcttggccagcttcctcaccttctagcaaggatcagacttcccctagccatggagaaggttgcgattttggagaggaagaaggtggccctgggcttccatacccgtgtcaattctgtgacaagtcgtttagccgcctcagctacctaaagcaccatgagcagagtcacagtgacaaactgcctttcaaatgcacctactgcagtaggctgttcaaacacaagcgcagccgagatcgccacataaaactccacaccggggacaagaagtaccactgcagtgaatgtgatgctgcgttttccagaagtgatcacttgaagatccacttaaagactcacacgtccaacaagccatataaatgtgccatttgtcgccgtgggtttctgtcctctagttccttacacggacacatgcaggttcatgagaggaacaaggacggctctcagtccggttccaggatggaggactggaagatgaaggacactcagaagtgcagtcagtgtgaggaaggctttgacttcccggaagacctccaaaaacacattgcagagtgccaccccgaatgctccccaaatgaggaccgagcggccctccagtgtgtctactgccacgagctcttcgtagaggagacctccctcatgaaccacatggagcaggtgcatagcggggagaagaagaactcatgcagcatttgttctgagagtttccacacagttgaggaactgtacagccacatggacagtcaccagcaaccggagtcatgcaatcacagcaacagcccttccctggtcacggtgggctatacctccgtgtccagtacgactccagattccaacctctcagtggacagctcaaccatggtggaagctgccccgccaatcccaaagagtcgagggaggaagagggccgctcaacaaacccctgacatgactggtccctcgagtaaacaagcaaaagttacctacagctgtatttactgcaacaaacaattattttcaagtcttgcagttctgcagattcacctgaaaactatgcacttagataagccagaacaggcccatatttgtcagtattgcttggaggtcctgccctcactctataacctaaatgaacatcttaagcaagtgcatgaagctcaggacccaggtctgattgtttctgccatgcctgccattgtctaccagtgtaacttctgttccgaagttgtcaacgacctcaacactcttcaggaacacatccgatgttctcatggatttgcaaaccctgcagctaaagatagtaatgcattcttttgtccccattgctatatggggtttctcactgactcttccctggaagagcatattagacaggttcattgtgacctcagtggctcccgatttgggtctccagtgcttgggactcccaaagaaccagtagtagaagtctattcttgttcctattgtacaaattcgccaatattcaacagcgttcttaaactgaacaagcatatcaaagagaatcataaaaacattcccttggccctgaattatatccacaatgggaagaaatccagggccttaagccccctatctcctgtggccatagagcagacatctcttaagatgatgcaggcagtaggaggtgcacctgcacgtcccactggagaatatatctgtaatcaatgtggtgctaagtacacatccctagacagctttcagactcacctaaaaactcatctcgacactgtgcttccaaaattgacctgtcctcagtgcaacaaggaattccccaaccaagaatccttgctgaagcatgttaccattcactttatgatcacttcaacgtattacatctgtgagagttgtgacaagcaattcacatcagtggatgaccttcagaaacacctgctggacatgcacacctttgtcttctttcgctgcaccctctgccaggaagtttttgactcaaaagtctccattcagctccacttggctgtgaagcacagtaacgaaaagaaagtctataggtgcacatcttgcaactgggacttccgcaacgaaactgacttgcagctccatgtgaaacacaaccacctggaaaaccaagggaaagtgcataagtgcattttctgcggtgagtcctttggcaccgaggtggagctgcaatgccacatcaccactcacagtaagaagtacaactgcaagttctgtagcaaagccttccatgcgatcattttgttagaaaaacacttgcgagaaaaacactgtgtattcgaaaccaagacacccaactgtggaacaaatggagcttccgagcaagtgcagaaagaggaagtggagctgcagactttgctgaccaacagccaggagtcccacaacagtcacgatgggagcgaagaagacgttgacacctctgagcctatgtacggctgcgacatttgtggggcagcctacactatggaaactttgctgcagaatcaccagctccgagaccacaacatcagacctggagaaagtgccatcgtgaaaaagaaagctgagctcattaaagggaattacaagtgcaacgtgtgctctcgaaccttcttctccgaaaatggcctccgggaacatatgcagacccacctaggccctgtcaaacactacatgtgccctatttgcggagagcggtttccctcccttttaactcttactgaacacaaagtcacgcatagtaagagtcttgatactggaaactgccggatttgcaagatgcctctccagagtgaagaggagtttttagagcattgccaaatgcaccctgacttgaggaattccctgacaggctttcgctgcgtggtgtgcatgcagacagtgacctccaccttggaactcaaaatccatgggacgttccacatgcaaaagacagggaatgggtctgcagttcagaccacagggcggggccagcacgtccaaaaactgtataagtgcgcatcttgcctcaaagaattccgttccaagcaagatctggtgaaacttgatatcaatggcctgccatatggtctgtgtgccggctgcgtgaatctcagtaagagcgccagcccaggcattaacgtccctcccggcacgaatagaccaggcttgggccagaatgagaatctgagtgccattgaggggaaaggcaaggtggggggactgaagacacgctgctctagctgcaacgttaagtttgagtctgaaagtgaactccagaaccacatccaaaccatccaccgagagctcgtgccagacagcaacagcacacagttgaaaacgccccaagtatcaccaatgcccagaatcagtccctcccagtcggatgagaagaagacctatcaatgcatcaagtgtcagatggttttctacaatgaatgggatattcaggttcatgttgcaaatcacatgattgatgaaggactgaaccatgaatgcaaactctgcagccagacctttgactctcctgccaaactccagtgccacctgatagagcacagcttcgaagggatgggaggcaccttcaagtgtccagtctgctttacagtatttgttcaagcaaacaagttgcagcagcatattttctctgcccatggacaagaagacaagatctatgactgtacacaatgtccacagaagtttttcttccaaacagagctgcagaatcatacaatgacccaacacagcagttagtgcaagtacagtctctcaaggagaattgattttgtggcacaaaaagggaacatgttttactctttgcacgaaactttcattgttaatgtatattattcagaaacattgtattgtaccataaaacttgtattatcaaactgttggatgttcatgtgtttgaacttttgcgcaccggatagaccccttgtatataaagtgttgcacatgtattatgtcgtctgatactaaaatggtcttataaagacaagtggacttgggccctattcaggcaagattaaaaaaaaaaaaagactatgaccaaaatggcttaagataaagtatttttaaggaagaaagattaaaaacaactgttatacatgagactatggttggacttccttttctttacacttaagcctagaatttctctttaggtatatcagcgcttaaatccaagactattttttattgctgaagattcttgcaaaccatgaagagatgttctcacagaacagaaccccacagctggataaggcccgtatatatatatttgtaagccttgcaatgtgacaggtagcatcactatatatgcaatagttgttatgtagactgtcaaagaatttttttttccctggatacatttgaagctttgagtgttcaaggttttccttaatgatttcacgcagccaaattcttgaatcagttgaactaacctgtatgttactgttattaatgtttactctgcagtctgaacctggagattactggaattgttttccaagaggaaataaattcagtttaccatta

SEQ ID NO: 202777 - DNA, 4345 bp, Homo sapiens
  Payload ID: 19996
  Gene Name: zinc finger protein 521
  ENST ID: ENST00000399425
  CDS Start-End: 69-3803
ggccttgcttccattttccattattatgtggactaccggagcgacagcgcagtccaagaccttgcaggatgtctcgccgcaagcaagcgaaaccgagatccctcaaagaccccaactgtaaacttgaagacaagactgaagatggagaggcactagattgtaagaagaggccggaagacggggaggagttggaagacgaagctgtgcacagctgtgacagctgcctccaggtgtttgaatcgctgagcgatatcacagaacacaagattaatcaatgtcaactgacagatggagtggatgttgaagatgatccgacttgctcttggccagcttcctcaccttctagcaaggatcagacttcccctagccatggagaaggttgcgattttggagaggaagaaggtggccctgggcttccatacccgtgtcaattctgtgacaagtcgtttagccgcctcagctacctaaagcaccatgagcagagtcacagtgacaaactgcctttcaaatgcacctactgcagtaggctgttcaaacacaagcgcagccgagatcgccacataaaactccacaccggggacaagaagtaccactgcagtgaatgtgatgctgcgttttccagaagtgatcacttgaagatccacttaaagactcacacgtccaacaagccatataaatgtgccatttgtcgccgtgggtttctgtcctctagttccttacacggacacatgcaggttcatgagaggaacaaggacggctctcagtccggttccaggatggaggactggaagatgaaggacactcagaagtgcagtcagtgtgaggaaggctttgacttcccggaagacctccaaaaacacattgcagagtgccaccccgaatgctccccaaatgaggaccgagcggccctccagtgtgtctactgccacgagctcttcgtagaggagacctccctcatgaaccacatggagcaggtgcatagcggggagaagaagaactcatgcagcatttgttctgagagtttccacacagttgaggaactgtacagccacatggacagtcaccagcaaccggagtcatgcaatcacagcaacagcccttccctggtcacggtgggctatacctccgtgtccagtacgactccagattccaacctctcagtggacagctcaaccatggtggaagctgccccgccaatcccaaagagtcgagggaggaagagggccgctcaacaaacccctgacatgactggtccctcgagtaaacaagcaaaagttacctacagctgtatttactgcaacaaacaattattttcaagtcttgcagttctgcagattcacctgaaaactatgcacttagataagccagaacaggcccatatttgtcagtattgcttggaggtcctgccctcactctataacctaaatgaacatcttaagcaagtgcatgaagctcaggacccaggtctgattgtttctgccatgcctgccattgtctaccagtgtaacttctgttccgaagttgtcaacgacctcaacactcttcaggaacacatccgatgttctcatggatttgcaaaccctgcagctaaagatagtaatgcattcttttgtccccattgctatatggggtttctcactgactcttccctggaagagcatattagacaggttcattgtgacctcagtggctcccgatttgggtctccagtgcttgggactcccaaagaaccagtagtagaagtctattcttgttcctattgtacaaattcgccaatattcaacagcgttcttaaactgaacaagcatatcaaagagaatcataaaaacattcccttggccctgaattatatccacaatgggaagaaatccagggccttaagccccctatctcctgtggccatagagcagacatctcttaagatgatgcaggcagtaggaggtgcacctgcacgtcccactggagaatatatctgtaatcaatgtggtgctaagtacacatccctagacagctttcagactcacctaaaaactcatctcgacactgtgcttccaaaattgacctgtcctcagtgcaacaaggaattccccaaccaagaatccttgctgaagcatgttaccattcactttatgatcacttcaacgtattacatctgtgagagttgtgacaagcaattcacatcagtggatgaccttcagaaacacctgctggacatgcacacctttgtcttctttcgctgcaccctctgccaggaagtttttgactcaaaagtctccattcagctccacttggctgtgaagcacagtaacgaaaagaaagtctataggtgcacatcttgcaactgggacttccgcaacgaaactgacttgcagctccatgtgaaacacaaccacctggaaaaccaagggaaagtgcataagtgcattttctgcggtgagtcctttggcaccgaggtggagctgcaatgccacatcaccactcacagtaagaagtacaactgcaagttctgtagcaaagccttccatgcgatcattttgttagaaaaacacttgcgagaaaaacactgtgtattcgaaaccaagacacccaactgtggaacaaatggagcttccgagcaagtgcagaaagaggaagtggagctgcagactttgctgaccaacagccaggagtcccacaacagtcacgatgggagcgaagaagacgttgacacctctgagcctatgtacggctgcgacatttgtggggcagcctacactatggaaactttgctgcagaatcaccagctccgagaccacaacatcagacctggagaaagtgccatcgtgaaaaagaaagctgagctcattaaagggaattacaagtgcaacgtgtgctctcgaaccttcttctccgaaaatggcctccgggaacatatgcagacccacctaggccctgtcaaacactacatgtgccctatttgcggagagcggtttccctcccttttaactcttactgaacacaaagtcacgcatagtaagagtcttgatactggaaactgccggatttgcaagatgcctctccagagtgaagaggagtttttagagcattgccaaatgcaccctgacttgaggaattccctgacaggctttcgctgcgtggtgtgcatgcagacagtgacctccaccttggaactcaaaatccatgggacgttccacatgcaaaagacagggaatgggtctgcagttcagaccacagggcggggccagcacgtccaaaaactgtataagtgcgcatcttgcctcaaagaattccgttccaagcaagatctggtgaaacttgatatcaatggcctgccatatggtctgtgtgccggctgcgtgaatctcagtaagagcgccagcccaggcattaacgtccctcccggcacgaatagaccaggcttgggccagaatgagaatctgagtgccattgaggggaaaggcaaggtggggggactgaagacacgctgctctagctgcaacgttaagtttgagtctgaaagtgaactccagaaccacatccaaaccatccaccgagagctcgtgccagacagcaacagcacacagttgaaaacgccccaagtatcaccaatgcccagaatcagtccctcccagtcggatgaggatattgtcttctctatgactgaagagaccagcgctcatgccaacactactgagatctggaatctcagcatagcttcaccaagaagacctatcaatgcatcaagtgtcagatggttttctacaatgaatgggatattcaggttcatgttgcaaatcacatgattgatgaaggactgaaccatgaatgcaaactctgcagccagacctttgactctcctgccaaactccagtgccacctgatagagcacagcttcgaagggatgggaggcaccttcaagtgtccagtctgctttacagtatttgttcaagcaaacaagttgcagcagcatattttctctgcccatggacaagaagacaagatctatgactgtacacaatgtccacagaagtttttcttccaaacagagctgcagaatcatacaatgacccaacacagcagttagtgcaagtacagtctctcaaggagaattgattttgtggcacaaaaagggaacatgttttactctttgcacgaaactttcattgttaatgtatattattcagaaacattgtattgtaccataaaacttgtattatcaaactgttggatgttcatgtgtttgaacttttgcgcaccggatagaccccttgtatataaagtgttgcacatgtattatgtcgtctgatactaaaatggtcttataaagacaagtggacttgggccc

SEQ ID NO: 202778 - DNA, 4253 bp, Homo sapiens
  Payload ID: 19996
  Gene Name: zinc finger protein 521
  Uniprot ID: Q96K83
  ENST ID: ENST00000538137
  CDS Start-End: 199-4134
gacaatgatttcctcagtgattacgtacagagcgagtccctgcgggttaggggccccctctggagccatcctgatggctttgggggccttgcttccattttccattattatgtggactaccggagcgacagcgcagtccaagaccttgcagtttctttcagggctgaattgaaacaacttcagctgtttgcttttaggatgtctcgccgcaagcaagcgaaaccgagatccctcaaagaccccaactgtaaacttgaagacaagactgaagatggagaggcactagattgtaagaagaggccggaagacggggaggagttggaagacgaagctgtgcacagctgtgacagctgcctccaggtgtttgaatcgctgagcgatatcacagaacacaagattaatcaatgtcaactgacagatggagtggatgttgaagatgatccgacttgctcttggccagcttcctcaccttctagcaaggatcagacttcccctagccatggagaaggttgcgattttggagaggaagaaggtggccctgggcttccatacccgtgtcaattctgtgacaagtcgtttagccgcctcagctacctaaagcaccatgagcagagtcacagtgacaaactgcctttcaaatgcacctactgcagtaggctgttcaaacacaagcgcagccgagatcgccacataaaactccacaccggggacaagaagtaccactgcagtgaatgtgatgctgcgttttccagaagtgatcacttgaagatccacttaaagactcacacgtccaacaagccatataaatgtgccatttgtcgccgtgggtttctgtcctctagttccttacacggacacatgcaggttcatgagaggaacaaggacggctctcagtccggttccaggatggaggactggaagatgaaggacactcagaagtgcagtcagtgtgaggaaggctttgacttcccggaagacctccaaaaacacattgcagagtgccaccccgaatgctccccaaatgaggaccgagcggccctccagtgtgtctactgccacgagctcttcgtagaggagacctccctcatgaaccacatggagcaggtgcatagcggggagaagaagaactcatgcagcatttgttctgagagtttccacacagttgaggaactgtacagccacatggacagtcaccagcaaccggagtcatgcaatcacagcaacagcccttccctggtcacggtgggctatacctccgtgtccagtacgactccagattccaacctctcagtggacagctcaaccatggtggaagctgccccgccaatcccaaagagtcgagggaggaagagggccgctcaacaaacccctgacatgactggtccctcgagtaaacaagcaaaagttacctacagctgtatttactgcaacaaacaattattttcaagtcttgcagttctgcagattcacctgaaaactatgcacttagataagccagaacaggcccatatttgtcagtattgcttggaggtcctgccctcactctataacctaaatgaacatcttaagcaagtgcatgaagctcaggacccaggtctgattgtttctgccatgcctgccattgtctaccagtgtaacttctgttccgaagttgtcaacgacctcaacactcttcaggaacacatccgatgttctcatggatttgcaaaccctgcagctaaagatagtaatgcattcttttgtccccattgctatatggggtttctcactgactcttccctggaagagcatattagacaggttcattgtgacctcagtggctcccgatttgggtctccagtgcttgggactcccaaagaaccagtagtagaagtctattcttgttcctattgtacaaattcgccaatattcaacagcgttcttaaactgaacaagcatatcaaagagaatcataaaaacattcccttggccctgaattatatccacaatgggaagaaatccagggccttaagccccctatctcctgtggccatagagcagacatctcttaagatgatgcaggcagtaggaggtgcacctgcacgtcccactggagaatatatctgtaatcaatgtggtgctaagtacacatccctagacagctttcagactcacctaaaaactcatctcgacactgtgcttccaaaattgacctgtcctcagtgcaacaaggaattccccaaccaagaatccttgctgaagcatgttaccattcactttatgatcacttcaacgtattacatctgtgagagttgtgacaagcaattcacatcagtggatgaccttcagaaacacctgctggacatgcacacctttgtcttctttcgctgcaccctctgccaggaagtttttgactcaaaagtctccattcagctccacttggctgtgaagcacagtaacgaaaagaaagtctataggtgcacatcttgcaactgggacttccgcaacgaaactgacttgcagctccatgtgaaacacaaccacctggaaaaccaagggaaagtgcataagtgcattttctgcggtgagtcctttggcaccgaggtggagctgcaatgccacatcaccactcacagtaagaagtacaactgcaagttctgtagcaaagccttccatgcgatcattttgttagaaaaacacttgcgagaaaaacactgtgtattcgaaaccaagacacccaactgtggaacaaatggagcttccgagcaagtgcagaaagaggaagtggagctgcagactttgctgaccaacagccaggagtcccacaacagtcacgatgggagcgaagaagacgttgacacctctgagcctatgtacggctgcgacatttgtggggcagcctacactatggaaactttgctgcagaatcaccagctccgagaccacaacatcagacctggagaaagtgccatcgtgaaaaagaaagctgagctcattaaagggaattacaagtgcaacgtgtgctctcgaaccttcttctccgaaaatggcctccgggaacatatgcagacccacctaggccctgtcaaacactacatgtgccctatttgcggagagcggtttccctcccttttaactcttactgaacacaaagtcacgcatagtaagagtcttgatactggaaactgccggatttgcaagatgcctctccagagtgaagaggagtttttagagcattgccaaatgcaccctgacttgaggaattccctgacaggctttcgctgcgtggtgtgcatgcagacagtgacctccaccttggaactcaaaatccatgggacgttccacatgcaaaagacagggaatgggtctgcagttcagaccacagggcggggccagcacgtccaaaaactgtataagtgcgcatcttgcctcaaagaattccgttccaagcaagatctggtgaaacttgatatcaatggcctgccatatggtctgtgtgccggctgcgtgaatctcagtaagagcgccagcccaggcattaacgtccctcccggcacgaatagaccaggcttgggccagaatgagaatctgagtgccattgaggggaaaggcaaggtggggggactgaagacacgctgctctagctgcaacgttaagtttgagtctgaaagtgaactccagaaccacatccaaaccatccaccgagagctcgtgccagacagcaacagcacacagttgaaaacgccccaagtatcaccaatgcccagaatcagtccctcccagtcggatgagaagaagacctatcaatgcatcaagtgtcagatggttttctacaatgaatgggatattcaggttcatgttgcaaatcacatgattgatgaaggactgaaccatgaatgcaaactctgcagccagacctttgactctcctgccaaactccagtgccacctgatagagcacagcttcgaagggatgggaggcaccttcaagtgtccagtctgctttacagtatttgttcaagcaaacaagttgcagcagcatattttctctgcccatggacaagaagacaagatctatgactgtacacaatgtccacagaagtttttcttccaaacagagctgcagaatcatacaatgacccaacacagcagttagtgcaagtacagtctctcaaggagaattgattttgtggcacaaaaagggaacatgttttactctttgcacgaaactttcattgttaatgtatattattcagaaacattgtattgtaccat

SEQ ID NO: 202779 - DNA, 694 bp, Homo sapiens
  Payload ID: 19996
  Gene Name: zinc finger protein 521
  ENST ID: ENST00000577801
  CDS Start-End: 21-694
ctgggggccgtcggctcgggatgtctcgccgcaagcaagcgaaaccgagatccctcaaagaccccaactgtaaacttgaagacaagactgaagatggagaggcactagattgtaagaagaggccggaagacggggaggagttggaagacgaagctgtgcacagctgtgacagctgcctccaggtgtttgaatcgctgagcgatatcacagaacacaagattaatcaatgtcaactgacagatggagtggatgttgaagatgatccgacttgctcttggccagcttcctcaccttctagcaaggatcagacttcccctagccatggagaaggttgcgattttggagaggaagaaggtggccctgggcttccatacccgtgtcaattctgtgacaagtcgtttagccgcctcagctacctaaagcaccatgagcagagtcacagtgacaaactgcctttcaaatgcacctactgcagtaggctgttcaaacacaagcgcagccgagatcgccacataaaactccacaccggggacaagaagtaccactgcagtgaatgtgatgctgcgttttccagaagtgatcacttgaagatccacttaaagactcacacgtccaacaagccatataaatgtgccatttgtcgccgtgggtttctgtcctctagttccttacacggacacatgcaggttcatga

SEQ ID NO: 202780 - DNA, 338 bp, Homo sapiens
  Payload ID: 19996
  Gene Name: zinc finger protein 521
  ENST ID: ENST00000577461
  CDS Start-End: 248-338
gggaaagtttggtgcagcagccgccgccgccgccgccgccgtcgtgcagagcgcggagctcgggcagccgcgagccccgcgcgcgagcgcgagccggagccggagcgaggagcggagcgcggagcgagggcgcgagggaggccgagcggagggcgcgaggcgccgcggcccgaggggcgcgcggccacgaggaagtatagtttctttcagggctgaattgaaacaacttcagctgtttgcttttaggatgtctcgccgcaagcaagcgaaaccgagatccctcaaagaccccaactgtaaacttgaagacaagactgaagatggagaggcactagatt

SEQ ID NO: 202781 - DNA, 4327 bp, Homo sapiens
  Payload ID: 19996
  Gene Name: zinc finger protein 521
  ENST ID: ENST00000584787
  CDS Start-End: 765-4040
atttcctcagtgattacgtacagagcgagtccctgcgggttaggggccccctctggagccatcctgatggctttgggggccttgcttccattttccattattatgtggactaccggagcgacagcgcagtccaagaccttgcagaccccaactgtaaacttgaagacaagactgaagatggagaggcactagattgtaagaagaggccggaagacggggaggagttggaagacgaagctgtgcacagctgtgacagctgcctccaggtgtttgaatcgctgagcgatatcacagaacacaagattaatcaatgtcaactgacagatggagtggatgttgaagatgatccgacttgctcttggccagcttcctcaccttctagcaaggatcagacttcccctagccatggagaaggttgcgattttggagaggaagaaggtggccctgggcttccatacccgtgtcaattctgtgacaagtcgtttagccgcctcagctacctaaagcaccatgagcagagtcacagtgacaaactgcctttcaaatgcacctactgcagtaggctgttcaaacacaagcgcagccgagatcgccacataaaactccacaccggggacaagaagtaccactgcagtgaatgtgatgctgcgttttccagaagtgatcacttgaagatccacttaaagactcacacgtccaacaagccatataaatgtgccatttgtcgccgtgggtttctgtcctctagttccttacacggacacatgcaggttcatgagaggaacaaggacggctctcagtccggttccaggatggaggactggaagatgaaggacactcagaagtgcagtcagtgtgaggaaggctttgacttcccggaagacctccaaaaacacattgcagagtgccaccccgaatgctccccaaatgaggaccgagcggccctccagtgtgtctactgccacgagctcttcgtagaggagacctccctcatgaaccacatggagcaggtgcatagcggggagaagaagaactcatgcagcatttgttctgagagtttccacacagttgaggaactgtacagccacatggacagtcaccagcaaccggagtcatgcaatcacagcaacagcccttccctggtcacggtgggctatacctccgtgtccagtacgactccagattccaacctctcagtggacagctcaaccatggtggaagctgccccgccaatcccaaagagtcgagggaggaagagggccgctcaacaaacccctgacatgactggtccctcgagtaaacaagcaaaagttacctacagctgtatttactgcaacaaacaattattttcaagtcttgcagttctgcagattcacctgaaaactatgcacttagataagccagaacaggcccatatttgtcagtattgcttggaggtcctgccctcactctataacctaaatgaacatcttaagcaagtgcatgaagctcaggacccaggtctgattgtttctgccatgcctgccattgtctaccagtgtaacttctgttccgaagttgtcaacgacctcaacactcttcaggaacacatccgatgttctcatggatttgcaaaccctgcagctaaagatagtaatgcattcttttgtccccattgctatatggggtttctcactgactcttccctggaagagcatattagacaggttcattgtgacctcagtggctcccgatttgggtctccagtgcttgggactcccaaagaaccagtagtagaagtctattcttgttcctattgtacaaattcgccaatattcaacagcgttcttaaactgaacaagcatatcaaagagaatcataaaaacattcccttggccctgaattatatccacaatgggaagaaatccagggccttaagccccctatctcctgtggccatagagcagacatctcttaagatgatgcaggcagtaggaggtgcacctgcacgtcccactggagaatatatctgtaatcaatgtggtgctaagtacacatccctagacagctttcagactcacctaaaaactcatctcgacactgtgcttccaaaattgacctgtcctcagtgcaacaaggaattccccaaccaagaatccttgctgaagcatgttaccattcactttatgatcacttcaacgtattacatctgtgagagttgtgacaagcaattcacatcagtggatgaccttcagaaacacctgctggacatgcacacctttgtcttctttcgctgcaccctctgccaggaagtttttgactcaaaagtctccattcagctccacttggctgtgaagcacagtaacgaaaagaaagtctataggtgcacatcttgcaactgggacttccgcaacgaaactgacttgcagctccatgtgaaacacaaccacctggaaaaccaagggaaagtgcataagtgcattttctgcggtgagtcctttggcaccgaggtggagctgcaatgccacatcaccactcacagtaagaagtacaactgcaagttctgtagcaaagccttccatgcgatcattttgttagaaaaacacttgcgagaaaaacactgtgtattcgaaaccaagacacccaactgtggaacaaatggagcttccgagcaagtgcagaaagaggaagtggagctgcagactttgctgaccaacagccaggagtcccacaacagtcacgatgggagcgaagaagacgttgacacctctgagcctatgtacggctgcgacatttgtggggcagcctacactatggaaactttgctgcagaatcaccagctccgagaccacaacatcagacctggagaaagtgccatcgtgaaaaagaaagctgagctcattaaagggaattacaagtgcaacgtgtgctctcgaaccttcttctccgaaaatggcctccgggaacatatgcagacccacctaggccctgtcaaacactacatgtgccctatttgcggagagcggtttccctcccttttaactcttactgaacacaaagtcacgcatagtaagagtcttgatactggaaactgccggatttgcaagatgcctctccagagtgaagaggagtttttagagcattgccaaatgcaccctgacttgaggaattccctgacaggctttcgctgcgtggtgtgcatgcagacagtgacctccaccttggaactcaaaatccatgggacgttccacatgcaaaagacagggaatgggtctgcagttcagaccacagggcggggccagcacgtccaaaaactgtataagtgcgcatcttgcctcaaagaattccgttccaagcaagatctggtgaaacttgatatcaatggcctgccatatggtctgtgtgccggctgcgtgaatctcagtaagagcgccagcccaggcattaacgtccctcccggcacgaatagaccaggcttgggccagaatgagaatctgagtgccattgaggggaaaggcaaggtggggggactgaagacacgctgctctagctgcaacgttaagtttgagtctgaaagtgaactccagaaccacatccaaaccatccaccgagagctcgtgccagacagcaacagcacacagttgaaaacgccccaagtatcaccaatgcccagaatcagtccctcccagtcggatgagaagaagacctatcaatgcatcaagtgtcagatggttttctacaatgaatgggatattcaggttcatgttgcaaatcacatgattgatgaaggactgaaccatgaatgcaaactctgcagccagacctttgactctcctgccaaactccagtgccacctgatagagcacagcttcgaagggatgggaggcaccttcaagtgtccagtctgctttacagtatttgttcaagcaaacaagttgcagcagcatattttctctgcccatggacaagaagacaagatctatgactgtacacaatgtccacagaagtttttcttccaaacagagctgcagaatcatacaatgacccaacacagcagttagtgcaagtacagtctctcaaggagaattgattttgtggcacaaaaagggaacatgttttactctttgcacgaaactttcattgttaatgtatattattcagaaacattgtattgtaccataaaacttgtattatcaaactgttggatgttcatgtgtttgaacttttgcgcaccggatagaccccttgtatataaagtgttgcacatgtattatgtcgtctgatactaaaatggtcttataaagacaagtggacttgggccctattcaggcaagattaaaaaaaaaaa

SEQ ID NO: 202782 - DNA, 552 bp, Homo sapiens
  Payload ID: 19996
  Gene Name: zinc finger protein 521
  ENST ID: ENST00000577775
  CDS Start-End: 1-552
gcaaaagacagggaatgggtctgcagttcagaccacagggcggggccagcacgtccaaaaactgtataagtgcgcatcttgcctcaaagaattccgttccaagcaagatctggtgaaacttgatatcaatggcctgccatatggtctgtgtgccggctgcgtgaatctcagtaagagcgccagcccaggcattaacgtccctcccggcacgaatagaccaggcttgggccagaatgagaatctgagtgccattgaggggaaaggcaaggtggggggactgaagacacgctgctctagctgcaacgttaagtttgagtctgaaagtgaactccagaaccacatccaaaccatccaccgagagctcgtgccagacagcaacagcacacagttgaaaacgccccaagtatcaccaatgcccagaatcagtccctcccagtcggatgagaagaagacctatcaatgcatcaagtgtcagatggttttctacaatgaatgggatattcaggttcatgttgcaaatcacatgattgactccaaaacaaaggatctggc

SEQ ID NO: 202783 - DNA, 547 bp, Homo sapiens
  Payload ID: 19996
  Gene Name: zinc finger protein 521
  ENST ID: ENST00000580488
  CDS Start-End: 116-547
gttcgcatctgcctcggatggtgggagatttttctttccaagaccttttcatcgccttgcagggtcgatttccccccctcgtccccccaactacaaaagagcacgactcgctttgatgtctcgccgcaagcaagcgaaaccgagatccctcaaagaccccaactgtaaacttgaagacaagactgaagatggagaggcactagattgtaagaagaggccggaagacggggaggagttggaagacgaagctgtgcacagctgtgacagctgcctccaggtgtttgaatcgctgagcgatatcacagaacacaagattaatcaatgtcaactgacagatggagtggatgttgaagatgatccgacttgctcttggccagcttcctcaccttctagcaaggatcagacttcccctagccatggagaaggttgcgattttggagaggaagaaggtggccctgggcttccatacccgtgtcaattctgtgacaagtcgtttagccgcctcagctacctaaagcaccatgagcagagtcacagtgacaaactg

SEQ ID NO: 202784 - DNA, 1102 bp, Homo sapiens
  Payload ID: 19997
  Gene Name: zinc finger protein 524
  Uniprot ID: Q96C55
  ENST ID: ENST00000301073
  CDS Start-End: 79-873
gcgcgcgcacactcgcgagccccggcgacatgcaaatgagctggctccagtgcccagacccaagccccccactgctcaatggacacccccagcccagacccgttgccttcgcctttgcccggggaggaagagaaacctctggccttatctcctcctgttccccggggccgccgaggccgtcgtcctgggggagccacctcctcaaatcggacactcaaggcctccctccctcgcaagcggggccgcccccccaagtcagggcaggagcccccactggtgcaggtgcagggggtgacagccccagtaggcagcagtggcgggagcgacctcctcctgatcgatgatcagggtgtgccctatacggtctctgaaggttcagcggctgggcctgagggctctggccccaggaaggccccacacttctgcccggtgtgcctgcgggccttcccctacctctccgacctggagcgccacagcatctcgcactcagagctgaagccgcaccagtgcaaggtttgcggcaagaccttcaagcgctccagccacctgcggcggcactgcaacatccatgccggcctgcggcccttccgctgcccgctgtgcccccgccgcttccgcgaggcgggcgagctggcgcaccaccaccgcgtgcactcgggggagcgcccgtaccagtgccccatctgccggctgcgctttacagaggccaacacgctccggcgccatgcgaagcgcaagcacccggaggccatgggggtacccctgtgtgcaccagatccagggtctgaaccgccgtgggacgaggagggcatcccggccacagcaggggccgaggaggaggaggagacagaggggaaaggggagccggcctgacccacacccccggccatcgctccctgggccaggtttagagcagggagtttggctggtgctgggcctgagccagggggccgggacacccttgtttccggtggtcttcccgttgtgggagcaggtggagggtggagacctaaactttggggtccagctgccttcagcccccctcccccagactaacagacccttggaggcaggggctgtggaaataaatctctgcctgctg

SEQ ID NO: 202785 - DNA, 1260 bp, Homo sapiens
  Payload ID: 19997
  Gene Name: zinc finger protein 524
  Uniprot ID: Q96C55
  ENST ID: ENST00000591046
  CDS Start-End: 235-1029
agggaagtgcctgtttatcagctgatacaagatcatctcactgttttacccaccagcatagctaaaattgtgtatctggatgaatgtcaaacacacctttgtcaagagacttggagagagggatgggcgaggtgttgggggacacaggggtgctctagaccctgtgagcactgactctgcccctctctcctcttagctggctccagtgcccagacccaagccccccactgctcaatggacacccccagcccagacccgttgccttcgcctttgcccggggaggaagagaaacctctggccttatctcctcctgttccccggggccgccgaggccgtcgtcctgggggagccacctcctcaaatcggacactcaaggcctccctccctcgcaagcggggccgcccccccaagtcagggcaggagcccccactggtgcaggtgcagggggtgacagccccagtaggcagcagtggcgggagcgacctcctcctgatcgatgatcagggtgtgccctatacggtctctgaaggttcagcggctgggcctgagggctctggccccaggaaggccccacacttctgcccggtgtgcctgcgggccttcccctacctctccgacctggagcgccacagcatctcgcactcagagctgaagccgcaccagtgcaaggtttgcggcaagaccttcaagcgctccagccacctgcggcggcactgcaacatccatgccggcctgcggcccttccgctgcccgctgtgcccccgccgcttccgcgaggcgggcgagctggcgcaccaccaccgcgtgcactcgggggagcgcccgtaccagtgccccatctgccggctgcgctttacagaggccaacacgctccggcgccatgcgaagcgcaagcacccggaggccatgggggtacccctgtgtgcaccagatccagggtctgaaccgccgtgggacgaggagggcatcccggccacagcaggggccgaggaggaggaggagacagaggggaaaggggagccggcctgacccacacccccggccatcgctccctgggccaggtttagagcagggagtttggctggtgctgggcctgagccagggggccgggacacccttgtttccggtggtcttcccgttgtgggagcaggtggagggtggagacctaaactttggggtccagctgccttcagcccccctcccccagactaacagacccttggaggcaggggctgtggaaataaatctctgcctgctggc

SEQ ID NO: 202786 - DNA, 489 bp, Homo sapiens
  Payload ID: 19997
  Gene Name: zinc finger protein 524
  ENST ID: ENST00000589521
  CDS Start-End: 99-489
ttcggtatctgtctttgggtcacccgactgtgggctttgtgagaggaaaggcgtttcgagctggctccagtgcccagacccaagccccccactgctcaatggacacccccagcccagacccgttgccttcgcctttgcccggggaggaagagaaacctctggccttatctcctcctgttccccggggccgccgaggccgtcgtcctgggggagccacctcctcaaatcggacactcaaggcctccctccctcgcaagcggggccgcccccccaagtcagggcaggagcccccactggtgcaggtgcagggggtgacagccccagtaggcagcagtggcgggagcgacctcctcctgatcgatgatcagggtgtgccctatacggtctctgaaggttcagcggctgggcctgagggctctggccccaggaaggccccacacttctgcccggtgtgcctgcgggccttcccctacctctccgacctggagc

SEQ ID NO: 202787 - DNA, 3890 bp, Homo sapiens
  Payload ID: 19998
  Gene Name: zinc finger protein 525
  ENST ID: ENST00000474037
  CDS Start-End: 135-1574
ccttccccgctcagacgcgcgcaaacccggaagcagatcgcgtggagtgaaggtccctcagcggcgcgattgacatctaaagactcttggtacatgaggaagaaacccggaaaaggaaagcagaggagtcagggatggctcttcctcagggtctattgacattcagggatgtggccatagaattctctcaggaggagtggaaatgcctggaccctgctcagaggactctatacagggacgtgatgctggagaattataggaacctggtctccctgggtatctcttccaaatgcacaatgaaggagttctcatcaacagcacaaggcaatacagaagtgatccacacagggacattgcaaagacatgaacgtcatcacattggagatttttccttccaggaaattgagaaagatattcataactttgagtttcagtggcaagaagatgaaagaaatggccatgaagcacccatgacaaaaatcaaaaaattgatgggtagtacagagcaatatgatcacaggcatgctggaaacaagcctattaaatatcagcttggatcaagctttcattcacatctgtctgaactccacatatttcagcccaaagggaaaattaataatcaagtggagaagtctatcaacgatgcttcctcggtttcaacagcccaaagaatttcttgtaggcccaaaacccatatatctaataactatggggataattttctgaattattcattactcacacaaagacaggaagtacgcatgagagaaaaatctttccaatgtattgagagtggcaaagcctttaattatagctcactcttaaggaaacatcagattattcatctaggagagaaacaatataaatgtgatgtatgtgacaaggtctttattcggaagcgataccttgcacgccatcgtagatgtcacactggtgagaaaccttacaagtgtaatgagtgtggcaagtccttcagtcagatgtcatcccttacatatcatcatcgacttcatactggagagaaaccttacaaatgtgaagaatgtgacaaagctttcagacacaattcagcccttcaaagacataggagaattcatactggagagaaaccacataagtgtaatgagtgtggcaagacctttagtcagaagtcataccttgcatgccatcgtagcattcatactggaaagaaaccttacgaatgtgaagaatgtgacaaagctttcagtttcaaatcaaaccttgaaagtcataggataactcatactggagagaaaccatacaagtgtaatgattgtggcaagaccttcagtcatatgtcaacccttacatgccatcgtagacttcatactggagagaaaccttacaagtgtgaagaatgtgatgaagctttccgtttcaaatcaagtcttgaaagacataggagaattcataatggagagaaactgtacaaatgtaatgagtgtggcaagaccttcagtcaggagttatcccttacctgccattgtagacttcatagtggagagaaaccttgcaagtgtggagaatgtgacaaggcttacagtttcaaataaaatcttgaaatacgtcagaaaattcatactggagagaaatgttataagtgtaatgattgtggcaagatcttcagtcatacgtcatccattgtataccatcataaatttcatagtggagagaaaccttacaaatgtgaagaatgtgatgaagctttcagtttcaaatcaaaccttgaaagacataggagaattcacactggtgagaaaccttacaggtgtaataggtgtggcaagaccttcagtcatacatcatcccttacatgccatcatagacttcatactggagagaaaccttacaaatgtgaagaatgtgatgaaactttcagatacaaatcaaatcttgaaagacataggagaattcataatggagagaaaccgtacaagtgtaatgagtgtggcaagaccttcagtcagaagtcatgccttacacgccatcatagacttcatactggaaataaatcttataagtgtaatgagtgtggcaagaccttcagtaaggagttaacacatgccatcatagacgtcatactggagagaaaccttagaagtgcaatgagtgtggcaaaacctttcataggcagtcagcgcttatttaccatcaagcaatccatggcagagggaaactttacaaatgtaatgattgtcaccacgtcttcagtaatgctacaactattgcaaatcattggagaatccataataaagagagaccttacaagtgtgataaatgtgacaaatttttcagacatcgttcataccttgcagttcacgggcgaactcatgctggagagaaaccttacaaatgtgaagaatgtgataaagctttcagattcaaatcaaaccttgaaagtcataggagaattcatactagagagaaaccttacaagtgtaatgagtgtggtaagatgttcagtcaaaattcggcccttgtaattcataaggcaattcatactggagagaaaccttacaagtgtaatgaatgtggcaaggtttttaatcgcaaagcaaagcttgcatgtcatcatagacttcatactggagagaacgcttgcaagtgtaataaatgtggcgaggtttttaatcaacaagcacaccttgcacgtcatcatagaactcatactggagagaaacattacaagtgtaatgagtgtggcaagacctactctcacaattcagtccttgtaattcataagacaattcacactggggagaaaccttacaagtgtaatgagtgtggcaaaaccttccatcacaattcagtccttgtaattcataaaacaattcatactggagagaaacaagcgtaatgaatgtggcgaggttttcaatcaacaagcacacgttgcacgtcatcatagaattcatactggagagaaaccttagaaatgtgaagaatgtgacaaagtttacagtcgcaaatcaaacctcgaaagacaggagaattcatactggagagaaaccataaaaatgtaagagtttttgacaaggctttcggacgtgattcacacctggcacaacatcccagagttcacactggagagaaaccttacaagtgtaatgagtgtgtcaaagcctttagtgggcagtcaacacttattcaccatcaggcaatccgtagtgtagggaaacttgactaacgtaatgattctcacaacgtcttcagtaatgctacaaccattgtaaatcactggagaagccataatgaagagagatcttacaaatgtaataattgtggcaaatttttcagacatcgttcatacattgccgttcattggcgaactcatgctggagagaaatcttacaatgtcatgattgtggcaaggtcttcagtcaagcttcatcttttgcaaaacaggagaattcatacaggagagaaacctcacaagtgtgatgatcgtggcaaagcctttacttcacattctcacctcattagacatcagagaatccatactggacagaaatcttacaaatgtcatcagtgtggcaaggtcttcagtccgacttcactccttgcagaatatcagaaaattcatttttcaggtaattgttcccaatgcaatgaatatagcaaaccatcaagcattgattgacattagagtcagttcagcattgacttgagtttgagttgacttaacattgagttcaagccttaattgacattaaagtgtttatgttaagaggactgggctgtgtggcatggctcacgcctgtaatcccagcactttggtaggccaaggtgggtaaatcacttgaggtcaggagtttgagatcagcctggacaacagacctgagccacttttcccagcctgttttttgttt

SEQ ID NO: 202788 - DNA, 1868 bp, Homo sapiens
  Payload ID: 19998
  Gene Name: zinc finger protein 525
  ENST ID: ENST00000475179
  CDS Start-End: 115-267
gcaaacccggaagcagatcgcgtggagtgaaggtccctcagcggcgcgattgacatctaaagactcttggtacatgaggaagaaacccggaaaaggaaagcagaggagtcagggatggctcttcctcagggtctattgacattcagggatgtggccatagaattctctcaggaggagtggaaatgcctggaccctgctcagaggactctatacagggacgtgatgctggagaattataggaacctggtctccctgggatttctatgatgactggattttgaattttgtggaacgctttttctccatctactaaggtgatgtggttttaatctttcattctgttctagtggtatataacattgatttgcttgaatatgttgaaccatccttgcatcccagaaataactggcacttgaatatctacatttttttaatatcctcttgaatacagttttctaggacaagggatcttcaagaagttctggaaaaatacatattatgagaaaattgtgcatgaatttcacaatttttgcaccaaaataaactagtgctagtctgttataacatgtctgaacaggctctagtttgatgccctcaaaaggataagacatgagtataaaaagagactccatcaaagcaatataaattctgatgaaatttaaacaagaagaaacattaaatttatgatgagaccagatgcagtggctcaggcctgtaatcccagcattttcagaggctgagacaggtgggccacatgagcccaggtattcaagaccagcctgggaaacgtggggaaatccccttttctacaaaaaatacaaaaattagctgggcatggtggcacatgcctgccgtctcagttattgtgaagtctgtgcagggaggatggcatgaacctgggaggtcaagattgcagtgagctatgatcatgccactgcactccagcatgggtgatggagagagatactgtcttaaaaaaagaatacttgtggtaacgtttgggtagaggaataatgaaatcattgatgctttataaaaaggttatggggacaatgcccaaaagaaataaacagtttgtaaacggataacttattttgagttagggcaagacaatgttgacagtgatgcatgaagcagcaggcagaccttccacatcatttttacagaaaaaaaaattaatcttgttcatgctgcaatgaagaggactgacagcaaacagcagaaacatagtcagaatttagagaacagcctggttaacatggtgaaacaccatctctagtaaaaatacaaaaattagctcagcatggtggcatgcgcctgtaatcccagctactcaggaggctgaggcaggggaatctcttgaacccaggaggtggaggatgcagtgaactgagatggcaacattacactctagcctgagcaacaagagcaaaactccatctcaaaaaaaaaaaaattgtcaagttccttctcttccattctttgccatcgtggtgtgtgcttgactctgcttcttgccacatcttctcagaagactttcaggattaagcgattcctggccaagaaacaaaagcaaaaccatcccactcccctgtggattcagatcaaaactggtaataaaatcaggtacgactccaaaaggagacattggagaagaaccaagctgggtctataaggaattgcatgtgagatggcacacatatttatgctgtctgagcatcacaatcacgttaccatatcaagctgaaaatgtcaccactatctggacagttggacatgttttattgggaatatgttttttctctgtaaatttgttataaacgcattggttggctgtgttcagtaataaacgtgagacttttcatttc

SEQ ID NO: 202789 - DNA, 6107 bp, Homo sapiens
  Payload ID: 19998
  Gene Name: zinc finger protein 525
  ENST ID: ENST00000467003
  CDS Start-End: 202-1533
acgcgcgcaaacccggaagcagatcgcgtggagtgaaggtccctcagcggcgcaaatgctgaccttggagttgggaatcttctaagtctgaagcttcctgcctgacagggtctattgacattcagggatgtggccatagaattctctcaggaggagtggaaatgcctggaccctgctcagaggactctatacagggacgtgatgctggagaattataggaacctggtctccctgggtatctcttccaaatgcacaatgaaggagttctcatcaacagcacaaggcaatacagaagtgatccacacagggacattgcaaagacatgaacgtcatcacattggagatttttccttccaggaaattgagaaagatattcataactttgagtttcagtggcaagaagatgaaagaaatggccatgaagcacccatgacaaaaatcaaaaaattgatgggtagtacagagcaatatgatcacaggcatgctggaaacaagcctattaaatatcagcttggatcaagctttcattcacatctgtctgaactccacatatttcagcccaaagggaaaattaataatcaagtggagaagtctatcaacgatgcttcctcggtttcaacagcccaaagaatttcttgtaggcccaaaacccatatatctaataactatggggataattttctgaattattcattactcacacaaagacaggaagtacgcatgagagaaaaatctttccaatgtattgagagtggcaaagcctttaattatagctcactcttaaggaaacatcagattattcatctaggagagaaacaatataaatgtgatgtatgtgacaaggtctttattcggaagcgataccttgcacgccatcgtagatgtcacactggtgagaaaccttacaagtgtaatgagtgtggcaagtccttcagtcagatgtcatcccttacatatcatcatcgacttcatactggagagaaaccttacaaatgtgaagaatgtgacaaagctttcagacacaattcagcccttcaaagacataggagaattcatactggagagaaaccacataagtgtaatgagtgtggcaagacctttagtcagaagtcataccttgcatgccatcgtagcattcatactggaaagaaaccttacgaatgtgaagaatgtgacaaagctttcagtttcaaatcaaaccttgaaagtcataggataactcatactggagagaaaccatacaagtgtaatgattgtggcaagaccttcagtcatatgtcaacccttacatgccatcgtagacttcatactggagagaaaccttacaagtgtgaagaatgtgatgaagctttccgtttcaaatcaagtcttgaaagacataggagaattcataatggagagaaactgtacaaatgtaatgagtgtggcaagaccttcagtcaggagttatcccttacctgccattgtagacttcatagtggagagaaaccttgcaagtgtggagaatgtgacaaggcttacagtttcaaataaaatcttgaaatacgtcagaaaattcatactggagagaaatgttataagtgtaatgattgtggcaagatcttcagtcatacgtcatccattgtataccatcataaatttcatagtggagagaaaccttacaaatgtgaagaatgtgatgaagctttcagtttcaaatcaaaccttgaaagacataggagaattcacactggtgagaaaccttacaggtgtaataggtgtggcaagaccttcagtcatacatcatcccttacatgccatcatagacttcatactggagagaaaccttacaaatgtgaagaatgtgatgaaactttcagatacaaatcaaatcttgaaagacataggagaattcataatggagagaaaccgtacaagtgtaatgagtgtggcaagaccttcagtcagaagtcatgccttacacgccatcatagacttcatactggaaataaatcttataagtgtaatgagtgtggcaagaccttcagtaaggagttaacacatgccatcatagacgtcatactggagagaaaccttagaagtgcaatgagtgtggcaaaacctttcataggcagtcagcgcttatttaccatcaagcaatccatggcagagggaaactttacaaatgtaatgattgtcaccacgtcttcagtaatgctacaactattgcaaatcattggagaatccataataaagagagaccttacaagtgtgataaatgtgacaaatttttcagacatcgttcataccttgcagttcacgggcgaactcatgctggagagaaaccttacaaatgtgaagaatgtgataaagctttcagattcaaatcaaaccttgaaagtcataggagaattcatactagagagaaaccttacaagtgtaatgagtgtggtaagatgttcagtcaaaattcggcccttgtaattcataaggcaattcatactggagagaaaccttacaagtgtaatgaatgtggcaaggtttttaatcgcaaagcaaagcttgcatgtcatcatagacttcatactggagagaacgcttgcaagtgtaataaatgtggcgaggtttttaatcaacaagcacaccttgcacgtcatcatagaactcatactggagagaaacattacaagtgtaatgagtgtggcaagacctactctcacaattcagtccttgtaattcataagacaattcacactggggagaaaccttacaagtgtaatgagtgtggcaaaaccttccatcacaattcagtccttgtaattcataaaacaattcatactggagagaaacaagcgtaatgaatgtggcgaggttttcaatcaacaagcacacgttgcacgtcatcatagaattcatactggagagaaaccttagaaatgtgaagaatgtgacaaagtttacagtcgcaaatcaaacctcgaaagacaggagaattcatactggagagaaaccataaaaatgtaagagtttttgacaaggctttcggacgtgattcacacctggcacaacatcccagagttcacactggagagaaaccttacaagtgtaatgagtgtgtcaaagcctttagtgggcagtcaacacttattcaccatcaggcaatccgtagtgtagggaaacttgactaacgtaatgattctcacaacgtcttcagtaatgctacaaccattgtaaatcactggagaagccataatgaagagagatcttacaaatgtaataattgtggcaaatttttcagacatcgttcatacattgccgttcattggcgaactcatgctggagagaaatcttacaatgtcatgattgtggcaaggtcttcagtcaagcttcatcttttgcaaaacaggagaattcatacaggagagaaacctcacaagtgtgatgatcgtggcaaagcctttacttcacattctcacctcattagacatcagagaatccatactggacagaaatcttacaaatgtcatcagtgtggcaaggtcttcagtccgacttcactccttgcagaatatcagaaaattcatttttcaggtaattgttcccaatgcaatgaatatagcaaaccatcaagcattgattgacattagagtcagttcagcattgacttgagtttgagttgacttaacattgagttcaagccttaattgacattaaagtgtttatgttaagaggactgggctgtgtggcatggctcacgcctgtaatcccagcactttggtaggccaaggtgggtaaatcacttgaggtcaggagtttgagatcagcctggacaacagacctgagccacttttcccagcctgttttttgtttctttaacaaaaactgatagggatttttatgggtatcgtattgaatctagattacattgggttatataatcatttaacatattaatttttccaaaccatcaatatgggttgtgtctctatatatgtttttaatcattttgatcaatttttgttgatttcaaggtacaaacgtctcacctttttacgtttattcctaagtatttcttattttaagttctccagcaaatggaagtgtgttaaaattttcttttaaaattgtttattattaaaatatggaaattcaactaatttttggtgctgatactgtattgtgcaaatccactgaatatgtttgttagttccagtactattttggttgagtctgtgattttctacacagaaggtcatgtcgtctacaaacaaatgtaattttacttctttctttctgatttggatgagtttgatttcttttgctatttaattgctctggctaggacaggcagtattgattgaatagaaggggtgagagcattcttgcatcatgtgagatcgtacaggaaagcattccattttccctgcttggttatttactcatttgtcatttcatggatgttctttctattgttgaggtaaatttccttttctattttgtttaggatttctatgatgactggattttgaattttgtggaacgctttttctccatctactaaggtgatgtggttttaatctttcattctgttctagtggtatataacattgatttgcttgaatatgttgaaccatccttgcatcccagaaataactggcacttgaatatctacatttttttaatatcctcttgaatacagttttctaggacaagggatcttcaagaagttctggaaaaatacatattatgagaaaattgtgcatgaatttcacaatttttgcaccaaaataaactagtgctagtctgttataacatgtctgaacaggctctagtttgatgccctcaaaaggataagacatgagtataaaaagagactccatcaaagcaatataaattctgatgaaatttaaacaagaagaaacattaaatttatgatgagaccagatgcagtggctcaggcctgtaatcccagcattttcagaggctgagacaggtgggccacatgagcccaggtattcaagaccagcctgggaaacgtggggaaatccccttttctacaaaaaatacaaaaattagctgggcatggtggcacatgcctgccgtctcagttattgtgaagtctgtgcagggaggatggcatgaacctgggaggtcaagattgcagtgagctatgatcatgccactgcactccagcatgggtgatggagagagatactgtcttaaaaaaagaatacttgtggtaacgtttgggtagaggaataatgaaatcattgatgctttataaaaaggttatggggacaatgcccaaaagaaataaacagtttgtaaacggataacttattttgagttagggcaagacaatgttgacagtgatgcatgaagcagcaggcagaccttccacatcatttttacagaaaaaaaaattaatcttgttcatgctgcaatgaagaggactgacagcaaacagcagaaacatagtcagaatttagagaacagcctggttaacatggtgaaacaccatctctagtaaaaatacaaaaattagctcagcatggtggcatgcgcctgtaatcccagctactcaggaggctgaggcaggggaatctcttgaacccaggaggtggaggatgcagtgaactgagatggcaacattacactctagcctgagcaacaagagcaaaactccatctcaaaaaaaaaaaaattgtcaagttccttctcttccattctttgccatcgtggtgtgtgcttgactctgcttcttgccacatcttctcagaagactttcaggattaagcgattcctggccaagaaacaaaagcaaaaccatcccactcccctgtggattcagatcaaaactggtaataaaatcaggtacgactccaaaaggagacattggagaagaaccaagctgggtctataaggaattgcatgtgagatggcacacatatttatgctgtctgagcatcacaatcacgttaccatatcaagctgaaaatgtcaccactatctggacagttggacatgttttattgggaatatgttttttctctgtaaatttgttataaacgcattggttggctgtgttcagtaataaacgtgagacttttcatttcaaaacaaaagtc

SEQ ID NO: 202790 - DNA, 569 bp, Homo sapiens
  Payload ID: 19998
  Gene Name: zinc finger protein 525
  ENST ID: ENST00000491101
  CDS Start-End: 124-483
cagacgcgcgcaaacccggaagcagatcgcgtggagtgaaggtccctcagcggcgcgattgacatctaaagactcttggtacatgaggaagaaacccggaaaaggaaagcagaggagtcagggatggctcttcctcagggtctattgacattcagggatgtggccatagaattctctcaggaggagtggaaatgcctggaccctgctcagaggactctatacagggacgtgatgctggagaattataggaacctggtctccctgggttcttgctgtgcggttgaagttggtcttgatctcctgggctcaagacatcctcctcggcctcccaagaagctgggattacaggcgccaacccccgtacctaactattggcttttgtttttaaactttttgcatatgtgtgtccttagggctaatatgagtcttctgtggacaacaagtagttggttcctgttgattgagtcagtctttgccttctgagtgcagagttaaatatttgcatttgaaatattactgatgcagaagaccttaccattgcctttttgttacatattatctgtatttct

SEQ ID NO: 202791 - DNA, 590 bp, Homo sapiens
  Payload ID: 19998
  Gene Name: zinc finger protein 525
  ENST ID: ENST00000593918
  CDS Start-End: 99-257
atcgcgtggagtgaaggtccctcagcggcgcgattgacatctaaagactcttggtacatgaggaagaaacccggaaaaggaaagcagaggagtcagggatggctcttcctcagggtctattgacattcagggatgtggccatagaattctctcaggaggagtggaaatgcctggaccctgctcagaggactctatacagggacgtgatgctggagaattataggaacctggtctccctggatggagttttcctctagttgtttaggatggagtgcaattgcacgatcttggctcaccgcaacctccgactcccgggtacaagcctggttttgaactcctgacctcaagtgatttgcccgccttggcctctcaatgtgctgggattacaggcatgagccaccgcgcctggtctgaagtggtattttttagaaacgaactaaaccttttttcagcttaatgacccagggatgtatttctgaaggacttgggagctctctttgaaaggcaaaatacaagggagacagtacctgtatctcagtaggaaattaagtaattcaaacatcaaataattccaatttaaagctatggcc

SEQ ID NO: 202792 - DNA, 156 bp, Homo sapiens
  Payload ID: 19998
  Gene Name: zinc finger protein 525
  ENST ID: ENST00000635711
  CDS Start-End: 1-156
atgtcttctcacaagactttcaggattaagcgattcctggccaagaaacaaaagcaaaaccatcccactcccctgtggattcagatcaaaactggtaataaaatcaggtacgactccaaaaggagacattggagaagaaccaagctgggtctataa

SEQ ID NO: 202793 - DNA, 4023 bp, Homo sapiens
  Payload ID: 19999
  Gene Name: zinc finger protein 526
  Uniprot ID: Q8TF50
  ENST ID: ENST00000301215
  CDS Start-End: 226-2238
gtcgccacgggtaagggcaccgcccaatgggaggtgtggatagtgaggggtcccacacgcctggagccgagggtctgtgtcaagagcggcaggggctgcaggagataagagaaacgggctgccgtggggtgtgtgtaggcttcagagacatgggatcacggaagactgaagcagaaacagtggattaagacttcctgagcgatagctggcactgccttccccacaatggcagaggtggtggctgaggtggccgagatgccaacacagatgtcaccaggggcagtggagatgtcaacacctatgtcggcagagatgatggagatgtcaacagaagtgactgagatgacacctggggaggcccttgcctcatccctcttcttccagcatcaccagttcatgtgctctgagtgtggcagcctctataacacactggaggaagtcctctcacaccaggagcagcacatgcttgctgtctcagaggaggaggcactgaccacacagaatgttggcctggagccggagctggtgccgggtgctgaggggcccttccagtgtggtgaatgcagccagctcatcctctcccctggggagctcctggcccaccaggatgcccacctccgagagtctgcaaaccagatccaataccagtgctgggactgccaggagctgttcccctcgcccgagctgtgggtggctcatcgaaaggcccagcacctttctgctacggtagctgagccaccagtgccacctcctttgcctcccccaacaccactgcctccaccttctcccccatccgaagtcaagatggagccctatgagtgtcctgagtgctctaccctctgcgccacccctgaggagttcttggagcatcagggcacccactttgactccctagagaaagaggagcgcaatgggttggaggaggaggaagaggacgatgaggaggatgaagaagatgatgaagagatggaggatgaggaggccatggcagaggtcggtgatgatgctgtgggaggtgacgagtccacagctggctgggctcagggctgcggggactgtccccagcaccagccctcagcaggggctcgccggcaacaccggcggacggctcacagcccggcatctgccacccaccccttccactgcagccagtgtcagcgcagtttcagctccgccaaccggctgcaggctcatgggcgggcccatgttggtggcacacatgagtgtacaacctgctccaaggtcttcaagaaagcagcatcgcttgagcagcacttgcggctgcatcgcggggaagcccgctacctctgtgtagactgtggccgcggctttggcacagaactcacgttggtggctcaccggcgggcccacactgccaacccattgcatcgctgtcgttgcggcaagacgttcagcaacatgaccaagttcctctaccaccggcgcactcacgccggcaaaagcggggcacctcccacaggagcaacagctcccccagctccagcggagcccacccctccaccaccaccccctgccccacctgcccagctgccctgcccacagtgctccaagtcctttgcctcagcttcccggctgtcccggcaccggcgtgcagtacacgggccccctgaacggcgtcaccgctgtggggtttgtggcaagggcttcaagaagctgatccacgtgcgcaaccacctgcggacacacacgggtgagaggcccttccagtgccactcatgtggcaagacctttgcttctttggccaacctcagccgccaccagctgacccatacgggtgcacgtccctaccaatgcctggactgtggcaagcgcttcacacagagctccaacctgcagcagcaccggcggttgcacttgcggccagtcgcctttgcccgcgccccccgcctccccatcactggtctctacaacaagagtccctactactgcgggacttgtggccgctggttccgcgccatggcgggcttgcgactgcatcagcgggtccatgcccgagctcggactttgacgctacagcctcccagatcaccatctcctgccccacccccacctccagagcctcaacagactatcatgtgcacagagctgggggagaccatcgccatcattgagacatcccagccactggcgcttgaggacaccctgcagctgtgccaggctgcactgggggccagtgaagcaggcgggctcttgcagttggacacggccttcgtgtgacgcagctgaaaagcaacaacaaaagggtttggttgcaacagccagtgtgggtacctctggggagagaggacctcctctgacaaactggtctggtacccaccatgtgccaggatccaccctggcctctttttacccactgactccccagaacaacccttccaggcttctcttgtcatctttctctgcctgaggggaaactgaagctctgaaatgcgatgtgatctgtaccaggtcacccagctatgctgcaaagtgggttggccaaggccctttgcactgcatcaccctggtgcccagcaacatcaggtaaccttcactgagcaccaagcttatgccaggtctgtgctggccactctcatatacctcttcagatcctctgcttgtacccccagcccttgccttccctggattttgggcacccaggactttgctctgcctggtggagggtacttgatttctctgggcttccttcatctcaattctgacagtgtggaaggaaatctgtaggtacccaggtcctcagctccagactgggtgatgctggagacccaggagcaagtcagcacaggctctgcccacaggaggcatgcacaatctggtaggagaaacgcacaagtacagatagcttgctctctgagtgtgtctcattgattcattcagcctgtgtgtcctaaagcctcccttctcccatactgggtgatgctgggggcagagatgagtcaggcctaaggcttctctgggctgtgatggggatgtgcagggacagtgggatcccaggaaacagacctccatggtgggagatcaggagttaaggacttcctagagaaggtagtccctgaaggaaaagtaggaatctggcagtgaaagaggaaaagaacattccaggcagacagcactgcaagagggtgagctcttggtgtatttggagaccatccagttattcatctgactgcctacctgaggcaagcaccacacttaccactgtatgtgtactatgatcccaacaggcttgtgacatagatttcatattatccctgttgtatagatttttaaaactggtggctgggcgtggtggctcacgcctgtaatcccagcactttgggaggccgaggcgggcagatcacgaggtcaggagatcgagaccatcctggctaacacggtgaaaccccgtctctactaaaaatacaaaaaattagccaggagtggtggcgggcgcctgtggtggccagctactcaggaggctgaggcaggagaatggcgtgaacccgggaggcggagcttgcagtgagccgagatcgcgccactgcactccagcctgggcgacagagtgagactccctctcaaaagaaaataaaaataaaaataaactggccaggtgcggtggctcacgcttgcaatcccagtgctttgggagactgaggcaggaggatcacttaaggccaggagttcgagaccagcctgggcaacagcaagacctcatctctacaaaacttaaaagttagccaggcctggtggcacatgcctgtaatccgagtgctttgggaggctgaggcaggaggatcactcgagctcaagaattcaagacctgggcaagagagagagactttgtctctattaaaaataaaaatgattggccgagcatggtggtgcacaccagtattcccagctactctggaggctgaggcggaggcaggattgcttgatatgagggagattgaggctgcagtgagctgtgttcacaccactgcactccagtctgggcaacagtgcaagaccctgtcactt

SEQ ID NO: 202794 - DNA, 573 bp, Homo sapiens
  Payload ID: 19999
  Gene Name: zinc finger protein 526
  ENST ID: ENST00000597945
  CDS Start-End: 368-573
aagagaaacgggtgagggcgccgcgcggggctggactgggaagagaacgctgggcggacggagggggcggaaggaaaactaaggggtctgcagggatcgaagagccttggggcctgcgctagggcgggagcggcgcgggctggaaggagagcactccttcctgtgtgccctggggctcctttagtgtgcgggagcctacgctggaactcgcccaccacccactgctgcgagctctcaccctgccgaggagctcagtctggctgccgtggggtgtgtgtaggcttcagagacatgggatcacggaagactgaagcagaaacagtggattaagacttcctgagcgatagctggcactgccttccccacaatggcagaggtggtggctgaggtggccgagatgccaacacagatgtcaccaggggcagtggagatgtcaacacctatgtcggcagagatgatggagatgtcaacagaagtgactgagatgacacctggggaggcccttgcctcatccctcttcttccagcatcaccagttcatgtgctctgagtgtggcagcctctataacacact

SEQ ID NO: 202795 - DNA, 5333 bp, Homo sapiens
  Payload ID: 20000
  Gene Name: zinc finger protein 527
  ENST ID: ENST00000356178
  CDS Start-End: 88-372
gggtctcggtcgcggggcccgtttgcagagcccgcggcgccgggaggactttgttcttcttcagaagagaaaactgaagaaggaggaatggctgtggggctttgtaaagccatgtcccaggggttggtgaccttcagagatgtggcgctagacttttcccaagaagagtgggaatggctgaagccatctcagaaggatttatacagagatgtcatgttggagaactacaggaacttggtatggcttggtgatggctgcagctgctgtagcactttgagaaccactgtcacggcagaagcttcatcctcctcctcatccatacaagcgtcattccattctctagctcttcctctaatgtccattcttgcctgatgatcaagatattgggtctgcgtcctagacagctgtggcatgttgatttgtttgtctgtatgtctttctgtctcttgctctcatttttcttcccctgtgaacaggactctccatttctaagcccaacatgatctccttactggagcaagggaaggaaccgtggatggtggagagaaagatgtcacagggtcactgtgcagactgggagtcttggtgtgaaattgaggaattatctccaaaatggttcattgatgaagatgaaatatcccaggagatggtaatggaaaggctagcaagtcatggccttgaatgctccagtttcagagaagcctggaaatataagggtgaatttgagctacatcagggaaatgcggagaggcatttcatgcaagtgacagctgttaaggaaatctctactgggaaaagagacaatgaatttagtaattctgggagaagcatacccctgaaatcagtatttttaacacaacagaaagttcctaccatacagcaagtacataaatttgatatttatgataaactcttcccccaaaattcagtcataattgaatataaaagactccatgctgagaaggaatctttgataggtaatgaatgtgaagaattcaaccagagtacgtaccttagtaaagatataggaattcctcctggggagaaaccttatgaaagtcatgatttttcaaagctcttaagtttccactcattatttactcaacatcagaccactcattttggaaaattaccccatggatacgatgaatgtggtgatgcctttagctgttactcattctttactcaacctcagagaattcacagtggagaaaaaccatatgcatgcaatgactgtggaaaagcctttagccacgacttctttctcagtgaacatcaaagaactcatattggggagaaaccttatgaatgtaaggaatgtaacaaagctttcagacagagtgctcaccttgctcaacatcagaggatccacactggagagaaaccgtttgcgtgcaatgaatgtgggaaggcctttagccgttatgccttccttgttgaacatcagagaattcacacaggtgagaaaccatatgaatgtaaagaatgtaataaagccttcagacagagtgctcaccttaatcaacatcagaggattcacactggagagaaaccctatgaatgtaatcagtgtggaaaagccttcagcagacgcatagcccttactctacatcaaagaattcacacaggagagaaacccttcaaatgtagtgaatgtgggaagacctttggctatcgctcacacctgaatcaacatcagagaattcataccggagaaaagccctatgaatgcatcaaatgtgggaagttttttaggactgactcacaacttaatcgacatcatagaattcacactggagagagaccatttgaatgcagtaaatgtgggaaagccttcagtgatgctttagttctaattcaccataagagaagtcatgcaggagagaaaccctatgaatgtaacaaatgtggaaaggccttcagttgtggctcatatcttaatcaacatcaaagaattcatactggagagaaaccctatgaatgtagtgaatgtgggaaggcttttcatcagatcttgtccctaagactacaccagagaattcacgctggagaaaaaccttataaatgtaacgaatgtgggaataattttagctgtgtctcagcccttagacgacatcagagaattcataatagagaaacgctctgattataacaagtataggaaagaaaacatgtggttaccactcaatccttattaaatattagtgagttctttttggttagtaattctttgaatgtagttcatatttcagttcatgagtatccgttatttgaagtagctcagtagtagacatctgttacttttttttttttcagacagagtctcgctctgttgcccaggctggagtgcagtggtgtaatcttggctcactgcagcctctgcctcctgggttcaagcaatcctcctgcctcagcctcctgagtagctgggattacaggtgcctgccaccatacctggctaatttttgtatttttagtagagacggggtttcaccacattggtcaggctgatctcgaactcctgactttaggtgatccacacgcctcagactcccaaagtgctgggattatgggcgtgagccaccgcgcctggccacatctgttactttttgatctgttctatacctggcttagcccaccctcaatgcatatgattcagatgaaactgttaatcagggacagcagtggactggtcacaggctggccaattatttcccccaacctagtgataagggattggcaaatggccctgtctggatcaatgaagtcctttgcgggtattcctatgggcagtaagagaggttttattctggaactgcaagtttcaaggatttaataagattaaaaactcaccagtagcctttttgccactcatgaggaaagctttcccaaagagaaatctaacagaggaaaatggagatgagagacagaaatatgatgatacagcttgatctcctggatccagtcattcctgacagctacaccatcaccatcctttttcattttttgtgatccaataaatttcctttttttgcttaatttggattatatttttgcctcatggaattagagtgctgattcacacattctatgtttgctatacataaaagaaagccttaattttttacgtggcataattatttatcctgaggagcaaccttctgatataacaagtttatgaaagttgaatacacagccttcataaaactgagataattgttacattttatttgtcgataaaactattttagtgtttcttagtttttttcacattatggctgaatattttaaaattcaccaagtaaaattctttaacaggcttccccttaaggagttaaaatcatttgtcacagtgactcaccatttgcctgtaaagagagaatggaaagctaagagaataatactttcatttgtttaatgaatggctcttcatcttcaaggaattacttgattttcttctttcagtatgggtctaaacatattctgtggcagaatataataacaattaaattgtaaatgaggtcttttgtgggtgggctctaaatttggtttaagacccagtgcggtggctcacgcctgtaatccgagcactttgggaggccgaggtgggcagatcacctgaggtcaggagttcgagaccagcctgaccaacatggagaaaccccgtctctactaaaaatacaaaattagccgggtgtggtggtgcgtgcttgtaatcccagctactcaggagggtgaggcaggagaatcacttgaacctgggaagtggaggttacagtgagcgaagatcgcgccattgtactccagcctgggcaacaagagcgaaactccttctcaaaaaaaaaaaaaaaaaaaaaataaataaataaataaataaataaatttggtttaagaagtgtatggataacttctttgcagctagagatatcaaacaaagatattgctggcagaaagaatgagtcatttttaacaaatggtaaaagtaaagcagttaatgcctaaaatttttagagactaaatcatttccattattgggagtaatgaggaagatgaaggtgtagggcaatacgtttcttttttatctgagtggatatagggaaataaactggtgatatggcagctgggccatcttgaatagtgagaaccagtaagaatattgggtattgcctgaagagcatctgtaaaaacatatcagaacaaatgaaagaggaaagaatgaaggatttatatgtgtgcatagagtgaatatatgtgtgcatagagtgaaatattcaacttatacttatttctaataaaatctgaaaattatttttcataaatattcaaattccctttaaacagcttaaaatacagatttagtgactcagtacttcaaaccttgaatagaaacaaatatgattataaaatatttccaaacttatgttacatctaatctgaaacatattaatattataagcttaattcatgtcatcatttctttattttttattatatttcctggaggtataaggatatttatttttataatttccaagcactgagtaataatttatttcagaaagtttcagaaggttacagtaaactttaccaaacttgaagaagaatgactcagatcagtaagaagagtctgagttactcactaattgatttttattttatttatttattttttttgagacagggtctcactctgttatccaggctggaatgcggtgacacaatcatggctcactgcagcctcaacttcccaggctcaagcgaccctcccacctcagcctcctgagtagctgggactacaggtgtgctctaccacacctggctaagtttcgcgtttttctgtagagatggggtttcgcgagttgcccaggctggtctccaactcttggcctgaagtgatttgcccatctcggcttcccaaagtgctgagattatagggatgagtcactgtgcacagctactaattgatttttgatctatgtatggcacctgatttcatcctcgagagtgacgtaaacctaagctactggttcattctctgtttatatagttaaacttcacttgtaatgttgataaaatcttttgtacccatgtgtttagcttcagtgtattttacaatctgatgtttctcctcacaatgaagtactaaattttgtttcttttcaactgtacaacccattgtcttgtgatatattgacctgatctcttaggattagtgaaaatttatgctttattaatatttgattgttattaggaccatctagagatttctgtttatgtgtgtgtatgtgcatctgaagatgtgtattttatttaaattttttgtattaagtgcc

SEQ ID NO: 202796 - DNA, 2828 bp, Homo sapiens
  Payload ID: 20000
  Gene Name: zinc finger protein 527
  Uniprot ID: Q8NB42
  ENST ID: ENST00000436120
  CDS Start-End: 108-1937
attctgggaggtgacgtcgcgggtctcggtcgcggggcccgtttgcagagcccgcggcgccgggaggactttgttcttcttcagaagagaaaactgaagaaggaggaatggctgtggggctttgtaaagccatgtcccaggggttggtgaccttcagagatgtggcgctagacttttcccaagaagagtgggaatggctgaagccatctcagaaggatttatacagagatgtcatgttggagaactacaggaacttggtatggcttggactctccatttctaagcccaacatgatctccttactggagcaagggaaggaaccgtggatggtggagagaaagatgtcacagggtcactgtgcagactgggagtcttggtgtgaaattgaggaattatctccaaaatggttcattgatgaagatgaaatatcccaggagatggtaatggaaaggctagcaagtcatggccttgaatgctccagtttcagagaagcctggaaatataagggtgaatttgagctacatcagggaaatgcggagaggcatttcatgcaagtgacagctgttaaggaaatctctactgggaaaagagacaatgaatttagtaattctgggagaagcatacccctgaaatcagtatttttaacacaacagaaagttcctaccatacagcaagtacataaatttgatatttatgataaactcttcccccaaaattcagtcataattgaatataaaagactccatgctgagaaggaatctttgataggtaatgaatgtgaagaattcaaccagagtacgtaccttagtaaagatataggaattcctcctggggagaaaccttatgaaagtcatgatttttcaaagctcttaagtttccactcattatttactcaacatcagaccactcattttggaaaattaccccatggatacgatgaatgtggtgatgcctttagctgttactcattctttactcaacctcagagaattcacagtggagaaaaaccatatgcatgcaatgactgtggaaaagcctttagccacgacttctttctcagtgaacatcaaagaactcatattggggagaaaccttatgaatgtaaggaatgtaacaaagctttcagacagagtgctcaccttgctcaacatcagaggatccacactggagagaaaccgtttgcgtgcaatgaatgtgggaaggcctttagccgttatgccttccttgttgaacatcagagaattcacacaggtgagaaaccatatgaatgtaaagaatgtaataaagccttcagacagagtgctcaccttaatcaacatcagaggattcacactggagagaaaccctatgaatgtaatcagtgtggaaaagccttcagcagacgcatagcccttactctacatcaaagaattcacacaggagagaaacccttcaaatgtagtgaatgtgggaagacctttggctatcgctcacacctgaatcaacatcagagaattcataccggagaaaagccctatgaatgcatcaaatgtgggaagttttttaggactgactcacaacttaatcgacatcatagaattcacactggagagagaccatttgaatgcagtaaatgtgggaaagccttcagtgatgctttagttctaattcaccataagagaagtcatgcaggagagaaaccctatgaatgtaacaaatgtggaaaggccttcagttgtggctcatatcttaatcaacatcaaagaattcatactggagagaaaccctatgaatgtagtgaatgtgggaaggcttttcatcagatcttgtccctaagactacaccagagaattcacgctggagaaaaaccttataaatgtaacgaatgtgggaataattttagctgtgtctcagcccttagacgacatcagagaattcataatagagaaacgctctgattataacaagtataggaaagaaaacatgtggttaccactcaatccttattaaatattagtgagttctttttggttagtaattctttgaatgtagttcatatttcagttcatgagtatccgttatttgaagtagctcagtagtagacatctgttacttttttttttttcagacagagtctcgctctgttgcccaggctggagtgcagtggtgtaatcttggctcactgcagcctctgcctcctgggttcaagcaatcctcctgcctcagcctcctgagtagctgggattacaggtgcctgccaccatacctggctaatttttgtatttttagtagagacggggtttcaccacattggtcaggctgatctcgaactcctgactttaggtgatccacacgcctcagactcccaaagtgctgggattatgggcgtgagccaccgcgcctggccacatctgttactttttgatctgttctatacctggcttagcccaccctcaatgcatatgattcagatgaaactgttaatcagggacagcagtggactggtcacaggctggccaattatttcccccaacctagtgataagggattggcaaatggccctgtctggatcaatgaagtcctttgcgggtattcctatgggcagtaagagaggttttattctggaactgcaagtttcaaggatttaataagattaaaaactcaccagtagcctttttgccactcatgaggaaagctttcccaaagagaaatctaacagaggaaaatggagatgagagacagaaatatgatgatacagcttgatctcctggatccagtcattcctgacagctacaccatcaccatcctttttcattttttgtgatccaataaatttcctttttttgctt

SEQ ID NO: 202797 - DNA, 999 bp, Homo sapiens
  Payload ID: 20000
  Gene Name: zinc finger protein 527
  ENST ID: ENST00000587349
  CDS Start-End: 75-515
ggggcccgtttgcagagcccgcggcgccgggaggactttgttcttcttcagaagagaaaactgaagaaggaggaatggctgtggggctttgtaaagccatgtcccaggggttggtgaccttcagagatgtggcgctagacttttcccaagaagagtgggaatggctgaagccatctcagaaggatttatacagagatgtcatgttggagaactacaggaacttggtatggcttggactctccatttctaagcccaacatgatctccttactggagcaagggaaggaaccgtggatggtggagagaaagatgtcacagggtcactgtgcaggttctcactctgttgcccaggctggagtgcagtggcatgatcttggctcactgcagcctatacctacggaactcaagcaatcttctcacctcagcatgcacaccactgcacctgatgtcgtcaggatggtagtgaggaggtcatgctccccttcactgtgttctctgtgtcttgcaggtttttaatgctggtctcactctgttatccaggctggaatgcggtgacacaatcatggctcactgcagcctcaacttcccaggctcaagcgaccctcccacctcagcctcctgagtagctgggactacaggtgtgctctaccacacctggctaagtttcgcgtttttctgtagagatggggtttcgcgagttgcccaggctggtctccaactcttggcctgaagtgatttgcccatctcggcttcccaaagtgctgagattatagggatgagtcactgtgcacagctactaattgatttttgatctatgtatggcacctgatttcatcctcgagagtgacgtaaacctaagctactggttcattctctgtttatatagttaaacttcacttgtaatgttgataaaatcttttgtacccatgtgtttagcttcagtgtattttacaatctgatgtttctcctcacaatgaagtactaaattttgtttcttttc

SEQ ID NO: 202798 - DNA, 815 bp, Homo sapiens
  Payload ID: 20000
  Gene Name: zinc finger protein 527
  ENST ID: ENST00000588512
  CDS Start-End: 92-268
tcgcgggtctcggtcgcggggcccgtttgcagagcccgcggcgccgggaggactttgttcttcttcagaagagaaaactgaagaaggaggaatggctgtggggctttgtaaagccatgtcccaggggttggtgaccttcagagatgtggcgctagacttttcccaagaagagtgggaatggctgaagccatctcagaaggatttatacagagatgtcatgttggagaactacaggaacttggactctccatttctaagcccaacatgatctccttactggagcaagggaaggaaccgtggatggtggagagaaagatgtcacagggtcactgtgcagactgggagtcttggtgtgaaattgaggaattatctccaaaatggttcattgatgaagatgaaatatcccaggagatggtaatggaaaggctagcaagtcatggccttgaatgctccagtttcagagaagcctggaaatataagggtgaatttgagctacatcagggaaatgcggagaggcatttcatgcaagtgacagctgttaaggaaatctctactgggaaaagagacaatgaatttagtaattctgggagaagcatacccctgaaatcagtatttttaacacaacagaaagttcctaccatacagcaagtacataaatttgatatttatgataaactcttcccccaaaattcagtcataattgaatataaaagactccatgctgagaaggaatctttgataggtaatgaatgtgaagaattcaaccagagtacgtaccttagtaaagatataggaattcctcctggggagaaacc

SEQ ID NO: 202799 - DNA, 1142 bp, Homo sapiens
  Payload ID: 20000
  Gene Name: zinc finger protein 527
  ENST ID: ENST00000483919
  CDS Start-End: 110-484
ggattctgggaggtgacgtcgcgggtctcggtcgcggggcccgtttgcagagcccgcggcgccgggaggactttgttcttcttcagaagagaaaactgaagaaggaggaatggctgtggggctttgtaaagccatgtcccaggggttggtgaccttcagagatgtggcgctagacttttcccaagaagagtgggaatggctgaagccatctcagaaggatttatacagagatgtcatgttggagaactacaggaacttggtatggcttggactctccatttctaagcccaacatgatctccttactggagcaagggaaggaaccgtggatggtggagagaaagatgtcacagggtcactgtgcaggttctcactctgttgcccaggctggagtgcagtggcatgatcttggctcactgcagcctatacctacggaactcaagcaatcttctcacctcagcatgcacaccactgcacctggttaatttttttgtttatttttcttgtagagacgaggtctcactgtgttgcccaggctggtctagcactcctgggctcaagcgatcctcccatcttggcatcccaaactgttgggattactggcatacttccacttttggagaattagattatttttctttttcttactgatttgtagtagaactaaattctgggcattattcatttttctatgatatatgttttagttgttttttctcagattgtcccttgccttttgactttgtgttttctcccgcacacaagttttcaaggttaatgtcaaattcattcctttcaaccagatgtcgtcaggatggtagtgaggaggtcatgctccccttcactgtgttctctgtgtcttgcaggtttttaatgctgtaagtgtgtttctcttgatatttttttcatgaccttttccacaatgatagggaattttacaagtcaaccctggttgagttctttcacagagattttggtggaagaaaggtataaaatgcaagggcttaggtcctattattggttttggaatgttctttttttgttcataattttcttttatattattgattacttttgtccaagtttatttaaaataattttcttaagttctgaaataaaatccttatggaattctggttgaaa

SEQ ID NO: 202800 - DNA, 580 bp, Homo sapiens
  Payload ID: 20000
  Gene Name: zinc finger protein 527
  ENST ID: ENST00000588911
  CDS Start-End: 108-580
attctgggaggtgacgtcgcgggtctcggtcgcggggcccgtttgcagagcccgcggcgccgggaggactttgttcttcttcagaagagaaaactgaagaaggaggaatggctgtggggctttgtaaagccatgtcccaggggttggtgaccttcagagatgtggcgctagacttttcccaagaagagtgggaatggctgaagccatctcagaaggatttatacagagatgtcatgttggagaactacaggaacttggtatggcttgactgggagtcttggtgtgaaattgaggaattatctccaaaatggttcattgatgaagatgaaatatcccaggagatggtaatggaaaggctagcaagtcatggccttgaatgctccagtttcagagaagcctggaaatataagggtgaatttgagctacatcagggaaatgcggagaggcatttcatgcaagtgacagctgttaaggaaatctctactgggaaaagagacaatgaatttagtaattctgggagaagcatacccctgaaatcagtatttttaacacaacagaaagttcctaccatacagcaagt

SEQ ID NO: 202801 - DNA, 3978 bp, Homo sapiens
  Payload ID: 20001
  Gene Name: zinc finger protein 528
  Uniprot ID: Q3MIS6
  ENST ID: ENST00000360465
  CDS Start-End: 427-2313
agccgattgcagggagaaactgttttcgcagcagtgcgcctcccttttccagccaccggttctcctgaccccgagtgtggggggtgacttcagtctcctgacatccagtgttctctcgagccagtttccagcccacagaaaatgagctcttccggaagtgggcatcttattccaatcccctccctgtgaatgtgtggagaaaaagagatgggaacgaggcagaggaaatagagaaattttgaaagagaaatgaagaatgagagacccattaacagaaggcaaagtagaaggttcacaaattttaagaaagggagaataaagtgaaaaaaatctcagaaggaatccactcaacagacgaggattcacttccaaagagacatattatgcaaggaagcaacttggaagaggaaagaaaagaagtcaggaatggcccttactcagggacccttgaaattcatggatgtggccatagagttctctcaggaagagtggaaatgcctggaccctgcgcagaggactttatacagggacgtgatgttggagaattataggaacctggtctccctgggaatctgtcttcctgacctgagtgttacctccatgttagagcaaaagagagatccctggactctgcagagtgaagagaaaatagcaaacgatccagacggcagggagtgcatcaaaggtgtgaacacagagaggagctctaaattgggaagtaatgcaggaaacaagccttgtaaaaatcaacttggattcacttttcagttacatctgagtgatctacagctatttcaagctgaaaggaaaatttctgggtgtaagcattttgaaaaacccgtcagtgacaattcctcagtttcaccgcttgaaaaaatttcttccagtgtcaaatcccaccttttaaataaatatagaaataattttgatcatgctccattacttccacaagaacagaaagcacacattagggaaaaagcttataaatgtaatgagcacggccaagtctttagagcatctgcaagccttactaaccaagtaatccataacgcagataatccttacaaatgcagtgaatgtggcaaggtctttagttgcagttcaaagcttgtgatacatcgaagaatgcatactggagagaagccttacaaatgtcatgaatgtggcaagctcttcagtagcaattcaaacctttcacaacatcaaagaattcatactggagagaagccttacaaatgtcatgaatgtgacaaggtctttcgaagcagttcaaagcttgcacaacatcaaagaattcatactggagagaagccttacaaatgtcatgaatgtgacaaggtcttcaatcaaattgcacaccttgtacgacatcaaaaaattcatactggagagaaaccttacagttgtaataaatgtggcaaggtctttagtcgccattcatatctagcagaacatcaaacggttcatactggtgagaaaccttacaaatgtgaagaatgtggcaaagcattttcagtgcgttccagcctcataacccatcagttaattcacactggaaggaaaccttacaaatgtaaagaatgtgacaaggtctttgggcgcaagtgtttcctgacctctcatcagagaattcatactagagagagaccttatggatgcagtcagtgtggcaagatctttagtcagaaatcagaccttatacgacatcgaaaaactcatactgatgagaagccttacaaatgtaataaatgtggcacagcgtttagagagttttcagaccttactgcccattttctaatccatagtggagagaaaccttatgaatgtaaagaatgtggcaaagtcttcaggtacaagtcttctctaaccagtcatcatagaattcatactggagagaagccttacaaatgtaacagatgtggcaaggtcttcagtcgcagttcaaacctggtatgccatcagaaaattcatacaggagaaaagccttacaaatgtaatcaatgtggcaaggtctttaatcaagcatcataccttacaagacatcaaataattcatactggagagaggccttacagatgtagtaaatgtggcaaagcatttcgagggtgttcaggccttactgcccatcttgcaatccatactgaaaagaaatctcatgagtgtaaagaatgtggcaagatcttcactcagaagtcttccctcaccaatcaccatagaattcacattggagagaaaccttacaaatgcaccctgtgcagtaaggtcttcagtcacaattctgaccttgcacagcatcagagagttcattcatgagagtccctacaaactgtatggcaaaaccatcatcatgagttctagcattaatcaacatcagtgagtccatactaagtggaaatcatataaatgaaatgtatgtgacacaggctttatcaaggcctgccaaatcactggacatcaccacatcactgtggaggatgaaagcacacagatgaattgtgtgtacttgggctattattcaaggaccattgctatagaacacgataggatttacacaagaagtaactctgtctctggttctctgatactaatctatgatattgcatgatgcagaataatgctaagtcaaaatatgttgaatctcatgacctgatgtatatcaaaggtgcaacggcttgtaaatgaccagttttattcaggctataaagcattcaattatttggggcttatagaaaaggctactttactctttgtgacttcgaaatcttttcatgtgccttccatacaggccattcactgtggtccctgggaaagaatcagtaggatgacagggctgacttcattagctgaggattatttctatccaatttcctgatgaaggacattgccttttgagattaaatattgtctgatttagagagcatggaggtgggcagagtaacataaaactgatgaccgtcatcatactgttgcagttagcacactttctcctgacataagtgcacagagcttcagtgtccaccaactgaccatgaaatagagtatgctgtaatcttaaggcataggttattagtgggaagagagtaataggttgctagtgtctgattatatggtagaaataatgcaaggaaaaaggtagccaccttctccattgaacagcagtacctgctgtttagcaaagactgatgagaagtagacttttttttttttggagatagagtctcactctgttgcccaggctggagtgtagtggtgtgttcttggctcactgcaccctccgcctcctgggctcaagcagtccttctgccttagcctcctaagtagctgagactacagacgtgcgccaccacacccagttcatttttgtatttttagtagagacagtgtttaccatgttggccaggcaggtctccaactcctgacctcaagtgatatgttcacctcagcctcccaaagtgctgggattacaggcatgaaccatggtgcccagcctcatttttgaaatggaatagagaacagttatatcacagttgagagtttaatcaaaatgaccggatcagcatattctttttttagatgagacagagtttcgcccttgtcacccaggctgtagtgcggtggcgcgatctcggctcactgcaacctccgcctcccgggttcaagcaattctcctgcctcagcctcccaagtagctgggattacaggcgtgtaccaccatacccagctaatttttgtatttttagtagagatggggtttcaccacgttggccacactggtctcaaactcctgacctcaggcgatccatctgcctcagcctgaaagtgctaggattacaggcgtgagccaccacacctggccagctcagcatattcttaagtaggattcacatttaattcttggtattataagttgcaaccatttgatttagaatgtatgcagctctcatgtttgtagtaataaagtttcatttttcctaagta

SEQ ID NO: 202802 - DNA, 582 bp, Homo sapiens
  Payload ID: 20001
  Gene Name: zinc finger protein 528
  ENST ID: ENST00000391787
  CDS Start-End: 340-582
agccgattgcagggagaaactgttttcgcagcagtgctttccagcccacagaaaatgagctcttccggaagtgggcatcttattccaatcccctccctgtgaatgtgtggagaaaaagagatgggaacgaggcagaggaaatagagaaattttgaaagagaaatgaagaatgagagacccattaacagaaggcaaagtagaaggttcacaaattttaagaaagggagaataaagtgaaaaaaatctcagaaggaatccactcaacagacgaggattcacttccaaagagacatattatgcaaggaagcaacttggaagaggaaagaaaagaagtcaggaatggcccttactcagggacccttgaaattcatggatgtggccatagagttctctcaggaagagtggaaatgcctggaccctgcgcagaggactttatacagggacgtgatgttggagaattataggaacctggtctccctgggaatctgtcttcctgacctgagtgttacctccatgttagagcaaaagagagatccctggactctgcagagtgaagagaaaatagcaaacgatccagacggc

SEQ ID NO: 202803 - DNA, 4209 bp, Homo sapiens
  Payload ID: 20001
  Gene Name: zinc finger protein 528
  ENST ID: ENST00000391788
  CDS Start-End: 524-895
agtttccggtagacccggaagccgattgcagggagaaactgttttcgcagcagtgcgcctcccttttccagccaccggttctcctgaccccgagtgtggggggtgacttcagtctcctgacatccagtgttctctcgagccagtttccagcccacagaaaatgagctcttccggaagtgggcatcttattccaatcccctccctgtgaatgtgtggagaaaaagagatgggaacgaggcagaggaaatagagaaattttgaaagagaaatgaagaatgagagacccattaacagaaggcaaagtagaaggattcacttccaaagagacatattatgcaaggaagcaacttggaagaggaaagaaaagaagtcaggaatggcccttactcagagtctcacacgttgcccaggctggagtgcagtggcatgatccctgctcattgcaacctccgcctccctgattcaaaggatttttccacctcagcttctcatgtagctgagattacagggacccttgaaattcatggatgtggccatagagttctctcaggaagagtggaaatgcctggaccctgcgcagaggactttatacagggacgtgatgttggagaattataggaacctggtctccctgggaatctgtcttcctgacctgagtgttacctccatgttagagcaaaagagagatccctggactctgcagagtgaagagaaaatagcaaacgatccagacggcagggagtgcatcaaaggtgtgaacacagttcctctactccagcagaaccttctttgttcacgtcctcaaagtcctatgttcggaggccacttgtccgacatcctcggagtccctcttctgggtcaccagttgccacctgcacagaccttgggggactgaacgaagggggcgaacattggaataaaagacaaagagaggagctctaaattgggaagtaatgcaggaaacaagccttgtaaaaatcaacttggattcacttttcagttacatctgagtgatctacagctatttcaagctgaaaggaaaatttctgggtgtaagcattttgaaaaacccgtcagtgacaattcctcagtttcaccgcttgaaaaaatttcttccagtgtcaaatcccaccttttaaataaatatagaaataattttgatcatgctccattacttccacaagaacagaaagcacacattagggaaaaagcttataaatgtaatgagcacggccaagtctttagagcatctgcaagccttactaaccaagtaatccataacgcagataatccttacaaatgcagtgaatgtggcaaggtctttagttgcagttcaaagcttgtgatacatcgaagaatgcatactggagagaagccttacaaatgtcatgaatgtggcaagctcttcagtagcaattcaaacctttcacaacatcaaagaattcatactggagagaagccttacaaatgtcatgaatgtgacaaggtctttcgaagcagttcaaagcttgcacaacatcaaagaattcatactggagagaagccttacaaatgtcatgaatgtgacaaggtcttcaatcaaattgcacaccttgtacgacatcaaaaaattcatactggagagaaaccttacagttgtaataaatgtggcaaggtctttagtcgccattcatatctagcagaacatcaaacggttcatactggtgagaaaccttacaaatgtgaagaatgtggcaaagcattttcagtgcgttccagcctcataacccatcagttaattcacactggaaggaaaccttacaaatgtaaagaatgtgacaaggtctttgggcgcaagtgtttcctgacctctcatcagagaattcatactagagagagaccttatggatgcagtcagtgtggcaagatctttagtcagaaatcagaccttatacgacatcgaaaaactcatactgatgagaagccttacaaatgtaataaatgtggcacagcgtttagagagttttcagaccttactgcccattttctaatccatagtggagagaaaccttatgaatgtaaagaatgtggcaaagtcttcaggtacaagtcttctctaaccagtcatcatagaattcatactggagagaagccttacaaatgtaacagatgtggcaaggtcttcagtcgcagttcaaacctggtatgccatcagaaaattcatacaggagaaaagccttacaaatgtaatcaatgtggcaaggtctttaatcaagcatcataccttacaagacatcaaataattcatactggagagaggccttacagatgtagtaaatgtggcaaagcatttcgagggtgttcaggccttactgcccatcttgcaatccatactgaaaagaaatctcatgagtgtaaagaatgtggcaagatcttcactcagaagtcttccctcaccaatcaccatagaattcacattggagagaaaccttacaaatgcaccctgtgcagtaaggtcttcagtcacaattctgaccttgcacagcatcagagagttcattcatgagagtccctacaaactgtatggcaaaaccatcatcatgagttctagcattaatcaacatcagtgagtccatactaagtggaaatcatataaatgaaatgtatgtgacacaggctttatcaaggcctgccaaatcactggacatcaccacatcactgtggaggatgaaagcacacagatgaattgtgtgtacttgggctattattcaaggaccattgctatagaacacgataggatttacacaagaagtaactctgtctctggttctctgatactaatctatgatattgcatgatgcagaataatgctaagtcaaaatatgttgaatctcatgacctgatgtatatcaaaggtgcaacggcttgtaaatgaccagttttattcaggctataaagcattcaattatttggggcttatagaaaaggctactttactctttgtgacttcgaaatcttttcatgtgccttccatacaggccattcactgtggtccctgggaaagaatcagtaggatgacagggctgacttcattagctgaggattatttctatccaatttcctgatgaaggacattgccttttgagattaaatattgtctgatttagagagcatggaggtgggcagagtaacataaaactgatgaccgtcatcatactgttgcagttagcacactttctcctgacataagtgcacagagcttcagtgtccaccaactgaccatgaaatagagtatgctgtaatcttaaggcataggttattagtgggaagagagtaataggttgctagtgtctgattatatggtagaaataatgcaaggaaaaaggtagccaccttctccattgaacagcagtacctgctgtttagcaaagactgatgagaagtagacttttttttttttggagatagagtctcactctgttgcccaggctggagtgtagtggtgtgttcttggctcactgcaccctccgcctcctgggctcaagcagtccttctgccttagcctcctaagtagctgagactacagacgtgcgccaccacacccagttcatttttgtatttttagtagagacagtgtttaccatgttggccaggcaggtctccaactcctgacctcaagtgatatgttcacctcagcctcccaaagtgctgggattacaggcatgaaccatggtgcccagcctcatttttgaaatggaatagagaacagttatatcacagttgagagtttaatcaaaatgaccggatcagcatattctttttttagatgagacagagtttcgcccttgtcacccaggctgtagtgcggtggcgcgatctcggctcactgcaacctccgcctcccgggttcaagcaattctcctgcctcagcctcccaagtagctgggattacaggcgtgtaccaccatacccagctaatttttgtatttttagtagagatggggtttcaccacgttggccacactggtctcaaactcctgacctcaggcgatccatctgcctcagcctgaaagtgctaggattacaggcgtgagccaccacacctggccagctcagcatattcttaagtaggattcacatttaattcttggtattataagttgcaaccatttgatttagaatgtatgcagctctcatgtttgtagtaataaagtttcatttttcctaagt

SEQ ID NO: 202804 - DNA, 501 bp, Homo sapiens
  Payload ID: 20001
  Gene Name: zinc finger protein 528
  ENST ID: ENST00000448954
  CDS Start-End: 1-256
tttatacagggacgtgatgttggagaattataggaacctggtctccctgggaatctgtcttcctgacctgagtgttacctccatgttagagcaaaagagagatccctggactctgcagagtgaagagaaaatagcaaacgatccagacggcagggagtgcatcaaaggtgtgaacacagattccccactgctccaatgcatcacctcagttccttgtgttttctgcactgccagcatgatacacacaataccctgatactcctaccaatgtctgagtcagagaggagctctaaattgggaagtaatgcaggaaacaagccttgtaaaaatcaacttggattcacttttcagttacatctgagtgatctacagctatttcaagctgaaaggaaaatttctgggtgtaagcattttgaaaaacccgtcagtgacaattcctcagtttcaccgcttgaaaaaatttcttccagtgtcaaatcccaccttttaaataaatataga

SEQ ID NO: 202805 - DNA, 465 bp, Homo sapiens
  Payload ID: 20001
  Gene Name: zinc finger protein 528
  ENST ID: ENST00000436397
  CDS Start-End: 423-465
agccgattgcagggagaaactgttttcgcagcagcctcccttttccagccaccggttctcctgaccccgagtgtggggggtgacttcagtctcctgacatccagtgttctctcgagccagtttccagcccacagaaaatgagctcttccggaagtgggcatcttattccaatcccctccctgtgaatgtgtggagaaaaagagatgggaacgaggcagaggaaatagagaaattttgaaagagaaatgaagaatgagagacccattaacagaaggcaaagtagaaggttcacaaattttaagaaagggagaataaagtgaaaaaaatctcagaaggaatccactcaacagacgaggattcacttccaaagagacatattatgcaaggaagcaacttggaagaggaaagaaaagaagtcaggaatggcccttactcagggacccttgaaattcatggatgtggcca

SEQ ID NO: 202806 - DNA, 590 bp, Homo sapiens
  Payload ID: 20001
  Gene Name: zinc finger protein 528
  ENST ID: ENST00000493272
  CDS Start-End: 566-590
gattgcagggagaaactgttttcgcagcagcctcccttttccagccaccggttctcctgaccccgagtgtggggggtgacttcagtctcctgacatccagtgttctctcgagccagtttccagcccacagaaaatgagctcttccggaagtgggcatcttattccaatcccctccctgtgaatgtgtggagaaaaagagatgggaacgaggcagaggaaatagagaaattttgaaagagaaatgaagaatgagagacccattaacagaaggcaaagtagaaggttcacaaattttaagaaagggagaataaagtgaaaaaaatctcagaaggaatccactcaacagacgaggattcacttccaaagagacatattatgcaaggaagcaacttggaagaggaaagaaaagaagtcaggaatggcccttactcagagtctcacacgttgcccaggctggagtgcagtggcatgatccctgctcattgcaacctccgcctccctgattcaaaggatttttccacctcagcttctcatgtagctgagattacagggacccttgaaattcatggatgtggccatagagttctctc

SEQ ID NO: 202807 - DNA, 579 bp, Homo sapiens
  Payload ID: 20001
  Gene Name: zinc finger protein 528
  ENST ID: ENST00000494167
  CDS Start-End: 570-579
gattgcagggagaaactgttttcgcagcagtgcgcctcccttttccagccaccggttctcctgaccccgagtgtggggggtgacttcagtctcctgacatccagtgttctctcgagccagtttccagcccacagaaaatgagctcttccggaagtgggcatcttattccaatcccctccctgtgaatgtgtggagaaaaagagatgggaacgaggcagaggaaatagagaaattttgaaagagaaatgaagaatgagagacccattaacagaaggcaaagtagaaggttcacaaattttaagaaagggagaataaagtgaaaaaaatctcagaaggaatccactcaacagacgaggattcacttccaaagagacatattatgcaaggaagcaacttggaagaggaaagaaaagaagtcaggaatggcccttactcagagtctcacacgttgcccaggctggagtgcagtggcatgatccctgctcattgcaacctccgcctccctgattcaaaggatttttccacctcagcttctcatgtagctgagattacagggacccttgaaattcatggatgtgg

SEQ ID NO: 202808 - DNA, 544 bp, Homo sapiens
  Payload ID: 20001
  Gene Name: zinc finger protein 528
  ENST ID: ENST00000594530
  CDS Start-End: 21-341
ggaaagaaaagaagtcaggaatggcccttactcagggacccttgaaattcatggatgtggccatagagttctctcaggaagagtggaaatgcctggaccctgcgcagaggactttatacagggacgtgatgttggagaattataggaacctggtctccctgggaatctgtcttcctgacctgagtgttacctccatgttagagcaaaagagagatccctggactctgcagagtgaagagaaaatagcaaacgatccagacggcagggagtgcatcaaaggtgtgaacacaggtgagagctcgggtgggcagagtggaggccccataatttttgttttttgagacagggtctaacgctgtcatccaggctagagtgcggtggcaatcatagctcactgcagccttgaattcctggacttaagggatctccctggctcgctcttccaaagtgttgggattacagccatgagccactgtaccctgcaaagccacactattacatagcgtttgggaaactctctgcaaatgggagaattctgtgggaa

SEQ ID NO: 202809 - DNA, 625 bp, Homo sapiens
  Payload ID: 20001
  Gene Name: zinc finger protein 528
  ENST ID: ENST00000598192
  CDS Start-End: 68-343
gattcacttccaaagagacatattatgcaaggaagcaacttggaagaggaaagaaaagaagtcaggaatggcccttactcagggacccttgaaattcatggatgtggccatagagttctctcaggaagagtggaaatgcctggaccctgcgcagaggactttatacagggacgtgatgttggagaattataggaacctggtctccctgggaatctgtcttcctgacctgagtgttacctccatgttagagcaaaagagagatccctggactctgcagagtgaagagaaaatagcaaacgatccagacggcagggagtgcatcaaaggtgtgaacacaggctgatctcggctcactacagcctctgcctctctggtccaagtgattctcctgcctcagcctcctgagtagctgggattacaggcgcccatccccacccctggctaatttttgtatttttagtagaaacaggtttttgccatatttgccaggctgctctccaactcctgacctcaagtgatccacctgcctcggcctcccaaagtgctgggattacaggtgtgccactgtacctggcctgattgtgtcttttaaattgtaggaaagaattaaaagtcaagttacaaa

SEQ ID NO: 202810 - DNA, 5238 bp, Homo sapiens
  Payload ID: 20002
  Gene Name: zinc finger protein 529
  ENST ID: ENST00000334116
  CDS Start-End: 612-1988
ttattgagttaagcctggcgagtcgaggtgacccgggccgggctgcgggaggagctcgcggtgaggtggccccgcgctgccgggcgaggtcggtccacgtggagccgggagcctgaggcctctgtacgcgggagctgcggacgatggtgttctgcaagtgaaggccccctgaagtggaagacagcattggtactaatggccaactcaagtttcattggggatcatgtccatggagctcctcatgctgtcatgccagaagtggaattccctgaccaattctttacagttctaaccatggaccatgaactggtgacactcagggatgtggtcatcaacttctctcaggaggaatgggaatatctggattctgctcagaggaacttgtactgggatgtgatgatggagaactacagcaacttactctcactgggtctacattgagacagatatcggtacaatggtgaccaagaccaatacagaccctgctctcatggaattgacatactagttcttgagatgtataataaacaaatttggagtccaggaatgagactaagcatttatctgtaggaaaagatattattcaaaacactggttctcagtgggaggtaatggaaagtagcaagttatgtggccttgaaggttccattttcagaaatgactggcaaagcaaaagcaagattgacttacaaggacctgaagtgggatatttcagtcaaatgaaaatcatctctgaaaatgtgcccagttacaaaactcatgaatctcttactttacctcggagaactcatgacagtgagaagccctatgaatacaaggaatatgagaaggtcttcagttgtgacttagagtttgatgaatatcagaaaatacatactggtggaaaaaactatgaatgtaatcaatgttggaaaacctttgggatagataactccagtatgttacaactgaatattcatactggtgtgaaaccttgtaaatatatggaatatgggaatacatgtagtttttataaagactttaatgtataccagaaaattcataatgagaagttctataaatgtaaggaatacagaaggacctttgaaagagttggaaaagttactccacttcaaagagttcatgatggtgagaaacactttgaatgctcattctgtgggaaatcctttagagtgcatgcacaacttactcgacatcagaaaatccatactgatgagaaaacttacaaatgtatggaatgtggcaaggacttcagatttcattcacagcttaccgaacatcagagaattcatactggtgagaaaccctacaaatgtatgcactgtgagaaggtttttagaattagttcacagctcattgaacatcagagaattcacactggtgagaaaccttatgcatgtaaggaatgtgggaaggcttttggagtatgtagagaacttgctcgtcatcagagaattcatactggtaagaaaccctatgaatgcaaagcatgtggaaaggtctttagaaatagttcatccctgactagacatcagaggattcatactggtgaaaaaccctataaatgtaaagaatgtgagaaagcatttggagtaggtagtgaacttactcgacatgaaagaattcacagtggtcaaaaaccttatgaatgtaaggagtgtggaaagttctttagacttacgtcagcccttattcaacatcaaagaattcatagtggtgagaaaccttatgaatgtaaggtatgtgggaaggcctttagacatagttcagcccttacagaacatcagagaattcatactggagaaaaaccctatgaatgcaaggcatgtgggaaggcctttagacatagttcatcctttaccaaacatcagcgcattcatactgatgataaaccctatgaatgtaaggagtgtgggaattcctttagtgttgttgggcatcttacttgccaaccgaaaatttacactggtgagaaatcatttgactgaaataaatgtataaagtggttttttatttctgattttcacaggaaaatactgtggatggatttaataggtaatcaaggcaattcagtatctccctctcttaaagtctgtttttagacttcatggtcattctgtatgtagacgtagaattgcttagtcatagctgatatatacttatagctttgttagatgttgccaaatatttctcctttttatgttaaaaagtttttttcatgagtttctcatcctggcatgttttgtttacaatagcttttgatgtttgtattattgctcttttgactattcagttttttaattgtaatattacttcaatatcttttctgcattgtaattctttgcttgtgatatctatacttacttattttcctccacagagttagcactcctagtcagatacaatgtatttttacagtcttacagctcatcattttgtgtaatgttgttttgttttgttttaaatgatagaagtgtgatctcctttccattttcatccaattgttgacttctctttaaatttctactttattttgatacaacatattccccccaaaaaaacacatacataggaactggttatattccaccataacacacacacacacacacacacactatatacatatagtgtatatacacatatagtgtatatagtgtatgtgtgatgtatactatacatatcacatatactatatgtgtgtatatagtgtgtgatgtatatgtgtgtgatgtatactatatatgcccacacatgcactacataacacactatatatatatatatatatacacacacacacacacaatatatgtatatatagtatatacactatatactgggcactatatatatatagtgtgtatgtgtgttatattggaatataaccagttcctttaagcagtctttttacctgcaggctataccaaccaggatccaaatgaagagaactcttttaaatatttgataaaactactcacccagtaagtctcttaaaatttatcattctcttaaagtatcactctaaaatttgtcaaacacctttaaaaggggagaaaaaatgaccactgaacttacattaagagaatttacaactatatattaacatggcttcaattgtttttttaatctattatcattatttttctttttattccctctcagagttgacttactaggtttgggcatttcaacaatcagcagaccttctttggtttaactaatctcatttaactccaaaatcatctctctcttaggactgctgacttggttatgcagtcaatgagatcacgagccactggttattggattttttttctttttttttagacagagttttgctcttgttgcctaggctggagtgcagtggcgcagtcttggctcacctcaacctctgcctcccaggttcaggctattctcctgctcagcctcctgattagctgggattacaggcatgcgccaccatgaccggctaattttatatttttagtagagacgggatatctccgtgttggtcagtctggtctcaaactcccgacctcaggtgatccacccgcctcagcctcccaaagtgctgggattacaggcatgagccaccgcacccagcctggttattggatttatttatttattttgagatagagccttgctctgtcaccaggccggagtgcagtggtgtcatctcagatcactgcaacctccacctcccaggttcaagcgattcccctgcctcagcctgccaagtagctgggattacaggcatgcgccaccatgcccagctaattgtattttagtagatatggagtttcaccacgttggccaagacagtctcgatttcctgaccttgtgatccccctgcctcggcctcccaaagtgctgggattacaggcatgagccaccacgcctgtccggttatttgatttttataagaaaattttactattattttcagataaatttatgtcactgtcattcattacattttaatttttgaaactgatgtctttcccagaatttatgtactctataacggtgtgaatgattaccagtattaagccattttctcatctgatatattgagctatgttttatgtaagtattgcttattcaagtagttttaaaagatatgtaattggttgttgtttcatgtcctacacagtaagaacaagagtatgttaacctttttgtcaggatatttgctatttcatatctttgaaatagagtagtagctctatttctaactaaattctatttatgtaacaacacagctaatttactcttggatctcattctccctttttatcctgagttaccatcagtgctaatgttcctcttttgggtatagttctccaggagaacttgtcctatatttctttgtgtgtgtttttttccttccagcttaaacaaattaaaactaaatatctaaaccttgtatacagacattaaaattagtgagagaaacaaaatatccttgtgtcttggcttttactttttgaagtcattaacaaataataaattaatgaataaaatgtgtccttattatgttttccttgtttgtagttacagctatatttttatcatattaacatttttcacttaacttcgtaatgaacttatggcatttcacacttactcgaaaccataatataattattattggtggtattactgtttggtttttactatttttactcaaaaacataaaacttcaccattctttccattttcatttgcccctttattctttctgacttttctctaagcctgcataggagctttattctcatattcaataggataggatattgcagtctcatcctgttttctgctgtcctgcaccattaaattttatatgtccttgaaggaattcaatttaatggcaactaatatatgtatgttagggacaggtaaagagtctgtgactgagatttctggagttatataacccctgcgccaccccccaccccaactccaacttgccagaattcaccccttaacctgcaatgtgattgtatttggacatagggcaatgaggacataagaatgtgattctaatttgatacaaatggtgatcttatgagaagaggaaggagagacgtctcttcctatgctcacacacaaaggaaagtccacatgaggacacaaggagaagccaagagagcccttaccaggaattaaacctgctaatccctattttaattagaacagtgagaaaataaatatctgtatttaagcctc

SEQ ID NO: 202811 - DNA, 4331 bp, Homo sapiens
  Payload ID: 20002
  Gene Name: zinc finger protein 529
  Uniprot ID: Q6P280
  ENST ID: ENST00000591340
  CDS Start-End: 160-1851
gccgggctgcgggaggagctcgcggtgaggtggccccgcgctgccgggcgaggtcggtccacgtggagccgggagcctgaggcctctgtacgcgggagctgcggacgatggtgttctgcaagtgaaggccccctgaagtggaagacagcattggtactaatggccaactcaagtttcattggggatcatgtccatggagctcctcatgctgtcatgccagaagtggaattccctgaccaattctttacagttctaaccatggaccatgaactggtgacactcagggatgtggtcatcaacttctctcaggaggaatgggaatatctggattctgctcagaggaacttgtactgggatgtgatgatggagaactacagcaacttactctcactggatttggagtccaggaatgagactaagcatttatctgtaggaaaagatattattcaaaacactggttctcagtgggaggtaatggaaagtagcaagttatgtggccttgaaggttccattttcagaaatgactggcaaagcaaaagcaagattgacttacaaggacctgaagtgggatatttcagtcaaatgaaaatcatctctgaaaatgtgcccagttacaaaactcatgaatctcttactttacctcggagaactcatgacagtgagaagccctatgaatacaaggaatatgagaaggtcttcagttgtgacttagagtttgatgaatatcagaaaatacatactggtggaaaaaactatgaatgtaatcaatgttggaaaacctttgggatagataactccagtatgttacaactgaatattcatactggtgtgaaaccttgtaaatatatggaatatgggaatacatgtagtttttataaagactttaatgtataccagaaaattcataatgagaagttctataaatgtaaggaatacagaaggacctttgaaagagttggaaaagttactccacttcaaagagttcatgatggtgagaaacactttgaatgctcattctgtgggaaatcctttagagtgcatgcacaacttactcgacatcagaaaatccatactgatgagaaaacttacaaatgtatggaatgtggcaaggacttcagatttcattcacagcttaccgaacatcagagaattcatactggtgagaaaccctacaaatgtatgcactgtgagaaggtttttagaattagttcacagctcattgaacatcagagaattcacactggtgagaaaccttatgcatgtaaggaatgtgggaaggcttttggagtatgtagagaacttgctcgtcatcagagaattcatactggtaagaaaccctatgaatgcaaagcatgtggaaaggtctttagaaatagttcatccctgactagacatcagaggattcatactggtgaaaaaccctataaatgtaaagaatgtgagaaagcatttggagtaggtagtgaacttactcgacatgaaagaattcacagtggtcaaaaaccttatgaatgtaaggagtgtggaaagttctttagacttacgtcagcccttattcaacatcaaagaattcatagtggtgagaaaccttatgaatgtaaggtatgtgggaaggcctttagacatagttcagcccttacagaacatcagagaattcatactggagaaaaaccctatgaatgcaaggcatgtgggaaggcctttagacatagttcatcctttaccaaacatcagcgcattcatactgatgataaaccctatgaatgtaaggagtgtgggaattcctttagtgttgttgggcatcttacttgccaaccgaaaatttacactggtgagaaatcatttgactgaaataaatgtataaagtggttttttatttctgattttcacaggaaaatactgtggatggatttaataggtaatcaaggcaattcagtatctccctctcttaaagtctgtttttagacttcatggtcattctgtatgtagacgtagaattgcttagtcatagctgatatatacttatagctttgttagatgttgccaaatatttctcctttttatgttaaaaagtttttttcatgagtttctcatcctggcatgttttgtttacaatagcttttgatgtttgtattattgctcttttgactattcagttttttaattgtaatattacttcaatatcttttctgcattgtaattctttgcttgtgatatctatacttacttattttcctccacagagttagcactcctagtcagatacaatgtatttttacagtcttacagctcatcattttgtgtaatgttgttttgttttgttttaaatgatagaagtgtgatctcctttccattttcatccaattgttgacttctctttaaatttctactttattttgatacaacatattccccccaaaaaaacacatacataggaactggttatattccaccataacacacacacacacacacacacactatatacatatagtgtatatacacatatagtgtatatagtgtatgtgtgatgtatactatacatatcacatatactatatgtgtgtatatagtgtgtgatgtatatgtgtgtgatgtatactatatatgcccacacatgcactacataacacactatatatatatatatatatacacacacacacacacaatatatgtatatatagtatatacactatatactgggcactatatatatatagtgtgtatgtgtgttatattggaatataaccagttcctttaagcagtctttttacctgcaggctataccaaccaggatccaaatgaagagaactcttttaaatatttgataaaactactcacccagtaagtctcttaaaatttatcattctcttaaagtatcactctaaaatttgtcaaacacctttaaaaggggagaaaaaatgaccactgaacttacattaagagaatttacaactatatattaacatggcttcaattgtttttttaatctattatcattatttttctttttattccctctcagagttgacttactaggtttgggcatttcaacaatcagcagaccttctttggtttaactaatctcatttaactccaaaatcatctctctcttaggactgctgacttggttatgcagtcaatgagatcacgagccactggttattggattttttttctttttttttagacagagttttgctcttgttgcctaggctggagtgcagtggcgcagtcttggctcacctcaacctctgcctcccaggttcaggctattctcctgctcagcctcctgattagctgggattacaggcatgcgccaccatgaccggctaattttatatttttagtagagacgggatatctccgtgttggtcagtctggtctcaaactcccgacctcaggtgatccacccgcctcagcctcccaaagtgctgggattacaggcatgagccaccgcacccagcctggttattggatttatttatttattttgagatagagccttgctctgtcaccaggccggagtgcagtggtgtcatctcagatcactgcaacctccacctcccaggttcaagcgattcccctgcctcagcctgccaagtagctgggattacaggcatgcgccaccatgcccagctaattgtattttagtagatatggagtttcaccacgttggccaagacagtctcgatttcctgaccttgtgatccccctgcctcggcctcccaaagtgctgggattacaggcatgagccaccacgcctgtccggttatttgatttttataagaaaattttactattattttcagataaatttatgtcactgtcattcattacattttaatttttgaaactgatgtctttcccagaatttatgtactctataacggtgtgaatgattaccagtattaagccattttctcatctgatatattgagctatgttttatgtaagtattgcttattcaagtagttttaaaagatatgtaattggttgttgtttcatgtcctacacagtaagaacaagagtatgttaacctttttgtcaggatatttgctatttcatatctttgaaatagagtagtagctctatttctaactaaattctatttatgtaacaacacagctaatttactcttggatctcattctccctttttatcctgagttaccatcagtgctaatgttcctcttttgggtatagttctccaggagaacttgtcctatatttctttgtgtgtgtttttttccttccagcttaaacaaattaaaactaaatatctaaaccttgtatacagacattaaaattagtgagagaaacaaaata

SEQ ID NO: 202812 - DNA, 587 bp, Homo sapiens
  Payload ID: 20002
  Gene Name: zinc finger protein 529
  ENST ID: ENST00000586115
  CDS Start-End: 332-587
gtctccggggcggcccgttagtcgccgcgcggtgctagctgccggcgctcccctccgtttgcacccacggccgccctattgcggctggcactacgcttctgccaggaccccggctcccttttccgttgacctggtgttcgttttccatgtgttgctgagagatggatgttaaaaatcaacaccaggactacagtaaggctgaaatcattgaagtgcttggagtgcagaactgaaagaggaactggtgacactcagggatgtggtcatcaacttctctcaggaggaatgggaatatctggattctgctcagaggaacttgtactgggatgtgatgatggagaactacagcaacttactctcactggatttggagtccaggaatgagactaagcatttatctgtaggaaaagatattattcaaaacactggttctcagtgggaggtaatggaaagtagcaagttatgtggccttgaaggttccattttcagaaatgactggcaaagcaaaagcaagattgacttacaaggacctgaagtgggatatttcagtcaaatgaaaatcatctctgaaaatgtgcccagttaca

SEQ ID NO: 202813 - DNA, 395 bp, Homo sapiens
  Payload ID: 20002
  Gene Name: zinc finger protein 529
  ENST ID: ENST00000452073
  CDS Start-End: 1-338
gagttggaaaagttactccacttcaaagagttcatgatggtgagaaacactttgaatgctcattctgtgggaaatcctttagagtgcatgcacaacttactcgacatcagaaaatccatactgatgagaaaacttacaaatgtatggaatgtggcaaggacttcagatttcattcacagcttaccgaacatcagagaattcatactgggaggctgaacaatctactgttggaggaagctgagaagaccatggaagggaaatggaagctgctcacatattccttccctcatgcaggtgtccatctttacctaagattcagttgtaggaagaagtcttaattttaaacagttcagagtactaattattgtaatataccaggtatttcatttagcaaa

SEQ ID NO: 202814 - DNA, 535 bp, Homo sapiens
  Payload ID: 20002
  Gene Name: zinc finger protein 529
  ENST ID: ENST00000585960
  CDS Start-End: 260-535
agtcgccgcgcggtgctagctgccggcgctcccctccgtttgcacccacggccgccctattgcggctggcactacgcttctgccaggaccccggctcccttttccgttgacctggtgttcgttttccatgtgttgctgagagatggatgttaaaaatcaacaccaggactacagtaaggctgaaatcattgaagtgcttggagtgcagaactgaaagagtttcattggggatcatgtccatggagctcctcatgctgtcatgccagaagtggaattccctgaccaattctttacagttctaaccatggaccatgaactggtgacactcagggatgtggtcatcaacttctctcaggaggaatgggaatatctggattctgctcagaggaacttgtactgggatgtgatgatggagaactacagcaacttactctcactggatttggagtccaggaatgagactaagcatttatctgtaggaaaagatattattcaaaacactggttctcagtgggaggtaatggaaagtagcaag

SEQ ID NO: 202815 - DNA, 419 bp, Homo sapiens
  Payload ID: 20002
  Gene Name: zinc finger protein 529
  ENST ID: ENST00000590656
  CDS Start-End: 1-219
gagaaggtttttagaattagttcacagctcattgaacatcagagaattcacactggtgagaaaccttatgcatgtaaggaatgtgggaaggcttttggagtatgtagagaacttgctcgtcatcagagaattcatactggctataccaaccaggatccaaatgaagagaactcttttaaatatttgataaaactactcacccaggcaatgaggacataagaatgtgattctaatttgatacaaatggtgatcttatgagaagaggaaggagagacgtctcttcctatgctcacacacaaaggaaagtccacatgaggacacaaggagaagccaagagagcccttaccaggaattaaacctgctaatccctattttaattagaacagtgagaaaataaatatctgtatttaagcctcaca

SEQ ID NO: 202816 - DNA, 582 bp, Homo sapiens
  Payload ID: 20002
  Gene Name: zinc finger protein 529
  ENST ID: ENST00000585983
  CDS Start-End: 252-582
gctagctgccggcgctcccctccgtttgcacccacggccgccctattgcggctggcactacgcttctgccaggaccccggctcccttttccgttgacctggtgttcgttttccatgtgttgctgagagatggatgttaaaaatcaacaccaggactacagtaaggctgaaatcattgaagtgcttggagtgcagaactgaaagagttctgcaagtgaaggccccctgaagtggaagacagcattggtactaatggccaactcaagtttcattggggatcatgtccatggagctcctcatgctgtcatgccagaagtggaattccctgaccaattctttacagttctaaccatggaccatgaactggtgacactcagggatgtggtcatcaacttctctcaggaggaatgggaatatctggattctgctcagaggaacttgtactgggatgtgatgatggagaactacagcaacttactctcactggatttggagtccaggaatgagactaagcatttatctgtaggaaaagatattattcaaaacactggttctcagtgggaggtaatggaaagtagcaagt

SEQ ID NO: 202817 - DNA, 2962 bp, Homo sapiens
  Payload ID: 20003
  Gene Name: zinc finger protein 530
  Uniprot ID: Q6P9A1
  ENST ID: ENST00000332854
  CDS Start-End: 221-2020
ggaacttccggcgtcctccctgtggcgggcactttggcttgtgtcagttccatccgcgggtgccggatctggacctaggtgctgacagcgagaaggcgcgaggagagtcgttttctcagctgcacagccggggcctgacggtcgccggcggtggtgacagctttgctcttgtctccgcccggatcgtccaccgctcccggcccgctccgcccagagtccgatggcggcggcactgagggccccgacccagcaggtttttgtagcctttgaggatgtggccatttacttctcccaggaggagtgggagctccttgatgagatgcagaggctcctgtaccgcgatgtgatgctggagaactttgcagttatggcatccctaggttgctggtgtggagcagtagatgaggggacgccttctgcagagagcgtttctgtggaagaactgtcacagggcaggactccaaaggcagatacatccactgataagagtcacccctgtgagatttgtaccccagtcctgagagacattttacaaatgattgagctccatgcctcaccctgtggacagaaattgtacttgggtggagcatcaagagatttctggatgagttcaaaccttcaccagctccagaagcttgataatggagagaagctctttaaagtggatggggaccaggcctcatttatgatgaactgcaggttccatgtgtcaggaaaacccttcacgtttggggaagtcgggagggacttttcagccacctcaggacttctccagcatcaggtgactcccaccattgagagaccacacagcaggattagacacttgagagttcccactggacgaaagcctctcaaatacactgaatccaggaaatcttttagagagaaatctgtattcattcaacaccaaagagctgactctggagaaaggccttacaagtgcagtgaatgtgggaaatcctttagtcaaagttctggctttcttcgacacaggaaagcacacggtagaacaaggactcatgaatgtagtgaatgtgggaaatcatttagtcgcaaaactcacctaactcaacaccaaagagttcacactggagaaaggccttatgactgcagtgaatgtggcaaatcctttcgccaggtatctgtcctcattcaacatcaacgagttcacactggagaaaggccttatgagtgcagtgaatgtgggaaatcttttagccacagcactaacctctatcgtcacaggagtgcccacactagcacaaggccttatgagtgcagtgaatgtggaaaatcctttagccatagcactaacctctttcgacactggagagttcacactggagtaaggccttatgagtgtagtgaatgtgggaaagcatttagttgcaatatctaccttattcaccaccaaagatttcacactggagaaagaccttatgtgtgcagtgaatgtgggaaatcatttggccagaaatctgtcctcattcaacaccaaagagttcacactggagaaaggccttatgagtgcagtgaatgtgggaaagtttttagccaaagctctggcctctttcgacacagaagagctcacactaaaacaaagccttatgagtgcagtgaatgtgaaaaatcatttagttgcaaaactgacctcattcgacaccagacagttcacactggagaaaggccttatgagtgcagtgtatgtgggaaatcttttatccgaaaaacccacctcattcgacaccagactgttcacactaatgaaaggccttatgagtgcgatgaatgtgggaaatcctatagccaaagctctgccctccttcagcataggagagttcacactggagaaaggccttatgagtgcagagaatgtgggaaatcttttacccgcaaaaatcacctcattcaacacaagacagttcacactggagaaaggccttatgaatgcagtgaatgtggaaaatcctttagccaaagctctggcctcttaagacacagaagagttcatgtgcagtgaatgtgggaaattattttgtcacttttttttttttttttgagatggaattttgctcgtcacccaggctggagtgcaattgtgcaatctcagctcactgcaacctccgcctcctgggatcaagtgattctcctgccacagcctcctgagtacctgagattacaggcacccaccaccatgcccagctaatttttgtatttttaatagaaacaaggtttcaccatgttggtcaggctggtgttgaactcctgacctcaggtaatccacctgcttcagcctaccaaagtgctgggattacaggcgtgagccaccatgtccggcttgtgttgtgacatttaacacaagatttcccaaagaagaaaggccttatatatgctgtgaatgtgtttttgcttgttagtttgttttaacttggtatgacggcactggaggctagcctttgagaagagccttctctgatgtgactcatgtatccaaacatccatggatttcccataaatttgaggtatgtgggaagcatgtgtagctatgttgtactctctaaacctgcccagggaccttaccagattcgtgtcactgccagtttctgcggctgaagccttttcatcactacccgctgggagacccacagagtgtgcatcagtcaccaccccaacatgctcagggaggcagagttcttccattagttggaggaaagcacgagtagtctaagctcttaggggggtttctcatttcctcctgtggctacatagtgcatataactaccccagtgttggccccaggacctgatctgagttctgctggcagcttccagaggattgccttttttgaggacattgttgatctcaggcgatgcttgtgatgaagcattttttagcttccaccacttaccaggaactgcctgttaactggcttgtgcaatgataaaggccttttgtttaagta

SEQ ID NO: 202818 - DNA, 634 bp, Homo sapiens
  Payload ID: 20003
  Gene Name: zinc finger protein 530
  ENST ID: ENST00000597864
  CDS Start-End: 354-440
cctgtggcgggcactttggcttgtgtcagttccatccgcgggtgccggatctggacctaggtgctgacagcgagaaggcgcgaggagagtcgttttctcagctgcacagccggggcctgacggtcgccggcggtggtgacagctttgctcttgtctccgcccggatcgtccaccgctcccggcccgctccgcccagagtccgatggcggcggcactgagggccccgacccagattgccactagtacttacaggtccgtaagaagcacttgaagaccctacaaggcaggtttttgtagcctttgaggatgtggccatttacttctcccaggaggagtgggagctccttgatgagatgcagaggctcctgtaccgcgatgtgatgctggagaactttgcagttatggcatccctaggtattattgagtgttttcaagaatgaaaagaggcctggcatggtggctcacatctgtaatcccaactttttgggaggctgaggtgggaggatcccttgagcccaagagtttgaggctgcagcaagctatgatcgtgccactacactccagcctgtgcaacacagtgagatcctgtctccaaaattaaataaataaataaaattacattttggagactaaa

SEQ ID NO: 202819 - DNA, 469 bp, Homo sapiens
  Payload ID: 20003
  Gene Name: zinc finger protein 530
  ENST ID: ENST00000597700
  CDS Start-End: 372-469
ggaacttccggcgtcctccctgtggcgggcactttggcttgtgtcagttccatccgcgggtgccggatctggacctaggtgctgacagcgagaaggcgcgaggagagtcgttttctcagctgcacagccggggcctgacggtcgccggcggtggtgacagctttgctcttgtctccgcccggatcgtccaccgctcccggcccgctccgcccagagtccgatggcggcggcactgagggccccgacccagattgccactagtacttacaggtccgtaagaagcacttgaagaccctacaaggcaggtttttgtagcctttgaggatgtggccatttacttctcccaggaggagtgggagctccttgatgagatgcagaggctcctgtaccgcgatgtgatgctggagaactttgcagttatggcatccctaggttgctggtgtggagcagtagatgaggggacgccttc

SEQ ID NO: 202820 - DNA, 2742 bp, Homo sapiens
  Payload ID: 20003
  Gene Name: zinc finger protein 530
  Uniprot ID: Q6P9A1
  ENST ID: ENST00000600619
  CDS Start-End: 221-2020
ggaacttccggcgtcctccctgtggcgggcactttggcttgtgtcagttccatccgcgggtgccggatctggacctaggtgctgacagcgagaaggcgcgaggagagtcgttttctcagctgcacagccggggcctgacggtcgccggcggtggtgacagctttgctcttgtctccgcccggatcgtccaccgctcccggcccgctccgcccagagtccgatggcggcggcactgagggccccgacccagcaggtttttgtagcctttgaggatgtggccatttacttctcccaggaggagtgggagctccttgatgagatgcagaggctcctgtaccgcgatgtgatgctggagaactttgcagttatggcatccctaggttgctggtgtggagcagtagatgaggggacgccttctgcagagagcgtttctgtggaagaactgtcacagggcaggactccaaaggcagatacatccactgataagagtcacccctgtgagatttgtaccccagtcctgagagacattttacaaatgattgagctccatgcctcaccctgtggacagaaattgtacttgggtggagcatcaagagatttctggatgagttcaaaccttcaccagctccagaagcttgataatggagagaagctctttaaagtggatggggaccaggcctcatttatgatgaactgcaggttccatgtgtcaggaaaacccttcacgtttggggaagtcgggagggacttttcagccacctcaggacttctccagcatcaggtgactcccaccattgagagaccacacagcaggattagacacttgagagttcccactggacgaaagcctctcaaatacactgaatccaggaaatcttttagagagaaatctgtattcattcaacaccaaagagctgactctggagaaaggccttacaagtgcagtgaatgtgggaaatcctttagtcaaagttctggctttcttcgacacaggaaagcacacggtagaacaaggactcatgaatgtagtgaatgtgggaaatcatttagtcgcaaaactcacctaactcaacaccaaagagttcacactggagaaaggccttatgactgcagtgaatgtggcaaatcctttcgccaggtatctgtcctcattcaacatcaacgagttcacactggagaaaggccttatgagtgcagtgaatgtgggaaatcttttagccacagcactaacctctatcgtcacaggagtgcccacactagcacaaggccttatgagtgcagtgaatgtggaaaatcctttagccatagcactaacctctttcgacactggagagttcacactggagtaaggccttatgagtgtagtgaatgtgggaaagcatttagttgcaatatctaccttattcaccaccaaagatttcacactggagaaagaccttatgtgtgcagtgaatgtgggaaatcatttggccagaaatctgtcctcattcaacaccaaagagttcacactggagaaaggccttatgagtgcagtgaatgtgggaaagtttttagccaaagctctggcctctttcgacacagaagagctcacactaaaacaaagccttatgagtgcagtgaatgtgaaaaatcatttagttgcaaaactgacctcattcgacaccagacagttcacactggagaaaggccttatgagtgcagtgtatgtgggaaatcttttatccgaaaaacccacctcattcgacaccagactgttcacactaatgaaaggccttatgagtgcgatgaatgtgggaaatcctatagccaaagctctgccctccttcagcataggagagttcacactggagaaaggccttatgagtgcagagaatgtgggaaatcttttacccgcaaaaatcacctcattcaacacaagacagttcacactggagaaaggccttatgaatgcagtgaatgtggaaaatcctttagccaaagctctggcctcttaagacacagaagagttcatgtgcagtgaatgtgggaaattattttgtcacttttttttttttttttgagatggaattttgctcgtcacccaggctggagtgcaattgtgcaatctcagctcactgcaacctccgcctcctgggatcaagtgattctcctgccacagcctcctgagtacctgagattacaggcacccaccaccatgcccagctaatttttgtatttttaatagaaacaaggtttcaccatgttggtcaggctggtgttgaactcctgacctcaggtaatccacctgcttcagcctaccaaagtgctgggattacaggcgtgagccaccatgtccggcttgtgttgtgacatttaacacaagatttcccaaagaagaaaggccttatatatgctgtgaatgtgtttttgcttgttagtttgttttaacttggtatgacggcactggaggctagcctttgagaagagccttctctgatgtgactcatgtatccaaacatccatggatttcccataaatttgaggtattattgagtgttttcaagaatgaaaagaggcctggcatggtggctcacatctgtaatcccaactttttgggaggctgaggtgggaggatcccttgagcccaagagtttgaggctgcagcaagctatgatcgtgccactacactccagcctgtgcaacacagtgagatcctgtctccaaaattaaataaataaataaaattacattttggagactaaa

SEQ ID NO: 202821 - DNA, 6696 bp, Homo sapiens
  Payload ID: 20004
  Gene Name: zinc finger protein 532
  Uniprot ID: Q9HCE3
  ENST ID: ENST00000336078
  CDS Start-End: 777-4682
tctcgcccttgcacgggtcacgattatacaccttcgtgacctttagcgggcttacatatgtatctttttgtgttccgcaggctatgaccacctgctgtatgtacaatatgtgcttgttacatttgtacaccatctcccttctagaatttaaagacctagctattacatcttgtttactcaatatcattcccccattaaggaaaaaaaaaaacctacatgaactgaacatgccatgtttcaatctggccccagtggctttttctctgaaagcaaacgtgtgtcttttacaccagggctttctccccaccccagggggtgtcttccatccttttgtggctcagttgaaggcgaaaagggctccaaaccactaactaaccagaggagagccccttcttccacctccagggagaatttcagatttaatttgtccgaagatagcgtgctctcttcttactcatttgccatcattacgaggaaaacaaaccaccaccttggcttcaagatcctgggtagaggctcacggtcttttcaaccatctttggcgaggccttgcttccttccactcgaggtatgttctgtcttgtgctttttcttttagaagctactaaagggtgttggggatgcttctgactattatgaaggccaaaaggcctgttgactggggctgcttttaaccctttcctatttgctgagaatgcagccgtgtgacagtaactg[450 bp omitted]cgatctccagtgctgaagagtttgatgacgacgagaagattgaggtggatgacccccctgacaaggaggacatgcgatcaagcttcaggtcgaatgtgttgacggggtcggctccccagcaggactacgataagctgaaggcactcggaggggaaaactccagcaaaactggactctctacgtcaggcaatgtggagaaaaacaaagctgttaagagagaaacagaagccagttctataaacctgagtgtttatgaaccttttaaagtcagaaaagcagaggataaattgaaggaaagctctgacaaggtgctggaaaacagagtcctagatgggaagctgagctccgagaagaatgacaccagcctccccagcgttgcgccatcaaagacaaagtcgtcctccaagctctcgtcctgcatcgctgccatcgcggctctcagcgctaaaaaggcggcttcagactcctgcaaagaaccagtggccaattcgagggaatcctccccgttaccaaaagaagtaaatgacagtccgagagccgctgacaagtctcctgaatcccagaatctcatcgacgggaccaaaaaaccatccctgaagcaaccggatagtcccagaagcatctcaagtgagaacagcagcaaaggatccccgtcctctcccgcagggtccacaccagcaatccccaaagtccgcataaaaaccattaagacatcttctggggaaatcaagagaacagtgaccagggtattgccagaagtggatcttgactctggaaagaaaccttccgagcagacagcgtccgtgatggcctctgtgacatcccttctgtcgtctccagcatcagccgccgtcctttcctctccccccagggcgcctctccagtctgcggtcgtgaccaatgcagtttcccctgcagagctcacccccaaacaggtcacaatcaagcctgtggctactgctttcctcccagtgtctgctgtgaagacggcaggatcccaagtcattaatttgaagctcgctaacaacaccacggtgaaagccacggtcatatctgctgcctctgtccagagtgccagcagcgccatcattaaagctgccaacgccatccagcagcaaactgtcgtggtgccggcatccagcctggccaatgccaaactcgtgccaaagactgtgcaccttgccaaccttaaccttttgcctcagggtgcccaggccacctctgaactccgccaagtgctaaccaaacctcagcaacaaataaagcaggcaataatcaatgcagcagcctcgcaaccccccaaaaaggtgtctcgagtccaggtggtgtcgtccttgcagagttctgtggtggaagctttcaacaaggtgctgagcagtgtcaatccagtccctgtttacatcccaaacctcagtcctcccgccaatgcagggatcacgttaccgacgcgtgggtacaagtgcttggagtgtggggactcctttgcacttgaaaagagtctgacccagcactacgacagacggagcgtgcgcatcgaagtaacgtgcaaccattgtacaaagaacctcgttttttacaacaaatgcagcctcctttcccatgcccgtgggcataaggagaaaggggtggtaatgcaatgctcccacttaattttaaagccagtcccagcagatcaaatgatagtttctccgtcaagcaatacttccacttcaacttccactcttcagagccctgtgggagctggcacacacactgtcacaaaaattcagtctggcataactgggacagtcatatcggctccttcaagcactcccatcaccccagccatgcccctagatgaagacccctccaaactgtgtagacatagtctaaaatgtttggagtgtaatgaagtcttccaggacgagacatcactggctacacatttccagcaggctgcagatacgagtggacaaaagacttgcactatctgccagatgctgcttcctaaccagtgcagttatgcatcacaccagagaatccatcagcacaaatctccctacacctgccctgagtgtggggccatctgcaggtcggtgcacttccagacccacgtcaccaagaactgtctgcactacacgaggagagttggttttcgatgtgtgcattgcaatgttgtgtactctgatgtggctgctctgaagtctcacattcaaggttctcactgtgaagtcttctacaagtgtcctatttgtccaatggcgtttaagtctgccccaagcacacattcccacgcctacacacagcatcctggcatcaagataggagaaccaaaaataatatataagtgttccatgtgcgacactgtgttcaccctgcaaaccttgctgtatcgccactttgaccaacacattgaaaaccagaaggtgtctgttttcaagtgtccagactgttctcttttatatgcacagaagcaacttatgatggaccatatcaagtctatgcatggaacattgaaaagtattgaagggcctccaaacttgggtataaacttgcctttgagcattaagcctgcaactcaaaattcagcaaatcagaacaaagaggacaccaaatccatgaatgggaaagagaaattggaaaagaaatctccatctcctgtgaaaaaatcaatggaaaccaagaaagtggccagtcctgggtggacgtgttgggagtgtgactgcctgttcatgcagagagatgtgtacatatcccacgtgaggaaggagcacgggaagcaaatgaagaaacacccctgccgccagtgtgacaagtctttcagctcgtcccacagcctgtgccggcacaaccggatcaagcacaaaggcatcaggaaagtgtacgcctgctcgcactgcccagactccagacgtacctttaccaaacgtttgatgctggagaagcacgtccagctgatgcatggcatcaaggaccctgacctgaaagaaatgacagatgccaccaatgaggaggaaacagaaataaaagaagacactaaggtccccagtcccaagcggaagttggaagaaccagttctggagttcaggcctccccgaggagcaatcactcaaccactgaaaaagctgaaaatcaatgtttttaaggttcacaagtgtgccgtgtgtggcttcaccaccgaaaacctgctgcaattccacgaacacatccctcagcacaaatcggatggttcttcctaccagtgccgggagtgtggcctctgctacacgtctcacgtctctctgtccaggcacctcttcatcgtacacaagttaaaggaacctcagccagtgtccaagcaaaatggggctggggaagataaccaacaggagaacaaacccagccacgaggatgaatcccctgatggcgccgtgtcagacagaaagtgcaaagtgtgcgcaaaaacttttgaaactgaagctgccttaaatactcacatgcggacacacggcatggccttcatcaaatccaaaaggatgagctcagccgagaaatagccacagatgctccatgaggaaaatccctgtccacattggaataaaaaagacatttttgttacaaagtttgcagtataatagagttaacagtactgtctaggctgttgcaatatattctctttcaatgtaccttccttcacctcgtcgtatatatcctcgataagtattaaaacagtatttgagtttaaaagagtttgtatatatttaaatgaataactttttatactctttgttacatgtttgtatcagtatttagtggaaaaccatttgagttgttttgggttagaatttttctttttgtactgtttctttaaaacagagttcttagtaacaggggcagttcctgaattcaaataaaccattttgtatgtttggattttgaatgggttaactaattacaggctaaaataatgccttttttagtgtttttaatttttagaattcactacataaattgtaagtaattgtgggtctcaaaaacactaggaacttttaagtgtcttagcacttcctcgatgtgcctgccctgagggagtgagttcacatttgagacaactgcactccagtgtggacgtgcctttgtcttcaggccatgccgaagggtgtttaaagcagtcttgcaggtcgctcctttcccagccgtggataaaaactgaagctaggaatctaataaggaatgctgatttcctcagttccattttgaggaatggggaaggctattctaaagaaaaaaatgggatttgttttctcggcagatctgcaaggctggctttaagagcacaaggagggaaagtaacgaaagggctggactactataaaagttacaaatacgtagttagaccaatagatttatatagtcaggtttttgtcatgtaatttattaactaactattacagaaacacagctaagaatatcaagtatttctctggctcttgacagaaaaaaatcagttgacttaaccctttgctgtcaaaagagttggcgtttcctgttctgggtgctactgccaaacgttatggtacttagagtcgggatgcacaacttcaaccaccgacttatcaatgcagccgcctgtgtattgcaattggccgttaccttaagcactgagccacccgggtttagttcagccatttcaagaagtatatttaacgtcggtagttctgctttattaaaatgcagcagaggtactcttctgtcccttccgtttatagttctctgagagagttctattttttggttttgttttgtgttttcttttgcattttgtatcttgtatttatccctgaacatgttttgtaccttttttttttttttttttaagaaaaggaattcttttgtgtatatatagatacttgcatgatatactgtagtcaatgttcggttcctcaaaaggtcttgctgctgtcaggtgttatgcactccatccatcataactgtatgaaacacatttcatatgtaaataaacgtgggacatttggcccttgtgcttctgtgagagaattattgatggtgggtctctgacatctttgtgaagtttgggaagtaattaattgcagcgacaagctacagggtgttgcagaattcttcccactcagaagaatggcatattcgttctcattagtaatcagctattttgtcactttcttgttgactccatcagtacatgggtacaatccgagggtgtgaatttcagcttgaaattccattgctgttccttgttttgtttgtattgctctaagttgtattcataatagcactttcatatgtttctgcatttgaaccttgcaataagcctgtgtggtaggccacataggtccgaataacctagttttacagttgagggagctgagctcagattcagttctttgccgaagccctcatagctggtaagtggctttgcatattagaacccaaatattttgctctctaaatctaatgctcgctctatgtggttatgtacatattgacaaatattcatttattcaacaaataaaaagtatgtacaaaacatga

SEQ ID NO: 202822 - DNA, 372 bp, Homo sapiens
  Payload ID: 20004
  Gene Name: zinc finger protein 532
  ENST ID: ENST00000586997
  CDS Start-End: 1-372
ccctccaaactgtgtagacatagtctaaaatgtttggagtgtaatgaagtcttccaggacgagacatcactggctacacatttccagcaggctgcagatacgagtggacaacaaatgaagaaacacccctgccgccagtgtgacaagtctttcagctcgtcccacagcctgtgccggcacaaccggatcaagcacaaaggcatcaggaaagtgtacgcctgctcgcactgcccagactccagacgtacctttaccaaacgtttgatgctggagaagcacgtccagctgatgcatggcatcaaggaccctgacctgaaagaaatgacagatgccaccaatgaggaggaaacagaaataaaagaagacactaag

SEQ ID NO: 202823 - DNA, 676 bp, Homo sapiens
  Payload ID: 20004
  Gene Name: zinc finger protein 532
  ENST ID: ENST00000588601
  CDS Start-End: 396-676
gttcgctcgccgcccgggccgagccgccgccgccgccgccgcccggcccggcggcgaggccgctccaccgcacacgcacacacagaccccggcagcgggaacgcagatgacacgcccgtaacatggaagccgccgccgccgccgctccgacgacagcagcagcagccacagcagcagccgccggcggcgccgcgctgaacaaaggtcatccgagctgcggcccagacgcccgggcttgaccgccgcgaaggccaaccccgggaagggggcctgttgactggggctgcttttaaccctttcctatttgctgagaatgcagccgtgtgacagtaactg[340 bp omitted]

SEQ ID NO: 202824 - DNA, 4450 bp, Homo sapiens
  Payload ID: 20004
  Gene Name: zinc finger protein 532
  Uniprot ID: Q9HCE3
  ENST ID: ENST00000591230
  CDS Start-End: 355-4260
acagatgcgtttccagaggcctccgtgccccctctcccactggccctgccttcgccccccgccccctccccagacagccccagttttcttcccccgaggtgaagggatttggacttctccccccaggtgcttgaaagaagagaagggtatgttctgtcttgtgctttttcttttagaagctactaaagggtgttggggatgcttctgactattatgaaggccaaaaggcctgttgactggggctgcttttaaccctttcctatttgctgagaatgcagccgtgtgacagtaactg[450 bp omitted]cgatctccagtgctgaagagtttgatgacgacgagaagattgaggtggatgacccccctgacaaggaggacatgcgatcaagcttcaggtcgaatgtgttgacggggtcggctccccagcaggactacgataagctgaaggcactcggaggggaaaactccagcaaaactggactctctacgtcaggcaatgtggagaaaaacaaagctgttaagagagaaacagaagccagttctataaacctgagtgtttatgaaccttttaaagtcagaaaagcagaggataaattgaaggaaagctctgacaaggtgctggaaaacagagtcctagatgggaagctgagctccgagaagaatgacaccagcctccccagcgttgcgccatcaaagacaaagtcgtcctccaagctctcgtcctgcatcgctgccatcgcggctctcagcgctaaaaaggcggcttcagactcctgcaaagaaccagtggccaattcgagggaatcctccccgttaccaaaagaagtaaatgacagtccgagagccgctgacaagtctcctgaatcccagaatctcatcgacgggaccaaaaaaccatccctgaagcaaccggatagtcccagaagcatctcaagtgagaacagcagcaaaggatccccgtcctctcccgcagggtccacaccagcaatccccaaagtccgcataaaaaccattaagacatcttctggggaaatcaagagaacagtgaccagggtattgccagaagtggatcttgactctggaaagaaaccttccgagcagacagcgtccgtgatggcctctgtgacatcccttctgtcgtctccagcatcagccgccgtcctttcctctccccccagggcgcctctccagtctgcggtcgtgaccaatgcagtttcccctgcagagctcacccccaaacaggtcacaatcaagcctgtggctactgctttcctcccagtgtctgctgtgaagacggcaggatcccaagtcattaatttgaagctcgctaacaacaccacggtgaaagccacggtcatatctgctgcctctgtccagagtgccagcagcgccatcattaaagctgccaacgccatccagcagcaaactgtcgtggtgccggcatccagcctggccaatgccaaactcgtgccaaagactgtgcaccttgccaaccttaaccttttgcctcagggtgcccaggccacctctgaactccgccaagtgctaaccaaacctcagcaacaaataaagcaggcaataatcaatgcagcagcctcgcaaccccccaaaaaggtgtctcgagtccaggtggtgtcgtccttgcagagttctgtggtggaagctttcaacaaggtgctgagcagtgtcaatccagtccctgtttacatcccaaacctcagtcctcccgccaatgcagggatcacgttaccgacgcgtgggtacaagtgcttggagtgtggggactcctttgcacttgaaaagagtctgacccagcactacgacagacggagcgtgcgcatcgaagtaacgtgcaaccattgtacaaagaacctcgttttttacaacaaatgcagcctcctttcccatgcccgtgggcataaggagaaaggggtggtaatgcaatgctcccacttaattttaaagccagtcccagcagatcaaatgatagtttctccgtcaagcaatacttccacttcaacttccactcttcagagccctgtgggagctggcacacacactgtcacaaaaattcagtctggcataactgggacagtcatatcggctccttcaagcactcccatcaccccagccatgcccctagatgaagacccctccaaactgtgtagacatagtctaaaatgtttggagtgtaatgaagtcttccaggacgagacatcactggctacacatttccagcaggctgcagatacgagtggacaaaagacttgcactatctgccagatgctgcttcctaaccagtgcagttatgcatcacaccagagaatccatcagcacaaatctccctacacctgccctgagtgtggggccatctgcaggtcggtgcacttccagacccacgtcaccaagaactgtctgcactacacgaggagagttggttttcgatgtgtgcattgcaatgttgtgtactctgatgtggctgctctgaagtctcacattcaaggttctcactgtgaagtcttctacaagtgtcctatttgtccaatggcgtttaagtctgccccaagcacacattcccacgcctacacacagcatcctggcatcaagataggagaaccaaaaataatatataagtgttccatgtgcgacactgtgttcaccctgcaaaccttgctgtatcgccactttgaccaacacattgaaaaccagaaggtgtctgttttcaagtgtccagactgttctcttttatatgcacagaagcaacttatgatggaccatatcaagtctatgcatggaacattgaaaagtattgaagggcctccaaacttgggtataaacttgcctttgagcattaagcctgcaactcaaaattcagcaaatcagaacaaagaggacaccaaatccatgaatgggaaagagaaattggaaaagaaatctccatctcctgtgaaaaaatcaatggaaaccaagaaagtggccagtcctgggtggacgtgttgggagtgtgactgcctgttcatgcagagagatgtgtacatatcccacgtgaggaaggagcacgggaagcaaatgaagaaacacccctgccgccagtgtgacaagtctttcagctcgtcccacagcctgtgccggcacaaccggatcaagcacaaaggcatcaggaaagtgtacgcctgctcgcactgcccagactccagacgtacctttaccaaacgtttgatgctggagaagcacgtccagctgatgcatggcatcaaggaccctgacctgaaagaaatgacagatgccaccaatgaggaggaaacagaaataaaagaagacactaaggtccccagtcccaagcggaagttggaagaaccagttctggagttcaggcctccccgaggagcaatcactcaaccactgaaaaagctgaaaatcaatgtttttaaggttcacaagtgtgccgtgtgtggcttcaccaccgaaaacctgctgcaattccacgaacacatccctcagcacaaatcggatggttcttcctaccagtgccgggagtgtggcctctgctacacgtctcacgtctctctgtccaggcacctcttcatcgtacacaagttaaaggaacctcagccagtgtccaagcaaaatggggctggggaagataaccaacaggagaacaaacccagccacgaggatgaatcccctgatggcgccgtgtcagacagaaagtgcaaagtgtgcgcaaaaacttttgaaactgaagctgccttaaatactcacatgcggacacacggcatggccttcatcaaatccaaaaggatgagctcagccgagaaatagccacagatgctccatgaggaaaatccctgtccacattggaataaaaaagacatttttgttacaaagtttgcagtataatagagttaacagtactgtctaggctgttgcaatatattctctttcaatgtaccttccttcacctcgtcgtatatatcctcgataagtattaaaacagtatttgagtttaaaa

SEQ ID NO: 202825 - DNA, 578 bp, Homo sapiens
  Payload ID: 20004
  Gene Name: zinc finger protein 532
  ENST ID: ENST00000590285
  CDS Start-End: 335-578
acacagaccccggcagcgggaacgcagatgacacgcccgtaacatggaagccgccgccgccgccgctccgacgacagcagcagcagccacagcagcagccgccggcggcgccgcgctgaacaaagggtatgttctgtcttgtgctttttcttttagaagctactaaagggtgttggggatgcttctgactattatgaaggccaaaaggcctgttgactggggctgcttttaaccctttcctatttgctgagaatgcagccgtgtgacagtaactg[303 bp omitted]

SEQ ID NO: 202826 - DNA, 649 bp, Homo sapiens [sequence omitted]

SEQ ID NO: 202827 - DNA, 591 bp, Homo sapiens [sequence omitted]

SEQ ID NO: 202828 - DNA, 5585 bp, Homo sapiens
  Payload ID: 20004
  Gene Name: zinc finger protein 532
  Uniprot ID: Q9HCE3
  ENST ID: ENST00000589288
  CDS Start-End: 202-4107
cgccgccgccgccgctccgacgacagcagcagcagccacagcagcagccgccggcggcgccgcgctgaacaaaggcctgttgactggggctgcttttaaccctttcctatttgctgagaatgcagccgtgtgacagtaactg[450 bp omitted]cgatctccagtgctgaagagtttgatgacgacgagaagattgaggtggatgacccccctgacaaggaggacatgcgatcaagcttcaggtcgaatgtgttgacggggtcggctccccagcaggactacgataagctgaaggcactcggaggggaaaactccagcaaaactggactctctacgtcaggcaatgtggagaaaaacaaagctgttaagagagaaacagaagccagttctataaacctgagtgtttatgaaccttttaaagtcagaaaagcagaggataaattgaaggaaagctctgacaaggtgctggaaaacagagtcctagatgggaagctgagctccgagaagaatgacaccagcctccccagcgttgcgccatcaaagacaaagtcgtcctccaagctctcgtcctgcatcgctgccatcgcggctctcagcgctaaaaaggcggcttcagactcctgcaaagaaccagtggccaattcgagggaatcctccccgttaccaaaagaagtaaatgacagtccgagagccgctgacaagtctcctgaatcccagaatctcatcgacgggaccaaaaaaccatccctgaagcaaccggatagtcccagaagcatctcaagtgagaacagcagcaaaggatccccgtcctctcccgcagggtccacaccagcaatccccaaagtccgcataaaaaccattaagacatcttctggggaaatcaagagaacagtgaccagggtattgccagaagtggatcttgactctggaaagaaaccttccgagcagacagcgtccgtgatggcctctgtgacatcccttctgtcgtctccagcatcagccgccgtcctttcctctccccccagggcgcctctccagtctgcggtcgtgaccaatgcagtttcccctgcagagctcacccccaaacaggtcacaatcaagcctgtggctactgctttcctcccagtgtctgctgtgaagacggcaggatcccaagtcattaatttgaagctcgctaacaacaccacggtgaaagccacggtcatatctgctgcctctgtccagagtgccagcagcgccatcattaaagctgccaacgccatccagcagcaaactgtcgtggtgccggcatccagcctggccaatgccaaactcgtgccaaagactgtgcaccttgccaaccttaaccttttgcctcagggtgcccaggccacctctgaactccgccaagtgctaaccaaacctcagcaacaaataaagcaggcaataatcaatgcagcagcctcgcaaccccccaaaaaggtgtctcgagtccaggtggtgtcgtccttgcagagttctgtggtggaagctttcaacaaggtgctgagcagtgtcaatccagtccctgtttacatcccaaacctcagtcctcccgccaatgcagggatcacgttaccgacgcgtgggtacaagtgcttggagtgtggggactcctttgcacttgaaaagagtctgacccagcactacgacagacggagcgtgcgcatcgaagtaacgtgcaaccattgtacaaagaacctcgttttttacaacaaatgcagcctcctttcccatgcccgtgggcataaggagaaaggggtggtaatgcaatgctcccacttaattttaaagccagtcccagcagatcaaatgatagtttctccgtcaagcaatacttccacttcaacttccactcttcagagccctgtgggagctggcacacacactgtcacaaaaattcagtctggcataactgggacagtcatatcggctccttcaagcactcccatcaccccagccatgcccctagatgaagacccctccaaactgtgtagacatagtctaaaatgtttggagtgtaatgaagtcttccaggacgagacatcactggctacacatttccagcaggctgcagatacgagtggacaaaagacttgcactatctgccagatgctgcttcctaaccagtgcagttatgcatcacaccagagaatccatcagcacaaatctccctacacctgccctgagtgtggggccatctgcaggtcggtgcacttccagacccacgtcaccaagaactgtctgcactacacgaggagagttggttttcgatgtgtgcattgcaatgttgtgtactctgatgtggctgctctgaagtctcacattcaaggttctcactgtgaagtcttctacaagtgtcctatttgtccaatggcgtttaagtctgccccaagcacacattcccacgcctacacacagcatcctggcatcaagataggagaaccaaaaataatatataagtgttccatgtgcgacactgtgttcaccctgcaaaccttgctgtatcgccactttgaccaacacattgaaaaccagaaggtgtctgttttcaagtgtccagactgttctcttttatatgcacagaagcaacttatgatggaccatatcaagtctatgcatggaacattgaaaagtattgaagggcctccaaacttgggtataaacttgcctttgagcattaagcctgcaactcaaaattcagcaaatcagaacaaagaggacaccaaatccatgaatgggaaagagaaattggaaaagaaatctccatctcctgtgaaaaaatcaatggaaaccaagaaagtggccagtcctgggtggacgtgttgggagtgtgactgcctgttcatgcagagagatgtgtacatatcccacgtgaggaaggagcacgggaagcaaatgaagaaacacccctgccgccagtgtgacaagtctttcagctcgtcccacagcctgtgccggcacaaccggatcaagcacaaaggcatcaggaaagtgtacgcctgctcgcactgcccagactccagacgtacctttaccaaacgtttgatgctggagaagcacgtccagctgatgcatggcatcaaggaccctgacctgaaagaaatgacagatgccaccaatgaggaggaaacagaaataaaagaagacactaaggtccccagtcccaagcggaagttggaagaaccagttctggagttcaggcctccccgaggagcaatcactcaaccactgaaaaagctgaaaatcaatgtttttaaggttcacaagtgtgccgtgtgtggcttcaccaccgaaaacctgctgcaattccacgaacacatccctcagcacaaatcggatggttcttcctaccagtgccgggagtgtggcctctgctacacgtctcacgtctctctgtccaggcacctcttcatcgtacacaagttaaaggaacctcagccagtgtccaagcaaaatggggctggggaagataaccaacaggagaacaaacccagccacgaggatgaatcccctgatggcgccgtgtcagacagaaagtgcaaagtgtgcgcaaaaacttttgaaactgaagctgccttaaatactcacatgcggacacacggcatggccttcatcaaatccaaaaggatgagctcagccgagaaatagccacagatgctccatgaggaaaatccctgtccacattggaataaaaaagacatttttgttacaaagtttgcagtataatagagttaacagtactgtctaggctgttgcaatatattctctttcaatgtaccttccttcacctcgtcgtatatatcctcgataagtattaaaacagtatttgagtttaaaagagtttgtatatatttaaatgaataactttttatactctttgttacatgtttgtatcagtatttagtggaaaaccatttgagttgttttgggttagaatttttctttttgtactgtttctttaaaacagagttcttagtaacaggggcagttcctgaattcaaataaaccattttgtatgtttggattttgaatgggttaactaattacaggctaaaataatgccttttttagtgtttttaatttttagaattcactacataaattgtaagtaattgtgggtctcaaaaacactaggaacttttaagtgtcttagcacttcctcgatgtgcctgccctgagggagtgagttcacatttgagacaactgcactccagtgtggacgtgcctttgtcttcaggccatgccgaagggtgtttaaagcagtcttgcaggtcgctcctttcccagccgtggataaaaactgaagctaggaatctaataaggaatgctgatttcctcagttccattttgaggaatggggaaggctattctaaagaaaaaaatgggatttgttttctcggcagatctgcaaggctggctttaagagcacaaggagggaaagtaacgaaagggctggactactataaaagttacaaatacgtagttagaccaatagatttatatagtcaggtttttgtcatgtaatttattaactaactattacagaaacacagctaagaatatcaagtatttctctggctcttgacagaaaaaaatcagttgacttaaccctttgctgtcaaaagagttggcgtttcctgttctgggtgctactgccaaacgttatggtacttagagtcgggatgcacaacttcaaccaccgacttatcaatgcagccgcctgtgtattgcaattggccgttaccttaagcactgagccacccgggtttagttcagccatttcaagaagtatatttaacgtcggtagttctgctttattaaaatgcagcagaggtactcttctgtcccttccgtttatagttctctgagagagttctattttttggttttgttttgtgttttcttttgcattttgtatcttgtatttatccctgaacatgttttgtaccttttttttttttttttttaagaaaaggaattcttttgtgtatatatagatacttgcatgatatactgtagtcaatgttcggttcctcaaaaggtcttgctgctgtcaggtgttatgcactccatccatcataactgtatgaaacacatttcatatgtaaataaacgtgggacatttg

SEQ ID NO: 202829 - DNA, 560 bp, Homo sapiens
  Payload ID: 20004
  Gene Name: zinc finger protein 532
  ENST ID: ENST00000590157
  CDS Start-End: 1-355
tttaaagccagtcccagcagatcaaatgatagtttctccgtcaagcaatacttccacttcaacttccactcttcagagccctgtgggagctggcacacacactgtcacaaaaattcagtctggcataactgggacagtcatatcggctccttcaagcactcccatcaccccagccatgcccctagatgaagacccctccaaactgtgtagacatagtctaaaatgtttggagtgtaatgaagtcttccaggacgagacatcactggctacacatttccagcaggctgcagatacgagtggacaaaatggaatggagccagcacggtggctcacacctgtagtcccagcactttgagaggccaaggcaggaggatggcttgaggccaggagtttgagagcagccttgacaatatgaagacttgcactatctgccagatgctgcttcctaaccagtgcagttatgcatcacaccagagaatccatcagcacaaatctccctacacctgccctgagtgtggggccatctgcaggtcggtgcacttccagacccacgtcaccaa

SEQ ID NO: 202830 - DNA, 561 bp, Homo sapiens
  Payload ID: 20004
  Gene Name: zinc finger protein 532
  ENST ID: ENST00000586085
  CDS Start-End: 357-561
catggaagccgccgccgccgccgctccgacgacagcagcagcagccacagcagcagccgccggcggcgccgcgctgaacaaaggtcatccgagctgcggcccagacgcccgggcttgaccgccgcgaaggccaaccccgggaaggggggtatgttctgtcttgtgctttttcttttagaagctactaaagggtgttggggatgcttctgactattatgaaggccaaaaggcctgttgactggggctgcttttaaccctttcctatttgctgagaatgcagccgtgtgacagtaactg[264 bp omitted]

SEQ ID NO: 202831 - DNA, 539 bp, Homo sapiens
  Payload ID: 20004
  Gene Name: zinc finger protein 532
  ENST ID: ENST00000589156
  CDS Start-End: 1-351
aagccagtcccagcagatcaaatgatagtttctccgtcaagcaatacttccacttcaacttccactcttcagagccctgtgggagctggcacacacactgtcacaaaaattcagtctggcataactgggacagtcatatcggctccttcaagcactcccatcaccccagccatgcccctagatgaagacccctccaaactgtgtagacatagtctaaaatgtttggagtgtaatgaagtcttccaggacgagacatcactggctacacatttccagcaggctgcagatacgagtggacaaaatggaatggagccagcacggtggctcacacctgtagtcccagcactttgagaggccaaggcaggaggatggcttgaggccaggagtttgagagcagccttgacaatatggaacactgtctgctttttagattttctttccattttctaccgttctaaagtagtgcaatcacattactttagataaaagagaagcagcaggggaggggactcacctctactctgacatgccgtggtcat

SEQ ID NO: 202832 - DNA, 569 bp, Homo sapiens [sequence omitted]

SEQ ID NO: 202833 - DNA, 672 bp, Homo sapiens [sequence omitted]

SEQ ID NO: 202834 - DNA, 598 bp, Homo sapiens
  Payload ID: 20004
  Gene Name: zinc finger protein 532
  ENST ID: ENST00000585662
  CDS Start-End: 1-388
ttctcttttatatgcacagaagcaacttatgatggaccatatcaagtctatgcatggaacattgaaaagtattgaagggcctccaaacttgggtataaacttgcctttgagcattaagcctgcaactcaaaattcagcaaatcagaacaaagaggacaccaaatccatgaatgggaaagagaaattggaaaagaaatctccatctcctgtgaaaaaatcaatggaaaccaagaaagtggccagtcctgggtggacgtgttgggagtgtgactgcctgttcatgcagagagatgtgtacatatcccacgtgaggaaggagcacgggaagtgggaagaggaaccacatcctttaacttccagtagaagctctgtaactccaagtcactgaaaaatctgagtcacatatgtatatcctttctcttttaaatacaaatgaagaaacacccctgccgccagtgtgacaagtctttcagctcgtcccacagcctgtgccggcacaaccggatcaagcacaaaggcatcaggaaagtgtacgcctgctcgcactgcccagactccagacgtacctttaccaaacgtttgatgctggagaagcacg

SEQ ID NO: 202835 - DNA, 583 bp, Homo sapiens [sequence omitted]

SEQ ID NO: 202836 - DNA, 490 bp, Homo sapiens
  Payload ID: 20004
  Gene Name: zinc finger protein 532
  ENST ID: ENST00000588543
  CDS Start-End: 271-490
agatgcgtttccagaggcctccgtgccccctctcccactggccctgccttcgccccccgccccctccccagacagccccagttttcttcccccgaggtgaagggatttggacttctccccccaggtgcttgaaagaagagaaggcctgttgactggggctgcttttaaccctttcctatttgctgagaatgcagccgtgtgacagtaactg[279 bp omitted]

SEQ ID NO: 202837 - DNA, 5171 bp, Homo sapiens
  Payload ID: 20004
  Gene Name: zinc finger protein 532
  Uniprot ID: Q9HCE3
  ENST ID: ENST00000591808
  CDS Start-End: 890-4795
cttgcgaggtgagcatttccaaggctgtgtgctcgtggggtggggggacacacgatgaccttctcctcctcaggaagacctaagagggaagagcaaaccccagcgagatcccccctgtgctgatgattttcagggacttgttggcaactcagcgagggttgccatagcttttttatgtagggtgaccagaaccggctgaaactggtttgaggcagatcagctcctgaacacaatgcagtcactgagctactacagtaggatagcagcttcctcccttcatggcagccaaaagcagaggagcttgcaggaaggtaccatccctacacagtatgtgaatgcacacttagacaccacacagcactggtacgtgactaatggagccctaaaagattctgggtagagaagatggaaaaaaaggtgcaggtttgcagggtctgagattacttgggcttttcctgcctttttcttttgcttaagggatggacaaggagctgagatttatgacccttattagagaaaaaaatgtgccttgctagggtggggacacttggttgatgcagtctctctctctctttctcggtgtttataacaaaacaaaaccaaaatgaactgaggggtttgtaatggtagtttgtttgttgctggagaatgctactttgcatgctttttttctcttgcagggtatgttctgtcttgtgctttttcttttagaagctactaaagggtgttggggatgcttctgactattatgaaggccaaaaggcctgttgactggggctgcttttaaccctttcctatttgctgagaatgcagccgtgtgacagtaactg[450 bp omitted]cgatctccagtgctgaagagtttgatgacgacgagaagattgaggtggatgacccccctgacaaggaggacatgcgatcaagcttcaggtcgaatgtgttgacggggtcggctccccagcaggactacgataagctgaaggcactcggaggggaaaactccagcaaaactggactctctacgtcaggcaatgtggagaaaaacaaagctgttaagagagaaacagaagccagttctataaacctgagtgtttatgaaccttttaaagtcagaaaagcagaggataaattgaaggaaagctctgacaaggtgctggaaaacagagtcctagatgggaagctgagctccgagaagaatgacaccagcctccccagcgttgcgccatcaaagacaaagtcgtcctccaagctctcgtcctgcatcgctgccatcgcggctctcagcgctaaaaaggcggcttcagactcctgcaaagaaccagtggccaattcgagggaatcctccccgttaccaaaagaagtaaatgacagtccgagagccgctgacaagtctcctgaatcccagaatctcatcgacgggaccaaaaaaccatccctgaagcaaccggatagtcccagaagcatctcaagtgagaacagcagcaaaggatccccgtcctctcccgcagggtccacaccagcaatccccaaagtccgcataaaaaccattaagacatcttctggggaaatcaagagaacagtgaccagggtattgccagaagtggatcttgactctggaaagaaaccttccgagcagacagcgtccgtgatggcctctgtgacatcccttctgtcgtctccagcatcagccgccgtcctttcctctccccccagggcgcctctccagtctgcggtcgtgaccaatgcagtttcccctgcagagctcacccccaaacaggtcacaatcaagcctgtggctactgctttcctcccagtgtctgctgtgaagacggcaggatcccaagtcattaatttgaagctcgctaacaacaccacggtgaaagccacggtcatatctgctgcctctgtccagagtgccagcagcgccatcattaaagctgccaacgccatccagcagcaaactgtcgtggtgccggcatccagcctggccaatgccaaactcgtgccaaagactgtgcaccttgccaaccttaaccttttgcctcagggtgcccaggccacctctgaactccgccaagtgctaaccaaacctcagcaacaaataaagcaggcaataatcaatgcagcagcctcgcaaccccccaaaaaggtgtctcgagtccaggtggtgtcgtccttgcagagttctgtggtggaagctttcaacaaggtgctgagcagtgtcaatccagtccctgtttacatcccaaacctcagtcctcccgccaatgcagggatcacgttaccgacgcgtgggtacaagtgcttggagtgtggggactcctttgcacttgaaaagagtctgacccagcactacgacagacggagcgtgcgcatcgaagtaacgtgcaaccattgtacaaagaacctcgttttttacaacaaatgcagcctcctttcccatgcccgtgggcataaggagaaaggggtggtaatgcaatgctcccacttaattttaaagccagtcccagcagatcaaatgatagtttctccgtcaagcaatacttccacttcaacttccactcttcagagccctgtgggagctggcacacacactgtcacaaaaattcagtctggcataactgggacagtcatatcggctccttcaagcactcccatcaccccagccatgcccctagatgaagacccctccaaactgtgtagacatagtctaaaatgtttggagtgtaatgaagtcttccaggacgagacatcactggctacacatttccagcaggctgcagatacgagtggacaaaagacttgcactatctgccagatgctgcttcctaaccagtgcagttatgcatcacaccagagaatccatcagcacaaatctccctacacctgccctgagtgtggggccatctgcaggtcggtgcacttccagacccacgtcaccaagaactgtctgcactacacgaggagagttggttttcgatgtgtgcattgcaatgttgtgtactctgatgtggctgctctgaagtctcacattcaaggttctcactgtgaagtcttctacaagtgtcctatttgtccaatggcgtttaagtctgccccaagcacacattcccacgcctacacacagcatcctggcatcaagataggagaaccaaaaataatatataagtgttccatgtgcgacactgtgttcaccctgcaaaccttgctgtatcgccactttgaccaacacattgaaaaccagaaggtgtctgttttcaagtgtccagactgttctcttttatatgcacagaagcaacttatgatggaccatatcaagtctatgcatggaacattgaaaagtattgaagggcctccaaacttgggtataaacttgcctttgagcattaagcctgcaactcaaaattcagcaaatcagaacaaagaggacaccaaatccatgaatgggaaagagaaattggaaaagaaatctccatctcctgtgaaaaaatcaatggaaaccaagaaagtggccagtcctgggtggacgtgttgggagtgtgactgcctgttcatgcagagagatgtgtacatatcccacgtgaggaaggagcacgggaagcaaatgaagaaacacccctgccgccagtgtgacaagtctttcagctcgtcccacagcctgtgccggcacaaccggatcaagcacaaaggcatcaggaaagtgtacgcctgctcgcactgcccagactccagacgtacctttaccaaacgtttgatgctggagaagcacgtccagctgatgcatggcatcaaggaccctgacctgaaagaaatgacagatgccaccaatgaggaggaaacagaaataaaagaagacactaaggtccccagtcccaagcggaagttggaagaaccagttctggagttcaggcctccccgaggagcaatcactcaaccactgaaaaagctgaaaatcaatgtttttaaggttcacaagtgtgccgtgtgtggcttcaccaccgaaaacctgctgcaattccacgaacacatccctcagcacaaatcggatggttcttcctaccagtgccgggagtgtggcctctgctacacgtctcacgtctctctgtccaggcacctcttcatcgtacacaagttaaaggaacctcagccagtgtccaagcaaaatggggctggggaagataaccaacaggagaacaaacccagccacgaggatgaatcccctgatggcgccgtgtcagacagaaagtgcaaagtgtgcgcaaaaacttttgaaactgaagctgccttaaatactcacatgcggacacacggcatggccttcatcaaatccaaaaggatgagctcagccgagaaatagccacagatgctccatgaggaaaatccctgtccacattggaataaaaaagacatttttgttacaaagtttgcagtataatagagttaacagtactgtctaggctgttgcaatatattctctttcaatgtaccttccttcacctcgtcgtatatatcctcgataagtattaaaacagtatttgagtttaaaagagtttgtatatatttaaatgaataactttttatactctttgttacatgtttgtatcagtatttagtggaaaaccatttgagttgttttgggttagaatttttctttttgtactgtttctttaaaacagagttcttagtaacaggggcagttcctgaattcaaataaaccattttgtatgtttgga

SEQ ID NO: 202838 - DNA, 5324 bp, Homo sapiens
  Payload ID: 20004
  Gene Name: zinc finger protein 532
  Uniprot ID: Q9HCE3
  ENST ID: ENST00000591083
  CDS Start-End: 347-4252
cgaaaagggctccaaaccactaactaaccagaggagagccccttcttccacctccagggagaatttcagatttaatttgtccgaagatagcgtgctctcttcttactcatttgccatcattacgaggaaaacaaaccaccaccttggcttcaagatcctgggtagaggctcacggtcttttcaaccatctttggcgaggccttgcttccttccactcgagcctgttgactggggctgcttttaaccctttcctatttgctgagaatgcagccgtgtgacagtaactg[450 bp omitted]cgatctccagtgctgaagagtttgatgacgacgagaagattgaggtggatgacccccctgacaaggaggacatgcgatcaagcttcaggtcgaatgtgttgacggggtcggctccccagcaggactacgataagctgaaggcactcggaggggaaaactccagcaaaactggactctctacgtcaggcaatgtggagaaaaacaaagctgttaagagagaaacagaagccagttctataaacctgagtgtttatgaaccttttaaagtcagaaaagcagaggataaattgaaggaaagctctgacaaggtgctggaaaacagagtcctagatgggaagctgagctccgagaagaatgacaccagcctccccagcgttgcgccatcaaagacaaagtcgtcctccaagctctcgtcctgcatcgctgccatcgcggctctcagcgctaaaaaggcggcttcagactcctgcaaagaaccagtggccaattcgagggaatcctccccgttaccaaaagaagtaaatgacagtccgagagccgctgacaagtctcctgaatcccagaatctcatcgacgggaccaaaaaaccatccctgaagcaaccggatagtcccagaagcatctcaagtgagaacagcagcaaaggatccccgtcctctcccgcagggtccacaccagcaatccccaaagtccgcataaaaaccattaagacatcttctggggaaatcaagagaacagtgaccagggtattgccagaagtggatcttgactctggaaagaaaccttccgagcagacagcgtccgtgatggcctctgtgacatcccttctgtcgtctccagcatcagccgccgtcctttcctctccccccagggcgcctctccagtctgcggtcgtgaccaatgcagtttcccctgcagagctcacccccaaacaggtcacaatcaagcctgtggctactgctttcctcccagtgtctgctgtgaagacggcaggatcccaagtcattaatttgaagctcgctaacaacaccacggtgaaagccacggtcatatctgctgcctctgtccagagtgccagcagcgccatcattaaagctgccaacgccatccagcagcaaactgtcgtggtgccggcatccagcctggccaatgccaaactcgtgccaaagactgtgcaccttgccaaccttaaccttttgcctcagggtgcccaggccacctctgaactccgccaagtgctaaccaaacctcagcaacaaataaagcaggcaataatcaatgcagcagcctcgcaaccccccaaaaaggtgtctcgagtccaggtggtgtcgtccttgcagagttctgtggtggaagctttcaacaaggtgctgagcagtgtcaatccagtccctgtttacatcccaaacctcagtcctcccgccaatgcagggatcacgttaccgacgcgtgggtacaagtgcttggagtgtggggactcctttgcacttgaaaagagtctgacccagcactacgacagacggagcgtgcgcatcgaagtaacgtgcaaccattgtacaaagaacctcgttttttacaacaaatgcagcctcctttcccatgcccgtgggcataaggagaaaggggtggtaatgcaatgctcccacttaattttaaagccagtcccagcagatcaaatgatagtttctccgtcaagcaatacttccacttcaacttccactcttcagagccctgtgggagctggcacacacactgtcacaaaaattcagtctggcataactgggacagtcatatcggctccttcaagcactcccatcaccccagccatgcccctagatgaagacccctccaaactgtgtagacatagtctaaaatgtttggagtgtaatgaagtcttccaggacgagacatcactggctacacatttccagcaggctgcagatacgagtggacaaaagacttgcactatctgccagatgctgcttcctaaccagtgcagttatgcatcacaccagagaatccatcagcacaaatctccctacacctgccctgagtgtggggccatctgcaggtcggtgcacttccagacccacgtcaccaagaactgtctgcactacacgaggagagttggttttcgatgtgtgcattgcaatgttgtgtactctgatgtggctgctctgaagtctcacattcaaggttctcactgtgaagtcttctacaagtgtcctatttgtccaatggcgtttaagtctgccccaagcacacattcccacgcctacacacagcatcctggcatcaagataggagaaccaaaaataatatataagtgttccatgtgcgacactgtgttcaccctgcaaaccttgctgtatcgccactttgaccaacacattgaaaaccagaaggtgtctgttttcaagtgtccagactgttctcttttatatgcacagaagcaacttatgatggaccatatcaagtctatgcatggaacattgaaaagtattgaagggcctccaaacttgggtataaacttgcctttgagcattaagcctgcaactcaaaattcagcaaatcagaacaaagaggacaccaaatccatgaatgggaaagagaaattggaaaagaaatctccatctcctgtgaaaaaatcaatggaaaccaagaaagtggccagtcctgggtggacgtgttgggagtgtgactgcctgttcatgcagagagatgtgtacatatcccacgtgaggaaggagcacgggaagcaaatgaagaaacacccctgccgccagtgtgacaagtctttcagctcgtcccacagcctgtgccggcacaaccggatcaagcacaaaggcatcaggaaagtgtacgcctgctcgcactgcccagactccagacgtacctttaccaaacgtttgatgctggagaagcacgtccagctgatgcatggcatcaaggaccctgacctgaaagaaatgacagatgccaccaatgaggaggaaacagaaataaaagaagacactaaggtccccagtcccaagcggaagttggaagaaccagttctggagttcaggcctccccgaggagcaatcactcaaccactgaaaaagctgaaaatcaatgtttttaaggttcacaagtgtgccgtgtgtggcttcaccaccgaaaacctgctgcaattccacgaacacatccctcagcacaaatcggatggttcttcctaccagtgccgggagtgtggcctctgctacacgtctcacgtctctctgtccaggcacctcttcatcgtacacaagttaaaggaacctcagccagtgtccaagcaaaatggggctggggaagataaccaacaggagaacaaacccagccacgaggatgaatcccctgatggcgccgtgtcagacagaaagtgcaaagtgtgcgcaaaaacttttgaaactgaagctgccttaaatactcacatgcggacacacggcatggccttcatcaaatccaaaaggatgagctcagccgagaaatagccacagatgctccatgaggaaaatccctgtccacattggaataaaaaagacatttttgttacaaagtttgcagtataatagagttaacagtactgtctaggctgttgcaatatattctctttcaatgtaccttccttcacctcgtcgtatatatcctcgataagtattaaaacagtatttgagtttaaaagagtttgtatatatttaaatgaataactttttatactctttgttacatgtttgtatcagtatttagtggaaaaccatttgagttgttttgggttagaatttttctttttgtactgtttctttaaaacagagttcttagtaacaggggcagttcctgaattcaaataaaccattttgtatgtttggattttgaatgggttaactaattacaggctaaaataatgccttttttagtgtttttaatttttagaattcactacataaattgtaagtaattgtgggtctcaaaaacactaggaacttttaagtgtcttagcacttcctcgatgtgcctgccctgagggagtgagttcacatttgagacaactgcactccagtgtggacgtgcctttgtcttcaggccatgccgaagggtgtttaaagcagtcttgcaggtcgctcctttcccagccgtggataaaaactgaagctaggaatctaataaggaatgctgatttcctcagttccattttgaggaatggggaaggctattctaaagaaaaaaatgggatttgttttctcggcagatctgcaaggctggctttaagagcacaaggagggaaagtaacgaaagggctggactactataaaagttacaaatacgtagttagaccaatagatttatatagtcaggtttttgtcatgtaatttattaactaactattacagaaacacagctaagaatatcaagtatttctctggctcttgacagaaaaaaatcagttgacttaaccctttgctgtcaaaagagttggcgtttcctgttctgggtgctactgccaaacgttatggtacttagagtcgggatgcacaacttcaaccaccgacttatcaatgcagccgc

SEQ ID NO: 202839 - DNA, 562 bp, Homo sapiens [sequence omitted]

SEQ ID NO: 202840 - DNA, 1525 bp, Homo sapiens
  Payload ID: 20005
  Gene Name: zinc finger protein 534
  ENST ID: ENST00000301085
  CDS Start-End: 126-707
gctttttcctgtagacccggcacccgactgcgcggaaagactgtctaagccgccactcgattcactttcaaagagacatattatgcaaggaagcaactcggaagaggaaagaaaggaagtcaggaatggcccttactcaggggcaattgtcattcagcgatgtggccatagaattctctcaggaggagtggaaatgcctggaccctgggcagaaagctttatacagggacgtgatgttagagaactacaggaacctggtctccctaggaatctgtcttcctgacctgagtgttacctccatgttggagcaaaagagagatccctggactctgcagagtgaagtgaaaataataaacaatccagatggcagggagtgcatcaaaggtgtgaacacagatttttcacttctggcctgggacgcgcgcgtcttcagggtggaagcctggcgcgcgtccggaggtgctgaggagccaaccggcccaaactttgtgggaaatgactcccctctgccctcgcccctcgctctgctaccatttccttccgtttctgcttcgcttggcgatgcaaaacgcgcgaggctcacggcagagggccgaggccacgggactctcagggccgggcccgcccctcggccgcgcagtgcggcgccgcacgccccggacgctgtccagcgttggccgcctgagcagaggctgccgcggagctaagacacccgccgtttcacccagccagcgggcccagcccgcggaggagggcggcatgcagctccgcgttgcctggctctccgggcacgcgggctacgatctgtacagtgcctgtgattacacaccaccacctatggagaaggctcttgtgaaaacggacattcagacagcgcttccttctggatgttatggagagtagctccaaggtctggcttggctgcaaaacactttgttgatgtaggagctggtatcacagatgaagattatagaggaaatgttggtgttgtactctttaatttttgcaaagaaaagtttgaagtcaaaaaaaggtgatcgaattgcacagctcatttgtgaacggattttttaatccagaaatagaagaagttcaagctttggatgacaccaaaaggggatcaggaggttttggctctaccggaaagaattaaaatttatgccaagaacagaaaacgagaagtcatacctttttcttaaaaacaaagagtttttgcttaaagtgttttggtgttttacacttctgtaaacttactagctttaccttctaaaagtactgcattttttttttatgatcaaagaagagatcatttaaaaaaagcatttctttgtgtttggatcacaaagaaactttgtttttctgcagttgatggttatttgtaaatctactttgtggtgacctgatgtaaacagtgtcttcttaaatgtacatcaattacagattaaaaaaaaaatcctgtattatttaactcaagaaatgataccccttcagcaacttaaaaaaaaaagtttgtttttgttttgtg

SEQ ID NO: 202841 - DNA, 2086 bp, Homo sapiens
  Payload ID: 20005
  Gene Name: zinc finger protein 534
  Uniprot ID: Q76KX8
  ENST ID: ENST00000332323
  CDS Start-End: 62-2086
ctttcaaagagacatattatgcaaggaagcaactcggaagaggaaagaaaggaagtcaggaatggcccttactcaggggcaattgtcattcagcgatgtggccatagaattctctcaggaggagtggaaatgcctggaccctgggcagaaagctttatacagggacgtgatgttagagaactacaggaacctggtctccctaggtgaggataatgtccgtccagaagcctgcatctgctctggaatctgtcttcctgacctgagtgttacctccatgttggagcaaaagagagatccctggactctgcagagtgaagtgaaaataataaacaatccagatggcagggagtgcatcaaaggtgtgaacacagagaagagttctaaattgggaagcagtgcaggaaacaagtcacttaaaaatcaacatggattaactcttcagttacatctgactgaatggcagccatttcaagctgtaaggaatatttatggatgtaagcatgttgagaaatctatcagtgacaattcttcagtttcaccagttcaaataagttttttcagtgtcaaaacccatatttttaataactacagaaatgattttcttttttctacattactcccacaagaacagaaagtacacattagggaaaagccttatggatgtaatgagcatgggaaagtcttcagagtgtcttcaagccttactaaccgtcaagtaatccacattgcagataaaacttacaaatgtagtgactgtggcgagatctttagtagcaattcaaactttgcacaacatcaacgaatccatactggagagaagccttacaaatataatgaatgtggcaaagtcttcaatcagaattcacaccttgcacaacatcagaaaattcatactggacagaaaccttacaataacaaagaatgtgggaaagtctttagtcaccatgcctaccttgcacagcataggaaaattcatactggagagaagccttacaaatgtagtgaatgtggcaaagcatttagtgtgtgttccagtcttactgctcatcttgtaatccatactggagagaaaccttatgattgtaaggaatgtggcaaggtcttcaggcataagtcttccctaaccactcatcagacagttcatactggagagagaccatacaaatgtaatgaatgtggcaaggggtttagtcgaattgcattccttgcaaggcatcggaaagttcatactggagagaaaccttacaaatgtaatgagtgtggcaaggtctttattggcaattcacgccttgcacgacataggaaaattcatactggggggaggcgttacaaatgtaatgaatgtggcaaagcatttagaacgtgttcagatctcactgcccatcttctaatccatactggagagaaaccttacgaatgtatagactgtggcaaggtcttcaggcacaagtcttccctaacctatcactgtagaattcatactggagagaagccttacaaatgtaacgaatgtggcaaggtcttcagtcagaattcaaaccttcaacgacataggaaaattcatactggagagaagctttacaaatgtaatgaatgtggcaaggtcttccgtcagaattcacaccttgcacaacatagggatattcatactggagagaagccttacagttgtaatgaatgtggcaaggtcttccgtcggaattcacaccttgtgcgacataggaatgttcatactggagaaaagccttacagttgtaatgaatgtggcaaggtcttcagtcggaattcacaccttgcgcgacataggaatattcatactggagagaagcctcacagttgtaatgaatgtggcaaggtcttcagtcggaattcacaccttgcgcgacataggaaaattcatactggagagaagctttacaaatgtaatgaatgtagcaaggtcttcagtcggaattcacgccttgcacaacataggaatattcatactggagtgaagccttacagttgtaatgaatgtggcaaggtctttagtaaaaattccatcctagtacaacattgcagtattcataccagagagaagccttaa

SEQ ID NO: 202842 - DNA, 2047 bp, Homo sapiens
  Payload ID: 20005
  Gene Name: zinc finger protein 534
  Uniprot ID: Q76KX8
  ENST ID: ENST00000433050
  CDS Start-End: 62-2047
ctttcaaagagacatattatgcaaggaagcaactcggaagaggaaagaaaggaagtcaggaatggcccttactcaggggcaattgtcattcagcgatgtggccatagaattctctcaggaggagtggaaatgcctggaccctgggcagaaagctttatacagggacgtgatgttagagaactacaggaacctggtctccctaggaatctgtcttcctgacctgagtgttacctccatgttggagcaaaagagagatccctggactctgcagagtgaagtgaaaataataaacaatccagatggcagggagtgcatcaaaggtgtgaacacagagaagagttctaaattgggaagcagtgcaggaaacaagtcacttaaaaatcaacatggattaactcttcagttacatctgactgaatggcagccatttcaagctgtaaggaatatttatggatgtaagcatgttgagaaatctatcagtgacaattcttcagtttcaccagttcaaataagttttttcagtgtcaaaacccatatttttaataactacagaaatgattttcttttttctacattactcccacaagaacagaaagtacacattagggaaaagccttatggatgtaatgagcatgggaaagtcttcagagtgtcttcaagccttactaaccgtcaagtaatccacattgcagataaaacttacaaatgtagtgactgtggcgagatctttagtagcaattcaaactttgcacaacatcaacgaatccatactggagagaagccttacaaatataatgaatgtggcaaagtcttcaatcagaattcacaccttgcacaacatcagaaaattcatactggacagaaaccttacaataacaaagaatgtgggaaagtctttagtcaccatgcctaccttgcacagcataggaaaattcatactggagagaagccttacaaatgtagtgaatgtggcaaagcatttagtgtgtgttccagtcttactgctcatcttgtaatccatactggagagaaaccttatgattgtaaggaatgtggcaaggtcttcaggcataagtcttccctaaccactcatcagacagttcatactggagagagaccatacaaatgtaatgaatgtggcaaggggtttagtcgaattgcattccttgcaaggcatcggaaagttcatactggagagaaaccttacaaatgtaatgagtgtggcaaggtctttattggcaattcacgccttgcacgacataggaaaattcatactggggggaggcgttacaaatgtaatgaatgtggcaaagcatttagaacgtgttcagatctcactgcccatcttctaatccatactggagagaaaccttacgaatgtatagactgtggcaaggtcttcaggcacaagtcttccctaacctatcactgtagaattcatactggagagaagccttacaaatgtaacgaatgtggcaaggtcttcagtcagaattcaaaccttcaacgacataggaaaattcatactggagagaagctttacaaatgtaatgaatgtggcaaggtcttccgtcagaattcacaccttgcacaacatagggatattcatactggagagaagccttacagttgtaatgaatgtggcaaggtcttccgtcggaattcacaccttgtgcgacataggaatgttcatactggagaaaagccttacagttgtaatgaatgtggcaaggtcttcagtcggaattcacaccttgcgcgacataggaatattcatactggagagaagcctcacagttgtaatgaatgtggcaaggtcttcagtcggaattcacaccttgcgcgacataggaaaattcatactggagagaagctttacaaatgtaatgaatgtagcaaggtcttcagtcggaattcacgccttgcacaacataggaatattcatactggagtgaagccttacagttgtaatgaatgtggcaaggtctttagtaaaaattccatcctagtacaacattgcagtattcataccagagagaagccttaa

SEQ ID NO: 202843 - DNA, 956 bp, Homo sapiens
  Payload ID: 20005
  Gene Name: zinc finger protein 534
  ENST ID: ENST00000432303
  CDS Start-End: 62-514
ctttcaaagagacatattatgcaaggaagcaactcggaagaggaaagaaaggaagtcaggaatggcccttactcaggggcaattgtcattcagcgatgtggccatagaattctctcaggaggagtggaaatgcctggaccctgggcagaaagctttatacagggacgtgatgttagagaactacaggaacctggtctccctagatttttcacttctggcctgggacgcgcgcgtcttcagggtggaagcctggcgcgcgtccggaggtgctgaggagccaaccggcccaaactttgtgggaaatgactcccctctgccctcgcccctcgctctgctaccatttccttccgtttctgcttcgcttggcgatgcaaaacgcgcgaggctcacggcagagggccgaggccacgggactctcagggccgggcccgcccctcggccgcgcagtgcggcgccgcacgccccggacgctgtccagcgttggccgcctgagcagaggctgccgcggagctaagacacccgccgtttcacccagccagcgggcccagcccgcggaggagggcggcatgcagctccgcgttgcctggctctccgggcacgcgggctacgatctgtacagtgcctgtgattacacaccaccacctatggagaaggctcttgtgaaaacggacattcagacagcgcttccttctggatgttatggagagtagctccaaggtctggcttggctgcaaaacactttgttgatgtaggagctggtatcacagatgaagattatagaggaaatgttggtgttgtactctttaatttttgcaaagaaaagtttgaagtcaaaaaaaggtgatcgaattgcacagctcatttgtgaacggattttttaatccagaaatagaagaagttcaagctttggatgacaccaaaaggggatcaggaggttttggctctaccggaaagaa

SEQ ID NO: 202844 - DNA, 1085 bp, Homo sapiens
  Payload ID: 20005
  Gene Name: zinc finger protein 534
  ENST ID: ENST00000617900
  CDS Start-End: 62-643
ctttcaaagagacatattatgcaaggaagcaactcggaagaggaaagaaaggaagtcaggaatggcccttactcaggggcaattgtcattcagcgatgtggccatagaattctctcaggaggagtggaaatgcctggaccctgggcagaaagctttatacagggacgtgatgttagagaactacaggaacctggtctccctaggaatctgtcttcctgacctgagtgttacctccatgttggagcaaaagagagatccctggactctgcagagtgaagtgaaaataataaacaatccagatggcagggagtgcatcaaaggtgtgaacacagatttttcacttctggcctgggacgcgcgcgtcttcagggtggaagcctggcgcgcgtccggaggtgctgaggagccaaccggcccaaactttgtgggaaatgactcccctctgccctcgcccctcgctctgctaccatttccttccgtttctgcttcgcttggcgatgcaaaacgcgcgaggctcacggcagagggccgaggccacgggactctcagggccgggcccgcccctcggccgcgcagtgcggcgccgcacgccccggacgctgtccagcgttggccgcctgagcagaggctgccgcggagctaagacacccgccgtttcacccagccagcgggcccagcccgcggaggagggcggcatgcagctccgcgttgcctggctctccgggcacgcgggctacgatctgtacagtgcctgtgattacacaccaccacctatggagaaggctcttgtgaaaacggacattcagacagcgcttccttctggatgttatggagagtagctccaaggtctggcttggctgcaaaacactttgttgatgtaggagctggtatcacagatgaagattatagaggaaatgttggtgttgtactctttaatttttgcaaagaaaagtttgaagtcaaaaaaaggtgatcgaattgcacagctcatttgtgaacggattttttaatccagaaatagaagaagttcaagctttggatgacaccaaaaggggatcaggaggttttggctctaccggaaagaa

SEQ ID NO: 202845 - DNA, 4945 bp, Homo sapiens
  Payload ID: 20006
  Gene Name: zinc finger protein 536
  Uniprot ID: O15090
  ENST ID: ENST00000355537
  CDS Start-End: 148-4050
gggaggtgagtctggagaagagagtttccacgttgtcatcataggatctggactcaagtgaccaaaaccttgcttggatttttacctgatgaagtttgtcttgaaaagtgaaaatggttccatttccattttccctgttctcaagggatggaagaagcgagcctgtgccttggagtgtcttcggcggagccggaagctgagccccacctgagtggccccgtcctcaacggccagtatgccatgagtcagaagctgcaccagatcacctcccagctcagccatgccttccccgagctccatccccggcccaaccccgaggagaagccccccgcatccctggaggagaaggcccacgtgcccatgagcggccagcccatgggcagtcagatggcgctcctggccaaccagctgggccgggaggtggacaccagcctcaacgggagggtggacttgcagcagttcctcaacgggcagaacctgggcatcatgtcccagatgagcgacatcgaggacgacgcccgcaagaaccgcaagtacccgtgcccactctgcggcaagcgcttccgcttcaacagcatcctctccctgcacatgcgcacgcacacgggcgagaagcccttcaagtgcccgtactgcgaccacagggcggcgcagaaggggaacctcaagattcacctgcggacccacaagctgggcaacctgggcaaggggcgtgggcgtgtgcgcgaggagaaccgcctgctgcacgagctggaggagcgcgccatcctgcgggacaagcagctgaaaggcagcctgctgcagccccggccggacctgaagcccccgccgcacgcccagcaggccccgctggccgcctgcaccctggccctgcaggctaaccacagcgttcccgacgtggcccacccggtgccctcgcccaagcctgccagcgtgcaggaggacgcggtggccccggcggcgggcttccgctgtaccttctgcaagggcaagttcaagaagcgcgaggagctggaccgccacatccgcatcttgcacaagccctacaagtgcacgttgtgcgacttcgcggcttcgcaggaggaggagctcatcagccacgtggagaaggcacacatcacggccgagtcggcccagggccagggccccaacggcggtggcgagcagtcggccaacgagttccgctgcgaggtgtgcggtcaggtgttcagccaggcgtggttcctcaagggtcacatgcgcaagcacaaagactcctttgagcactgctgccagatctgcggccggcgcttcaaggagccctggttcctcaagaaccacatgaaggtccacctcaacaagctgtcggtgaagaacaagtcccccagcgaccccgaggtgcctgtgcccatgggcggcatgtcccaggaggcccacgccaacctgtactccaggtacctctcctgcctgcagagtggcttcatgaccccggacaaagccggcctgagcgagcccagccagctctatggcaagggcgagctgcccatgaaggagaaggaagcgctggggaagctgctgtctcccatctccagcatggcccacggcgtcccggagggggacaagcactccctcctgggatgcctcaatctcgtgccgccgctgaaatccagctgcatcgagcggctgcaggcggctgccaaggctgcggagatggaccccgtgaacagctaccaggcttggcagctcatggccaggggcatggccatggaacatggcttcttgtctaaagagcatccgctgcagcgcaaccacgaagacactttggcaaacgccggggttctgtttgataaggagaagcgggagtacgtgttagtgggagcagatggctccaagcagaaaatgcctgctgatttggttcacagcactaaagtgggcagccagagagacctgccaagtaagctcgaccctttagaaagcagtcgggattttttgtcacacgggctgaaccagactctcgagtataacctgcagggtcctgggaacatgaaggagaagcccaccgagtgccccgactgcggccgggtgttccgcacttaccaccaggtggtcgtgcactcccgtgtccacaagcgggaccgcaagggcgaggaggatgggctgcacgtgggcctggatgagcggcgtggctcgggcagtgaccaggagtcccagtcggtgagccgctccaccacgccgggctcctctaacgtcaccgaggagagcggggtcggaggcggcctctcccagaccgggagtgcccaggaggacagcccgcacccctcctcgccatcctcctcagacattggcgaggaggctgggagatctgccggcgtccagcaaccagcgctgcttcgcgacagaagcctgggctcggccatgaaggactgcccgtactgtgggaaaactttccggacatcccatcaccttaaggtgcacctgaggatacacacaggtgagaaaccctacaagtgtccgcactgtgactatgccggcacgcagtcagcatccttaaaataccacttagagcgacaccatcgggagcggcagaacggggctgggccgctgtctgggcaacccccaaatcaagaccacaaggatgagatgtcaagcaaagcttctctgttcatcaggccagacatcctgaggggggccttcaagggtctccctggaatcgacttcagaggaggccctgcatctcagcagtggacatcaggggttctctcctctggagatcactcggggcaggccacgggcatgtcttcggaggtcccctcagatgctctgaaaggcactgaccttccttccaaaagcacccacttctctgagatcggaagagcttatcaaagcattgtgagcaacggtgtgaatttccaagggtccttgcaagctttcatggacagttttgtcctcagttccttgaagaaggagaaggacatgaaggacaaagccctggctgaccccccttccatgaaagtccacggagtggatggtggtgaggagaaacccagtggcaagtcctcccagaggaagtccgagaaatctcagtatgaacccctggacttgtctgtgcggccagatgccgcctccctcccgggctcctcggtaactgtgcaggacagcattgcatggcacggctgcttgttttgtgctttcacaacgtcctccatggagctcatggcccttcatctccaggccaaccacctgggcaaagcgaaacgcaaagataacaccatcggggtcacagtcaactgcaaagaccaagcccgggaggcgagtaagatggccctgctgccctcgttacaatcaaacaaagacctgggcctctccaatatgatcagctctctagactctgcttctgagaagatggcccaaggtcagctcaaggagactctgggagagcagaagagcggtgcatggaccggccacgtggaccctgcattttgtaacttcccatcagacttctacaagcagtttggtgtttacccaggcatggttggctcaggggcctccagttcctgccccaacaaggagcctgatggaaaggcccactctgaagaggatgtccccatcctgatccccgaaaccacgagtaagaacactactgatgacctctctgacattgcctcctcagaggacatggactcctccaagggggagaacaacgatgaagaggatgttgaaaccgaaccggaaatgatgaccaagccactgtctgccctcagcaaagacagcagcagcgatggcggggacagcctgcagcccacaggcacctcccagcccgtccagggactggtctcacctttatcccaagcaccggagaagcagtggcacagccagggtcttctccaagcccaggaccccttggcgggcctgccaaagccggagcgggggccccagagcctggacaagccgatgaacatgctgtcggtcctcagggcctacagttctgatggcttagcagcctttaacggacttgcaagtagcacagcaaattctggatgtatcaagaggccagacttgtgtggtaagtgacactccctgtcctagtcggtctatctggacttgcccttgtctgttcgtggtcctcggtggttatctgcagcttgttaatcgtgtaaagtcaagagaagaatgtatacacatatgtgtgttgaataattactattggcataggtatgtgtatacacacggtgcaccaatctacagtatatatagcagagaatcagaggctaaaaatattaccccatatgttccagtattagtcatggattgcaaaggcttagtaacttgagcaggagagaaaactccctcaaagtcataaatcctgagtgacaactgctgctggatgacagatcccttcacctgtggacaacctggctgggggtggggggctgttccaccagctcacctgagcatgtagaggtgggtcctgcagtggtctcgtgggtattactgcttgtgtctgattgtcctgtattttgtaacactttagaagaatacagaaaagtgcagtaattctctttctccatagtatttaagcagaaatattgctagtttaatattgtgtcaggtcgtcctattaaccaggagcagatgacagtaaaatttcagtgaatagcaccttgacatctacaacttaaaaatggtgattgaagcaaaatatgtaaacttgtacggggtgatcgtgtgctttggaacagagtattgttgaagtaattagaagatatattaaggtgttcctggtaatgaaggcatgtaagttataataattgtagctttctgaataagtgtcaaactatatctttaagtgtgctgtatgctgagttacaagttaggtcatttatgaatggaatgtaaaataatactaaaaatgcttcaataacttatcttggtattgctaataaaaaaaaaaagctgtgaaacatta

SEQ ID NO: 202846 - DNA, 655 bp, Homo sapiens
  Payload ID: 20006
  Gene Name: zinc finger protein 536
  ENST ID: ENST00000591488
  CDS Start-End: 240-655
agtccggagtccatttgcataattggattttttttttttgcctccttctttctccctgaaacttgtttgaaaacccaagtgaaaaccgcgacgatctgcacactcaaaagcaagtgccaaggaacggggacgccccctcttgcaatctgtcagtgcctgcaccaactttatcctttctggggcattttctcaccagactgacagtccttaagacaagtatgcagttaagctgctaagggatggaagaagcgagcctgtgccttggagtgtcttcggcggagccggaagctgagccccacctgagtggccccgtcctcaacggccagtatgccatgagtcagaagctgcaccagatcacctcccagctcagccatgccttccccgagctccatccccggcccaaccccgaggagaagccccccgcatccctggaggagaaggcccacgtgcccatgagcggccagcccatgggcagtcagatggcgctcctggccaaccagctgggccgggaggtggacaccagcctcaacgggagggtggacttgcagcagttcctcaacgggcagaacctgggcatcatgtcccagatgagcgacatcgaggacgacgcccgcaagaaccgcaagtacccgtgcccactctgcggcaagcgctt

SEQ ID NO: 202847 - DNA, 3198 bp, Homo sapiens
  Payload ID: 20006
  Gene Name: zinc finger protein 536
  ENST ID: ENST00000585628
  CDS Start-End: 350-3198
actcgtacagtagcggcgtcagatccatcccgcgcctcccagtccggagtccatttgcataattggattttttttttttgcctccttctttctccctgaaacttgtttgaaaacccaagtgaaaaccgcgacgatctgcacactcaaaagcaagtgccaattcctgaccaccacggctttaagaatatccttcaaccgggagggagatccattgctttaagacttgcctgggaacggggacgccccctcttgcaatctgtcagtgcctgcaccaactttatcctttctggggcattttctcaccagactgacagtccttaagacaagtatgcagttaagctgctaagggatggaagaagcgagcctgtgccttggagtgtcttcggcggagccggaagctgagccccacctgagtggccccgtcctcaacggccagtatgccatgagtcagaagctgcaccagatcacctcccagctcagccatgccttccccgagctccatccccggcccaaccccgaggagaagccccccgcatccctggaggagaaggcccacgtgcccatgagcggccagcccatgggcagtcagatggcgctcctggccaaccagctgggccgggaggtggacaccagcctcaacgggagggtggacttgcagcagttcctcaacgggcagaacctgggcatcatgtcccagatgagcgacatcgaggacgacgcccgcaagaaccgcaagtacccgtgcccactctgcggcaagcgcttccgcttcaacagcatcctctccctgcacatgcgcacgcacacgggcgagaagcccttcaagtgcccgtactgcgaccacagggcggcgcagaaggggaacctcaagattcacctgcggacccacaagctgggcaacctgggcaaggggcgtgggcgtgtgcgcgaggagaaccgcctgctgcacgagctggaggagcgcgccatcctgcgggacaagcagctgaaaggcagcctgctgcagccccggccggacctgaagcccccgccgcacgcccagcaggccccgctggccgcctgcaccctggccctgcaggctaaccacagcgttcccgacgtggcccacccggtgccctcgcccaagcctgccagcgtgcaggaggacgcggtggccccggcggcgggcttccgctgtaccttctgcaagggcaagttcaagaagcgcgaggagctggaccgccacatccgcatcttgcacaagccctacaagtgcacgttgtgcgacttcgcggcttcgcaggaggaggagctcatcagccacgtggagaaggcacacatcacggccgagtcggcccagggccagggccccaacggcggtggcgagcagtcggccaacgagttccgctgcgaggtgtgcggtcaggtgttcagccaggcgtggttcctcaagggtcacatgcgcaagcacaaagactcctttgagcactgctgccagatctgcggccggcgcttcaaggagccctggttcctcaagaaccacatgaaggtccacctcaacaagctgtcggtgaagaacaagtcccccagcgaccccgaggtgcctgtgcccatgggcggcatgtcccaggaggcccacgccaacctgtactccaggtacctctcctgcctgcagagtggcttcatgaccccggacaaagccggcctgagcgagcccagccagctctatggcaagggcgagctgcccatgaaggagaaggaagcgctggggaagctgctgtctcccatctccagcatggcccacggcgtcccggagggggacaagcactccctcctgggatgcctcaatctcgtgccgccgctgaaatccagctgcatcgagcggctgcaggcggctgccaaggctgcggagatggaccccgtgaacagctaccaggcttggcagctcatggccaggggcatggccatggaacatggcttcttgtctaaagagcatccgctgcagcgcaaccacgaagacactttggcaaacgccggggttctgtttgataaggagaagcgggagtacgtgttagtgggagcagatggctccaagcagaaaatgcctgctgatttggttcacagcactaaagtgggcagccagagagacctgccaagtaagctcgaccctttagaaagcagtcgggattttttgtcacacgggctgaaccagactctcgagtataacctgcagggtcctgggaacatgaaggagaagcccaccgagtgccccgactgcggccgggtgttccgcacttaccaccaggtggtcgtgcactcccgtgtccacaagcgggaccgcaagggcgaggaggatgggctgcacgtgggcctggatgagcggcgtggctcgggcagtgaccaggagtcccagtcggtgagccgctccaccacgccgggctcctctaacgtcaccgaggagagcggggtcggaggcggcctctcccagaccgggagtgcccaggaggacagcccgcacccctcctcgccatcctcctcagacattggcgaggaggctgggagatctgccggcgtccagcaaccagcgctgcttcgcgacagaagcctgggctcggccatgaaggactgcccgtactgtgggaaaactttccggacatcccatcaccttaaggtgcacctgaggatacacacaggtgagaaaccctacaagtgtccgcactgtgactatgccggcacgcagtcagcatccttaaaataccacttagagcgacaccatcgggagcggcagaacggggctgggccgctgtctgggcaacccccaaatcaagaccacaaggatgagatgtcaagcaaagcttctctgttcatcaggccagacatcctgaggggggccttcaagggtctccctggaatcgacttcagaggaggccctgcatctcagcagtggacatcaggggttctctcctctggagatcactcggggcaggccacgggcatgtcttcggaggtcccctcagatgctctgaaaggcactgaccttccttccaaaagcacccacttctctgagatcggaagagcttatcaaagcattgtgagcaacggtgtgaatttccaagggtccttgcaagctttcatggacagttttgtcctcagttccttgaagaaggagaaggacatgaaggacaaagccctggctgaccccccttccatgaaagtcca

SEQ ID NO: 202848 - DNA, 2951 bp, Homo sapiens
  Payload ID: 20006
  Gene Name: zinc finger protein 536
  ENST ID: ENST00000592773
  CDS Start-End: 1-414
gaccccttggcgggcctgccaaagccggagcgggggccccagagcctggacaagccgatgaacatgctgtcggtcctcagggcctacagttctgatggcttagcagcctttaacggacttgcaagtagcacagcaaattctggatgtatcaagaggccagacttgtgtggtcacaggcctttccagtgccgctactgtccctacagtgcctctcagaaggggaacctgaagacccatgtcctctgcgtccatcgcatgccttttgacaacagccagtatcccgaccgcaggttcaagcgctccagggtcgactcagaggcttctgggaatttcgaggagcctacagctgtcaaggcggggagctctgcagacctcacggaagagggcggcaagggccaggaggagaccaactgagcagaccaacctgtatattgcaatagtattttacacagttttaacattatgcatctggtaaaagtttgctaactgcattccaaggggaaaaaatcatgtacaaccccccaatagtgtatagaacatttaaaaaattttaaaagatatctatatatatattaaaaaaaaaaaattccccagcccttgaaaatggctgctaaactgttacccggcaacaagtacttccaaaacaatgcaggtgggagaaaagtgatttcaaaaattcttggtgccctctgagctggagagagctgggggcccttccaactcgaaagtcgtctttgtccaaaaataatgctcttaactgaaaaacgataccatctaaacgatttagtgttgcgttgaagatggaggggctgtgttttcgttgttgaaaacacctctataatctgacaccagctgctgtaattcgcctagaaccctaatgagatgtgtcgggaggcagctgcggtgccagtcagactggagcggtcactgcagagaaaatcaattcacgtggtgttgtaactgcactcttggagaaaccttagacggcccgcagccagcgccggggctgaccggcactgcagaggattgagatcttaaatgcgcatttttacaaaatacacagccaaatgaaatcaatgatcaggaagtgtctgcagacaaatgtccattgcaggtttgatgagtaattcctttttttagatcaaattgttctcggtagccttttcttcttttttaaaaaaaaattttggatgaagaaggaagttgctattaaaaaaaagtagggtacattatataaaatgttgttagaaaaactagctaaccccatccatagaagatgctggtgagcaattaaaatttaggtaataatagaaagatttttttactatgatttttaaaattttacttgaatgaaggctgctccggtccttattatcggattttttttcatgtgttggtttttataagtgtcacagacatgaagcaagattttcttctccagcaagctcttatgaaatagcttgtattaaaatatgatctaaacatcgtgctctctatctctaatgacgaaaactgtttgagttaaaaatgtctgtttttgtaaaacaaatgtgttctatatttttgtagattttagattttctactgattggatactccaaatttatcaagttctgcaccacacagaaggagattttgagtgtcaataatgaaacacttaactcattaaaaaaatgatttaagaagactagttaaaggtttattcttgaatctgctagcatggtgtaaagttgagccttttaacatacttcctttgagtgacatgaaattggtgctgttgcttgtggtggtagagaagtatgaaagtattaacttcttctaaaacaaaatcattcagacttaaaaaaaaaaaaaaggtcaatatttccttgcaggctgggagcacagattaaaccccagggccttaaaaacttcagctctgcctacagcagtttacaaaaatactaaactgcaatcaatgtaaataaaattcttagtgctatcctgagaccagaaagaatctcaggctaataaggaatccggtttgcatatgctgtcaaaagggtgtcatctaaccgaggtttcagtgtaaatgaggtcgctgtgcaacttggacccatctggcatagagcaagctgctttcttgtttttctagtatagttctcactgccttacttaaatcgagttgataaacttaatgcaactgtttctatgatcctagagaaaggactgaaatgttattgaaaactttccgactgtagtaagctttaggattttgactgcactactgtgtttggtgactgtgccagtcccttgctttctgtgtttgctctgcctttggtatcttagcaaagaaaaataaaaaaagaaaaaaaaaacataaaaaaaaaagaaaaaagaaaaaaaagaggaaaaaaaagtgggggaaaaaatgagagccacattccatttctagcactttgggagctctttcagtatttttttgtgtcttttcagcatcctcagatgcgacaggcaataattctgtttgtgacactgggaacatcccctcttctttgtggtgtgtgttgattccattttgtccagtgctgctgtccttcctccccctctgacacaggccttctttccagaacatttgtaacttgtaatacaaacaagtgacagccacagtgatgcagcgtcagtttctgaatgtcatcaggttctcatatctaaacatgtcaagttttttccctgtaacttctgtagtctgtgatgctggtcataatactgtctacattcctacgcaaagaaaaaaaaatctatcttggaggaaatctgagatcaataggagtagaggattttgttgctatgcttgtaacaagtagaaaactttgtatttaaagtttattcttggtcattatttattattataatacatcagttgacagaactttattctggtatagaaagtattaaaagttgttttttca

SEQ ID NO: 202849 - DNA, 3099 bp, Homo sapiens
  Payload ID: 20007
  Gene Name: zinc finger protein 540
  Uniprot ID: Q8NDQ6
  ENST ID: ENST00000316433
  CDS Start-End: 283-2265
gggtccggcgctccagaacagaacgatccctgaggctcccttgctcgaactgtgggacttaccctactatggtccgagcctaccctatttcattatactcaagtaacgccccagaaattccagagaatctcacacaaagaggttgagtcttgccgtggtgccttcaggggaatgtcatcccgggctagaagagctgcaaaaggctgtcaggcttctcagaactttgcttctccagcagaataatcctgcggaagactgagcagttcttgtgagtgtaaaaccatggcccatgcattggtgacgttcagggatgtggctatagacttctctcagaaggaatgggagtgcctggacactacccagaggaaattgtacagagatgtgatgttggagaattataataacttggtctcactgggatattctggctcaaagccagatgtgattaccttactggagcaagggaaagagccctgcgtggtggcgagggatgtgacaggaagacagtgccccggtttgttatccaggcataagaccaagaaattatcttcagaaaaggacattcatgaaatcagtttatccaaagagagtataatagaaaaaagtaaaactcttcgtctgaaaggatccatttttagaaatgagtggcagaacaaaagtgagtttgagggtcaacagggacttaaagaaagatctatcagtcaaaagaaaatcgtctctaaaaaaatgtcaactgatagaaaacgtccctcttttactctgaatcagagaattcacaatagtgagaaaagctgtgactcacacttggttcaacatgggaaaatagattctgatgtgaaacatgattgtaaagaatgtgggagtacttttaataatgtctatcagcttactctccatcagaaaattcatactggtgaaaaatcctgtaaatgtgagaaatgtgggaaagtttttagtcatagctatcaacttactctgcatcagagatttcatactggtgagaaaccctatgaatgtcaagaatgtgggaagacctttactctttacccacaacttaatcgacatcagaaaattcacactggtaaaaaaccctatatgtgtaagaaatgtgataagggtttttttagtagattagaacttactcaacataaaagaattcatactggtaagaaatcttatgaatgtaaagaatgtggaaaagtttttcaacttattttctactttaaagaacatgagagaattcatacaggtaagaaaccctatgaatgtaaggagtgtgggaaagcttttagtgtatgcggacaacttacccgtcatcagaaaattcatactggtgtaaaaccctacgaatgtaaggaatgtggaaagacctttagacttagtttttaccttactgaacacagaagaactcatgcaggtaagaaaccttatgaatgtaaggagtgtgggaaatcatttaatgtgcgtggacagcttaatcggcataaaacaatccatactggtataaaaccttttgcatgtaaggtgtgtgagaaggcttttagttatagtggtgacctcagagtacattctagaattcatactggagagaaaccatatgaatgtaaggaatgcgggaaagcctttatgcttcgttcagtccttactgaacatcagagacttcatactggtgtgaagccctacgaatgtaaggaatgtgggaagacctttcgagttcgttctcaaattagtctacataagaaaattcatactgatgtgaagccctacaaatgtgtacgatgtgggaagacctttagatttggtttctaccttactgaacaccagagaattcacactggtgaaaagccctataaatgtaaagaatgtggaaaggcctttattcgtagagggaatcttaaagaacatctgaaaattcattctggtttaaaaccctatgactgtaaagaatgtgggaagtcctttagtcggcgtgggcagttcactgaacatcagaaaattcatacgggtgtaaaaccatacaaatgtaaagaatgtgggaaggcctttagtcgtagtgtagaccttagaatacatcaaagaattcatactggtgagaaaccctatgagtgtaaacaatgtgggaaggcctttagacttaattcacaccttactgaacatcagagaattcacactggtgagaaaccctatgagtgtaaggtatgtagaaaggcctttagacaatattcacatctttatcaacatcagaaaactcataatgtaatttaatataagaaaaggtttccatgtcatgctctatttatagaatatcaaaatatttatggccagaagttctgtcaatgtgttgatgtttttttacacatattaacttaataaatgtatgagtcttaaatacctcttagttctcattaaatttaggaaaattcacactagaaaataaagctgttaatgtaacagttgtggaaaagtgttctagcaacagcatatacttatcatcattgcctttccactactctactatctgtgtgatattagacaaaatatttgcttcttggtacctcagctgtaaaatgaaacacacctaaaagtgtggttgtttccaacatgtataatacagcaacaactatctggcccaaactgctttggattaatattggatattactgtttttattatcatcaacattattattagtggatttcttaataggaagatgcaatggagatgacaaatttggaaaaaccactcatcacttacatttcatgaagtacttctttgataaaatctgttatgggctgaatgtttgtgttcccgtaacaattcctatgttgaaacacgaatcccaaggtgatggtatttgaaggtagggcctttaggaggaaattaggtcatgagggtggagccttcatgagtggaattactgcctttataagaagaagccaaagagccagctagctctttcaaccacatgaggttacagcaagaagtcagcagtctacagtgcaaaagagggccttcaccagaacccaagcatgctggcaccttgaccttggactttcagcctccaaaactgtgagaaataaacctcagttgtttataagc

SEQ ID NO: 202850 - DNA, 3073 bp, Homo sapiens
  Payload ID: 20007
  Gene Name: zinc finger protein 540
  Uniprot ID: Q8NDQ6
  ENST ID: ENST00000343599
  CDS Start-End: 259-2241
tcctctgtgggtgcagagtgggtagtggccatgcctgtgtgatgtgcgtcagattatgcttgaggctattagtggcgcatttagtattgtgtgcggaagggtcttgggaatggtttgattatagctttgagggtgactgatgtctgtttaatcagattcagcctgcgactgagtatcttataacctgcttctcagaactttgcttctccagcagaataatcctgcggaagactgagcagttcttgtgagtgtaaaaccatggcccatgcattggtgacgttcagggatgtggctatagacttctctcagaaggaatgggagtgcctggacactacccagaggaaattgtacagagatgtgatgttggagaattataataacttggtctcactgggatattctggctcaaagccagatgtgattaccttactggagcaagggaaagagccctgcgtggtggcgagggatgtgacaggaagacagtgccccggtttgttatccaggcataagaccaagaaattatcttcagaaaaggacattcatgaaatcagtttatccaaagagagtataatagaaaaaagtaaaactcttcgtctgaaaggatccatttttagaaatgagtggcagaacaaaagtgagtttgagggtcaacagggacttaaagaaagatctatcagtcaaaagaaaatcgtctctaaaaaaatgtcaactgatagaaaacgtccctcttttactctgaatcagagaattcacaatagtgagaaaagctgtgactcacacttggttcaacatgggaaaatagattctgatgtgaaacatgattgtaaagaatgtgggagtacttttaataatgtctatcagcttactctccatcagaaaattcatactggtgaaaaatcctgtaaatgtgagaaatgtgggaaagtttttagtcatagctatcaacttactctgcatcagagatttcatactggtgagaaaccctatgaatgtcaagaatgtgggaagacctttactctttacccacaacttaatcgacatcagaaaattcacactggtaaaaaaccctatatgtgtaagaaatgtgataagggtttttttagtagattagaacttactcaacataaaagaattcatactggtaagaaatcttatgaatgtaaagaatgtggaaaagtttttcaacttattttctactttaaagaacatgagagaattcatacaggtaagaaaccctatgaatgtaaggagtgtgggaaagcttttagtgtatgcggacaacttacccgtcatcagaaaattcatactggtgtaaaaccctacgaatgtaaggaatgtggaaagacctttagacttagtttttaccttactgaacacagaagaactcatgcaggtaagaaaccttatgaatgtaaggagtgtgggaaatcatttaatgtgcgtggacagcttaatcggcataaaacaatccatactggtataaaaccttttgcatgtaaggtgtgtgagaaggcttttagttatagtggtgacctcagagtacattctagaattcatactggagagaaaccatatgaatgtaaggaatgcgggaaagcctttatgcttcgttcagtccttactgaacatcagagacttcatactggtgtgaagccctacgaatgtaaggaatgtgggaagacctttcgagttcgttctcaaattagtctacataagaaaattcatactgatgtgaagccctacaaatgtgtacgatgtgggaagacctttagatttggtttctaccttactgaacaccagagaattcacactggtgaaaagccctataaatgtaaagaatgtggaaaggcctttattcgtagagggaatcttaaagaacatctgaaaattcattctggtttaaaaccctatgactgtaaagaatgtgggaagtcctttagtcggcgtgggcagttcactgaacatcagaaaattcatacgggtgtaaaaccatacaaatgtaaagaatgtgggaaggcctttagtcgtagtgtagaccttagaatacatcaaagaattcatactggtgagaaaccctatgagtgtaaacaatgtgggaaggcctttagacttaattcacaccttactgaacatcagagaattcacactggtgagaaaccctatgagtgtaaggtatgtagaaaggcctttagacaatattcacatctttatcaacatcagaaaactcataatgtaatttaatataagaaaaggtttccatgtcatgctctatttatagaatatcaaaatatttatggccagaagttctgtcaatgtgttgatgtttttttacacatattaacttaataaatgtatgagtcttaaatacctcttagttctcattaaatttaggaaaattcacactagaaaataaagctgttaatgtaacagttgtggaaaagtgttctagcaacagcatatacttatcatcattgcctttccactactctactatctgtgtgatattagacaaaatatttgcttcttggtacctcagctgtaaaatgaaacacacctaaaagtgtggttgtttccaacatgtataatacagcaacaactatctggcccaaactgctttggattaatattggatattactgtttttattatcatcaacattattattagtggatttcttaataggaagatgcaatggagatgacaaatttggaaaaaccactcatcacttacatttcatgaagtacttctttgataaaatctgttatgggctgaatgtttgtgttcccgtaacaattcctatgttgaaacacgaatcccaaggtgatggtatttgaaggtagggcctttaggaggaaattaggtcatgagggtggagccttcatgagtggaattactgcctttataagaagaagccaaagagccagctagctctttcaaccacatgaggttacagcaagaagtcagcagtctacagtgcaaaagagggccttcaccagaacccaagcatgctggcaccttgaccttggactttcagcctccaaaactgtgagaaataaacctcagttgtttataa

SEQ ID NO: 202851 - DNA, 2038 bp, Homo sapiens
  Payload ID: 20007
  Gene Name: zinc finger protein 540
  ENST ID: ENST00000586134
  CDS Start-End: 383-2038
cgatccctgaggctcccttgctcgaactgtgggacttaccctactatggtccgagcctaccctatttcattatactcaagtaacgccccagaaattccagagaatctcacacaaagaggttgagtcttgccgtggtgccttcaggggaatgtcatcccgggctagaagagctgcaaaaggctgtcagacggagtttcaatcttgttacgcaggctggagtgcaatggggcgatctcagctcaccgcagcctccccctcccagattcaagcgattttcctgcctcagtctcctgagtagctgggattataggcttctcagaactttgcttctccagcagaataatcctgcggaagactgagcagttcttgtgagtgtaaaaccatggcccatgcattggtgacgttcagggatgtggctatagacttctctcagaaggaatgggagtgcctggacactacccagaggaaattgtacagagatgtgatgttggagaattataataacttggtctcactgggatattctggctcaaagccagatgtgattaccttactggagcaagggaaagagccctgcgtggtggcgagggatgtgacaggaagacagtgccccggtttgttatccaggcataagaccaagaaattatcttcagaaaaggacattcatgaaatcagtttatccaaagagagtataatagaaaaaagtaaaactcttcgtctgaaaggatccatttttagaaatgagtggcagaacaaaagtgagtttgagggtcaacagggacttaaagaaagatctatcagtcaaaagaaaatcgtctctaaaaaaatgtcaactgatagaaaacgtccctcttttactctgaatcagagaattcacaatagtgagaaaagctgtgactcacacttggttcaacatgggaaaatagattctgatgtgaaacatgattgtaaagaatgtgggagtacttttaataatgtctatcagcttactctccatcagaaaattcatactggtgaaaaatcctgtaaatgtgagaaatgtgggaaagtttttagtcatagctatcaacttactctgcatcagagatttcatactggtgagaaaccctatgaatgtcaagaatgtgggaagacctttactctttacccacaacttaatcgacatcagaaaattcacactggtaaaaaaccctatatgtgtaagaaatgtgataagggtttttttagtagattagaacttactcaacataaaagaattcatactggtaagaaatcttatgaatgtaaagaatgtggaaaagtttttcaacttattttctactttaaagaacatgagagaattcatacaggtaagaaaccctatgaatgtaaggagtgtgggaaagcttttagtgtatgcggacaacttacccgtcatcagaaaattcatactggtgtaaaaccctacgaatgtaaggaatgtggaaagacctttagacttagtttttaccttactgaacacagaagaactcatgcaggtaagaaaccttatgaatgtaaggagtgtgggaaatcatttaatgtgcgtggacagcttaatcggcataaaacaatccatactggtataaaaccttttgcatgtaaggtgtgtgagaaggcttttagttatagtggtgacctcagagtacattctagaattcatactggagagaaaccatatgaatgtaaggaatgcgggaaagcctttatgcttcgttcagtccttactgaacatcagagacttcatactggtgtgaagccctacgaatgtaaggaatgtgggaagacctttcgagttcgttctcaaattagtctacataagaaaattcatactgatgtgaagccctacaaatgtgtacgatgtgggaagacctttagatttggtttctaccttactgaacaccagagaattcacactggtgaaaagccctataaatgtaaagaatgtggaaaggcctttattcgtagagggaatcttaaagaacatctgaaaattcattctggtttaaaaccctatgac

SEQ ID NO: 202852 - DNA, 3147 bp, Homo sapiens
  Payload ID: 20007
  Gene Name: zinc finger protein 540
  Uniprot ID: Q8NDQ6
  ENST ID: ENST00000592533
  CDS Start-End: 333-2315
ggccctagcggcttggcggagctggagccctccctggcagtgcgtcggcgctgggctatggccccctcctctccgggggatcgtcgccttggtcccccgaccctaggagtcgggcagggcagaaccaggctaaagaaacgtccagcgtagcttcaaggatgcaccgcgtgatccctatcggatctccccgacgcgtcaggcctgcctagacggtgctgggagcgcgtctccttgaacgttgtcccgcctgggattgcgaggcttctcagaactttgcttctccagcagaataatcctgcggaagactgagcagttcttgtgagtgtaaaaccatggcccatgcattggtgacgttcagggatgtggctatagacttctctcagaaggaatgggagtgcctggacactacccagaggaaattgtacagagatgtgatgttggagaattataataacttggtctcactgggatattctggctcaaagccagatgtgattaccttactggagcaagggaaagagccctgcgtggtggcgagggatgtgacaggaagacagtgccccggtttgttatccaggcataagaccaagaaattatcttcagaaaaggacattcatgaaatcagtttatccaaagagagtataatagaaaaaagtaaaactcttcgtctgaaaggatccatttttagaaatgagtggcagaacaaaagtgagtttgagggtcaacagggacttaaagaaagatctatcagtcaaaagaaaatcgtctctaaaaaaatgtcaactgatagaaaacgtccctcttttactctgaatcagagaattcacaatagtgagaaaagctgtgactcacacttggttcaacatgggaaaatagattctgatgtgaaacatgattgtaaagaatgtgggagtacttttaataatgtctatcagcttactctccatcagaaaattcatactggtgaaaaatcctgtaaatgtgagaaatgtgggaaagtttttagtcatagctatcaacttactctgcatcagagatttcatactggtgagaaaccctatgaatgtcaagaatgtgggaagacctttactctttacccacaacttaatcgacatcagaaaattcacactggtaaaaaaccctatatgtgtaagaaatgtgataagggtttttttagtagattagaacttactcaacataaaagaattcatactggtaagaaatcttatgaatgtaaagaatgtggaaaagtttttcaacttattttctactttaaagaacatgagagaattcatacaggtaagaaaccctatgaatgtaaggagtgtgggaaagcttttagtgtatgcggacaacttacccgtcatcagaaaattcatactggtgtaaaaccctacgaatgtaaggaatgtggaaagacctttagacttagtttttaccttactgaacacagaagaactcatgcaggtaagaaaccttatgaatgtaaggagtgtgggaaatcatttaatgtgcgtggacagcttaatcggcataaaacaatccatactggtataaaaccttttgcatgtaaggtgtgtgagaaggcttttagttatagtggtgacctcagagtacattctagaattcatactggagagaaaccatatgaatgtaaggaatgcgggaaagcctttatgcttcgttcagtccttactgaacatcagagacttcatactggtgtgaagccctacgaatgtaaggaatgtgggaagacctttcgagttcgttctcaaattagtctacataagaaaattcatactgatgtgaagccctacaaatgtgtacgatgtgggaagacctttagatttggtttctaccttactgaacaccagagaattcacactggtgaaaagccctataaatgtaaagaatgtggaaaggcctttattcgtagagggaatcttaaagaacatctgaaaattcattctggtttaaaaccctatgactgtaaagaatgtgggaagtcctttagtcggcgtgggcagttcactgaacatcagaaaattcatacgggtgtaaaaccatacaaatgtaaagaatgtgggaaggcctttagtcgtagtgtagaccttagaatacatcaaagaattcatactggtgagaaaccctatgagtgtaaacaatgtgggaaggcctttagacttaattcacaccttactgaacatcagagaattcacactggtgagaaaccctatgagtgtaaggtatgtagaaaggcctttagacaatattcacatctttatcaacatcagaaaactcataatgtaatttaatataagaaaaggtttccatgtcatgctctatttatagaatatcaaaatatttatggccagaagttctgtcaatgtgttgatgtttttttacacatattaacttaataaatgtatgagtcttaaatacctcttagttctcattaaatttaggaaaattcacactagaaaataaagctgttaatgtaacagttgtggaaaagtgttctagcaacagcatatacttatcatcattgcctttccactactctactatctgtgtgatattagacaaaatatttgcttcttggtacctcagctgtaaaatgaaacacacctaaaagtgtggttgtttccaacatgtataatacagcaacaactatctggcccaaactgctttggattaatattggatattactgtttttattatcatcaacattattattagtggatttcttaataggaagatgcaatggagatgacaaatttggaaaaaccactcatcacttacatttcatgaagtacttctttgataaaatctgttatgggctgaatgtttgtgttcccgtaacaattcctatgttgaaacacgaatcccaaggtgatggtatttgaaggtagggcctttaggaggaaattaggtcatgagggtggagccttcatgagtggaattactgcctttataagaagaagccaaagagccagctagctctttcaaccacatgaggttacagcaagaagtcagcagtctacagtgcaaaagagggccttcaccagaacccaagcatgctggcaccttgaccttggactttcagcctccaaaactgtgagaaataaacctcagttgtttataa

SEQ ID NO: 202853 - DNA, 2349 bp, Homo sapiens
  Payload ID: 20007
  Gene Name: zinc finger protein 540
  Uniprot ID: Q8NDQ6
  ENST ID: ENST00000589117
  CDS Start-End: 339-2225
agtctacaactggaaaccggccggatcgtgtctgcgcaggcccagcagctaagatcgggtccggcgctccagaacagaacgatccctgaggctcccttgctcgaactgtgggacttaccctactatggtccgagcctaccctatttcattatactcaagtaacgccccagaaattccagagaatctcacacaaagaggttgagtcttgccgtggtgccttcaggggaatgtcatcccgggctagaagagctgcaaaaggctgtcaggcttctcagaactttgcttctccagcagaataatcctgcggaagactgagcagttcttgtgagtgtaaaaccatggcccatgcattggtgacgttcagggatgtggctatagacttctctcagaaggaatgggagtgcctggacactacccagaggaaattgtacagagatgtgatgttggagaattataataacttggtctcactgggtttgttatccaggcataagaccaagaaattatcttcagaaaaggacattcatgaaatcagtttatccaaagagagtataatagaaaaaagtaaaactcttcgtctgaaaggatccatttttagaaatgagtggcagaacaaaagtgagtttgagggtcaacagggacttaaagaaagatctatcagtcaaaagaaaatcgtctctaaaaaaatgtcaactgatagaaaacgtccctcttttactctgaatcagagaattcacaatagtgagaaaagctgtgactcacacttggttcaacatgggaaaatagattctgatgtgaaacatgattgtaaagaatgtgggagtacttttaataatgtctatcagcttactctccatcagaaaattcatactggtgaaaaatcctgtaaatgtgagaaatgtgggaaagtttttagtcatagctatcaacttactctgcatcagagatttcatactggtgagaaaccctatgaatgtcaagaatgtgggaagacctttactctttacccacaacttaatcgacatcagaaaattcacactggtaaaaaaccctatatgtgtaagaaatgtgataagggtttttttagtagattagaacttactcaacataaaagaattcatactggtaagaaatcttatgaatgtaaagaatgtggaaaagtttttcaacttattttctactttaaagaacatgagagaattcatacaggtaagaaaccctatgaatgtaaggagtgtgggaaagcttttagtgtatgcggacaacttacccgtcatcagaaaattcatactggtgtaaaaccctacgaatgtaaggaatgtggaaagacctttagacttagtttttaccttactgaacacagaagaactcatgcaggtaagaaaccttatgaatgtaaggagtgtgggaaatcatttaatgtgcgtggacagcttaatcggcataaaacaatccatactggtataaaaccttttgcatgtaaggtgtgtgagaaggcttttagttatagtggtgacctcagagtacattctagaattcatactggagagaaaccatatgaatgtaaggaatgcgggaaagcctttatgcttcgttcagtccttactgaacatcagagacttcatactggtgtgaagccctacgaatgtaaggaatgtgggaagacctttcgagttcgttctcaaattagtctacataagaaaattcatactgatgtgaagccctacaaatgtgtacgatgtgggaagacctttagatttggtttctaccttactgaacaccagagaattcacactggtgaaaagccctataaatgtaaagaatgtggaaaggcctttattcgtagagggaatcttaaagaacatctgaaaattcattctggtttaaaaccctatgactgtaaagaatgtgggaagtcctttagtcggcgtgggcagttcactgaacatcagaaaattcatacgggtgtaaaaccatacaaatgtaaagaatgtgggaaggcctttagtcgtagtgtagaccttagaatacatcaaagaattcatactggtgagaaaccctatgagtgtaaacaatgtgggaaggcctttagacttaattcacaccttactgaacatcagagaattcacactggtgagaaaccctatgagtgtaaggtatgtagaaaggcctttagacaatattcacatctttatcaacatcagaaaactcataatgtaatttaatataagaaaaggtttccatgtcatgctctatttatagaatatcaaaatatttatggccagaagttctgtcaatgtgttgatgtttttttacacatattaacttaataaatgtatgagtcttaaa

SEQ ID NO: 202854 - DNA, 563 bp, Homo sapiens
  Payload ID: 20007
  Gene Name: zinc finger protein 540
  ENST ID: ENST00000590588
  CDS Start-End: 264-563
agaacgatccctgaggctcccttgctcgaactgtgggacttaccctactatggtccgagcctaccctatttcattatactcaagtaacgccccagaaattccagagaatctcacacaaagaggttgagtcttgccgtggtgccttcaggggaatgtcatcccgggctagaagagctgcaaaaggctgtcaggcttctcagaactttgcttctccagcagaataatcctgcggaagactgagcagttcttgtgagtgtaaaaccatggcccatgcattggtgacgttcagggatgtggctatagacttctctcagaaggaatgggagtgcctggacactacccagaggaaattgtacagagatgtgatgttggagaattataataacttggtctcactggcaggatattctggctcaaagccagatgtgattaccttactggagcaagggaaagagccctgcgtggtggcgagggatgtgacaggaagacagtgccccggtttgttatccaggcataagaccaagaaattatcttcagaaaaggacattcatgaaatcagttta

SEQ ID NO: 202855 - DNA, 564 bp, Homo sapiens
  Payload ID: 20007
  Gene Name: zinc finger protein 540
  ENST ID: ENST00000586792
  CDS Start-End: 196-285
tttcattatactcaagtaacgccccagaaattccagagaatctcacacaaagaggttgagtcttgccgtggtgccttcaggggaatgtcatcccgggctagaagagctgcaaaaggctgtcaggcttctcagaactttgcttctccagcagaataatcctgcggaagactgagcagttcttgtgagtgtaaaaccatggcccatgtttgttatccaggcataagaccaagaaattatcttcagaaaaggacattcatgaaatcagtttatccaaagagagtataatagaaaaaagtaaaactcttcgtctgaaaggatccatttttagaaatgagtggcagaacaaaagtgagtttgagggtcaacagggacttaaagaaagatctatcagtcaaaagaaaatcgtctctaaaaaaatgtcaactgatagaaaacgtccctcttttactctgaatcagagaattcacaatagtgagaaaagctgtgactcacacttggttcaacatgggaaaatagattctgatgtgaaacatgattgtaaagaatgtgggagtacttttaata

SEQ ID NO: 202856 - DNA, 2573 bp, Homo sapiens
  Payload ID: 20008
  Gene Name: zinc finger protein 541
  ENST ID: ENST00000263351
  CDS Start-End: 1-2039
gccacagcttccagtggctccggaacctgccgggctgtcccaaaagcaaaggcaacaacgtgtttgttgtccacaagccctcggccgtgccctcgcgggagggctccgagtctggcccgggacccagcagcggaagcccctcggaggagtccccgcccggccccggcggtggcctggaggatgctctgcccttccctgccgcgctcctcagggtccccgcggaggccccgagcgaccccaggtcggccagcggggaagatgacccctgcgcccccaagaaggtcaaggtcgactgcgactccttcctgtgccagaaccccggggagcccggcctccaggaggcccagaaggcaggcgggctccctgcggatgcctcgccgctcttccgccagctcttcctcaagtcgcaggaacctcttgtgagccacgagcagatgcaggtgttccagatgatcaccaagtcccagcggatcttctcccatgcccaggtggcagcagtctcctcccagctccctgcgcccgagggcaaaccagccgccctgaggccgctgcaggggccgtggccgcagcagcccccaccactggctcctgctgtggactctctccacgccggccctggaaaccccgaggcagagggctccccagcccgcaggagaaaaaccacacccggggttcccagagaggcctcccccggcagcacgagacgagacgcaaaggggggactgaaagtggccgcggttccaacgccccttgcagcaccgtctctggacccttccaggaatccagacatctcttctctggccaagcagctgcgatcctctaaagggaccttggacctggaggacatcttcccctccacaggccaacggcagacccagttaggtggggaggagccaccaggagcctcgctgccagggaagcaggccccagccgagaatggcgcggcttcaaggatcacaaaaggtgaaaagggcccagcctgctcccggggtggaggctaccggctcttgggcaaccccagggccccgcgattctccggcttccggaaagagaaggcgaagatggatatgtgctgtgcggcttctccgagccaggtagccatggcctccttctcatcggccgggcccccggcagatccctccaagtccaagctgacaatattcagcagaatccagggtggaaacatctacaggctcccccatccggtgaaggaagagaatgtggcaggcagaggtaaccagcaaaacggcagtcccacagactggacgaagcccaggagcacttttgtctgcaagaactgcagccagatgttttatacggagaaagggctgagcagccacatgtgttttcacagcgaccagtggccgtcacctcgagggaagcaggaaccgcaggtgtttggcacagagttttgcaagccgctaagacaggtgctgaggccagaaggggacaggcatagtcccccaggaaccaagaagcccttggaccccacagctgcagcccctttggtggtcccccaatcgatccccgtggttccagtgacccgacacatagggagcatggccatgatccagacaaagacggtagctcagtgcgttgagtattattacatctggaaaaaaatgatcaagtttgactgtggccgagccccagggctagaaaagagggtcaagagagagccggaggaagtggaaaggacagaggaaaaggtcccatgcagccctcgggagagacccagccaccatccaactcccaagttaaagaccaagagttataggagggagtccatcctcagctccagcccaaatgcaggctccaagcggacccccgagctgttgggaagtgcagagagccagggcatttttccatgcagagagtgtgaaagggtgtttgacaagatcaagagtcgaaatgcccatatgaagcggcaccgccttcaggaccacgtggagcccatcatcagggtgaagtggccagtgaagcccttccagctaaaggaagaggagctgggagctgacatcggccccctgcagtggtgactcccgtggcagcaagtccgaatggggcctccagtgctgcccctcctcccttcggcctctccagggcgtttggggcacccctctgcctccccccaccctccctgtcccctgttggccaacctgcctgcaaacatggagggcatttggccacagataggcaggaggagctcagttgtcggacagctatgcagtccctgtccggtggtgctggaggctccactctccttaggttcatagtctctccccttctttcccttccacttctagagcagggaggcttggggaggggaaaatttagctctgggtagctcttaaatcttagcctcagttgtggggtttggtttcatgtgttagataaggccaagacttagagaatcagtgggaaaaaaccttgagatctccaacacgctgggcccctccctggggcggggactctaccttccagattcagtccctagtcttgcgatgaattctgcattgttcggtgttttttgtacatgtcaactcgtaaatctgattaaattgggttcttga

SEQ ID NO: 202857 - DNA, 4631 bp, Homo sapiens
  Payload ID: 20008
  Gene Name: zinc finger protein 541
  ENST ID: ENST00000314121
  CDS Start-End: 1-4098
atggaccagtacagccttggagacgagggtgccctcccatcagaaatgcacctcccttcattttcagagagccaagggctcaactgcagcgacaccctcaaccgggatttgggtcccaacacgcgaggctttctttatgctggcctgagtggtctggacccggaccccagcctcccaacgcctgacatgtccagcgaggtgctggaggacaacttagacaccttgtccctgtactccgggaaggacagtgattctgtgaagctgctggaggagtacgcagattcggagtctcaggcatccttacaagacctggggctaggtgtgcttaaggctaaagaggctgacgaaggaggaagggccacctcggggagtgccaggaaaggaaagcggcagcacagttcccctcaaaacccacttctggactgcagcctgtgcgggaaggtgttcagcagcgccagttctctgagcaagcactacctgacacacagccaggaaaggaagcacgtctgcaaaatctgcagcaaggcctttaagcgccaggaccacctgaccgggcacatgctcacccaccagaagacaaagcccttcgtgtgcatcgagcagggctgcagcaagagctactgcgactaccgctctctgcgccggcactacgaggtccatcacggcctgtgcatcctgaaggaagcccccccggaggaagaggcctgcggggactccccccacgcccacgagtcggccggccagccgccccccagcagcctgcggtccctggtgcccccagaggccaggtcccccggctccctcctgccccaccgggacctcctgcgccgcatcgtgagtagcatcgtccaccagaagaccccttctcctggcccagccccggcgggggcttcagacagcgaagggaggaacactgcctgtccctgccccgcctcatcggggtcctcgtcctgcaccccagccggcccccacgcggccccagcagcgctggacaccgagcttcccgaggagccttgcctcccacagaaagagccggccactgacgtgttcacagcccctaattccagggccgccgagaacggcgcccccgacccgccagagccggagccagataccgcgctgctccaggcccggtccaccgcggagtgctggcccgaaggcggctccgtgcctgcctgcctgcctctcttccgaggccagacggtccctgccagttcccagccatcgagccacagcttccagtggctccggaacctgccgggctgtcccaaaagcaaaggcaacaacgtgtttgttgtccacaagccctcggccgtgccctcgcgggagggctccgagtctggcccgggacccagcagcggaagcccctcggaggagtccccgcccggccccggcggtggcctggaggatgctctgcccttccctgccgcgctcctcagggtccccgcggaggccccgagcgaccccaggtcggccagcggggaagatgacccctgcgcccccaagaaggtcaaggtcgactgcgactccttcctgtgccagaaccccggggagcccggcctccaggaggcccagaaggcaggcgggctccctgcggatgcctcgccgctcttccgccagctcttcctcaagtcgcaggaacctcttgtgagccacgagcagatgcaggtgttccagatgatcaccaagtcccagcggatcttctcccatgcccaggtggcagcagtctcctcccagctccctgcgcccgagggcaaaccagccgccctgaggccgctgcaggggccgtggccgcagcagcccccaccactggctcctgctgtggactctctccacgccggccctggaaaccccgaggcagagggctccccagcccgcaggagaaaaaccacacccggggttcccagagaggcctcccccggcagcacgagacgagacgcaaaggggggactgaaagtggccgcggttccaacgccccttgcagcaccgtctctggacccttccaggaatccagacatctcttctctggccaagcagctgcgatcctctaaagggaccttggacctggaggacatcttcccctccacaggccaacggcagacccagttaggtggggaggagccaccaggagcctcgctgccagggaagcaggccccagccgagaatggcgcggcttcaaggatcacaaaaggtgaaaagggcccagcctgctcccggggtggaggctaccggctcttgggcaaccccagggccccgcgattctccggcttccggaaagagaaggcgaagatggatatgtgctgtgcggcttctccgagccaggtagccatggcctccttctcatcggccgggcccccggcagatccctccaagtccaagctgacaatattcagcagaatccagggtggaaacatctacaggctcccccatccggtgaaggaagagaatgtggcaggcagaggtaaccagcaaaacggcagtcccacagactggacgaagcccaggagcacttttgtctgcaagaactgcagccagatgttttatacggagaaagggctgagcagccacatgtgttttcacagcgaccagtggccgtcacctcgagggaagcaggaaccgcaggtgtttggcacagagttttgcaagccgctaagacaggtgctgaggccagaaggggacaggcatagtcccccaggaaccaagaagcccttggaccccacagctgcagcccctttggtggtcccccaatcgatccccgtggttccagtgacccgacacatagggagcatggccatgatggagtggtgcagtaggtggcttcaggcgaccacctgtggttctaaacttcttcagggacaagagaaagacggggaggagcgagacagcaaggagagcagccagcagagaaagcggaagaagcggcccccaccctccacggctggggagcctggccctgcaggatgccaccagagccgcctgcggtcacccatgttcctggtggactgcctcctgaagggcttattccagtgctccccctacacaccacccccaatgctcagccccatccgggagggctctggggtgtacttcaacaccctctgttccacgtccactcaggccagccctgaccagctcatcagctccatgctcgatcaagtggatgggtcctttggcatctgtgtggtgaaggatgacaccaaaatcagcattgagccacatatcaatataggaagccggtttcaggcagagatcccggaactccaggagagatccctggctggaactgacgagcatgtagcttctctggtctggaagccatggggagatatgatgatcagctcagagacacaggatagagtgaccgagctctgcaatgtggcatgctccagcgtgatgccaggagggggcaccaacctggagctcgctctgcactgcctgcacgaggctcagggcaacgttcaggtcgccctggagactcttctgctccgagggccccacaagccacggacacacctgctcgctgactatcgctacacaggttcagacgtctggacccctatagagaagaggctttttaagaaggcgttctatgcccacaagaaggacttctacttgatacacaagatgatccagacaaagacggtagctcagtgcgttgagtattattacatctggaaaaaaatgatcaagtttgactgtggccgagccccagggctagaaaagagggtcaagagagagccggaggaagtggaaaggacagaggaaaaggtcccatgcagccctcgggagagacccagccaccatccaactcccaagttaaagaccaagagttataggagggagtccatcctcagctccagcccaaatgcaggctccaagcggacccccgagctgttgggaagtgcagagagccagggcatttttccatgcagagagtgtgaaagggtgtttgacaagatcaagagtcgaaatgcccatatgaagcggcaccgccttcaggaccacgtggagcccatcatcagggtgaagtggccagtgaagcccttccagctaaaggaagaggagctgggagctgacatcggccccctgcagtggtgactcccgtggcagcaagtccgaatggggcctccagtgctgcccctcctcccttcggcctctccagggcgtttggggcacccctctgcctccccccaccctccctgtcccctgttggccaacctgcctgcaaacatggagggcatttggccacagataggcaggaggagctcagttgtcggacagctatgcagtccctgtccggtggtgctggaggctccactctccttaggttcatagtctctccccttctttcccttccacttctagagcagggaggcttggggaggggaaaatttagctctgggtagctcttaaatcttagcctcagttgtggggtttggtttcatgtgttagataaggccaagacttagagaatcagtgggaaaaaaccttgagatctccaacacgctgggcccctccctggggcggggactctaccttccagattcagtccctagtcttgcgatgaattctgcattgttcggtgttttttgtacatgtcaactcgtaaatctgattaaattgggttcttg

SEQ ID NO: 202858 - DNA, 4580 bp, Homo sapiens
  Payload ID: 20008
  Gene Name: zinc finger protein 541
  Uniprot ID: Q9H0D2
  ENST ID: ENST00000391901
  CDS Start-End: 1-4041
atggaccagtacagccttggagacgagggtgccctcccatcagaaatgcacctcccttcattttcagagagccaagggctcaactgcagcgacaccctcaaccgggatttgggtcccaacacgcgaggctttctttatgctggcctgagtggtctggacccggaccccagcctcccaacgcctgacatgtccagcgaggtgctggaggacaacttagacaccttgtccctgtactccgggaaggacagtgattctgtgaagctgctggaggagtacgcagattcggagtctcaggcatccttacaagacctggggctaggtgtgcttaaggctaaagaggctgacgaaggaggaagggccacctcggggagtgccaggaaaggaaagcggcagcacagttcccctcaaaacccacttctggactgcagcctgtgcgggaaggtgttcagcagcgccagttctctgagcaagcactacctgacacacagccaggaaaggaagcacgtctgcaaaatctgcagcaaggcctttaagcgccaggaccacctgaccgggcacatgctcacccaccagaagacaaagcccttcgtgtgcatcgagcagggctgcagcaagagctactgcgactaccgctctctgcgccggcactacgaggtccatcacggcctgtgcatcctgaaggaagcccccccggaggaagaggcctgcggggactccccccacgcccacgagtcggccggccagccgccccccagcagcctgcggtccctggtgcccccagaggccaggtcccccggctccctcctgccccaccgggacctcctgcgccgcatcgtgagtagcatcgtccaccagaagaccccttctcctggcccagccccggcgggggcttcagacagcgaagggaggaacactgcctgtccctgccccgcctcatcggggtcctcgtcctgcaccccagccggcccccacgcggccccagcagcgctggacaccgagcttcccgaggagccttgcctcccacagaaagagccggccactgacgtgttcacagcccctaattccagggccgccgagaacggcgcccccgacccgccagagccggagccagataccgcgctgctccaggcccggtccaccgcggagtgctggcccgaaggcggctccgtgcctgcctgcctgcctctcttccgaggccagacggtccctgccagttcccagccatcgagccacagcttccagtggctccggaacctgccgggctgtcccaaaagcaaaggcaacaacgtgtttgttgtccacaagccctcggccgtgccctcgcgggagggctccgagtctggcccgggacccagcagcggaagcccctcggaggagtccccgcccggccccggcggtggcctggaggatgctctgcccttccctgccgcgctcctcagggtccccgcggaggccccgagcgaccccaggtcggccagcggggaagatgacccctgcgcccccaagaaggtcaaggtcgactgcgactccttcctgtgccagaaccccggggagcccggcctccaggaggcccagaaggcaggcgggctccctgcggatgcctcgccgctcttccgccagctcttcctcaagtcgcaggaacctcttgtgagccacgagcagatgcaggtgttccagatgatcaccaagtcccagcggatcttctcccatgcccaggtggcagcagtctcctcccagctccctgcgcccgagggcaaaccagccgccctgaggccgctgcaggggccgtggccgcagcagcccccaccactggctcctgctgtggactctctccacgccggccctggaaaccccgaggcagagggctccccagcccgcaggagaaaaaccacacccggggttcccagagaggcctcccccggcagcacgagacgagacgcaaaggggggactgaaagtggccgcggttccaacgccccttgcagcaccgtctctggacccttccaggaatccagacatctcttctctggccaagcagctgcgatcctctaaagggaccttggacctggaggacatcttcccctccacaggccaacggcagacccagttaggtggggaggagccaccaggagcctcgctgccagggaagcaggccccagccgagaatggcgcggcttcaaggatcacaaaaggtgaaaagggcccagcctgctcccggggtggaggctaccggctcttgggcaaccccagggccccgcgattctccggcttccggaaagagaaggcgaagatggatatgtgctgtgcggcttctccgagccaggtagccatggcctccttctcatcggccgggcccccggcagatccctccaagtccaagctgacaatattcagcagaatccagggtggaaacatctacaggctcccccatccggtgaaggaagagaatgtggcaggcagaggtaaccagcaaaacggcagtcccacagactggacgaagcccaggagcacttttgtctgcaagaactgcagccagatgttttatacggagaaagggctgagcagccacatgtgttttcacagcgaccagtggccgtcacctcgagggaagcaggaaccgcaggtgtttggcacagagttttgcaagccgctaagacaggtgctgaggccagaaggggacaggcatagtcccccaggaaccaagaagcccttggaccccacagctgcagcccctttggtggtcccccaatcgatccccgtggttccagtgacccgacacatagggagcatggccatgggacaagagaaagacggggaggagcgagacagcaaggagagcagccagcagagaaagcggaagaagcggcccccaccctccacggctggggagcctggccctgcaggatgccaccagagccgcctgcggtcacccatgttcctggtggactgcctcctgaagggcttattccagtgctccccctacacaccacccccaatgctcagccccatccgggagggctctggggtgtacttcaacaccctctgttccacgtccactcaggccagccctgaccagctcatcagctccatgctcgatcaagtggatgggtcctttggcatctgtgtggtgaaggatgacaccaaaatcagcattgagccacatatcaatataggaagccggtttcaggcagagatcccggaactccaggagagatccctggctggaactgacgagcatgtagcttctctggtctggaagccatggggagatatgatgatcagctcagagacacaggatagagtgaccgagctctgcaatgtggcatgctccagcgtgatgccaggagggggcaccaacctggagctcgctctgcactgcctgcacgaggctcagggcaacgttcaggtcgccctggagactcttctgctccgagggccccacaagccacggacacacctgctcgctgactatcgctacacaggttcagacgtctggacccctatagagaagaggctttttaagaaggcgttctatgcccacaagaaggacttctacttgatacacaagatgatccagacaaagacggtagctcagtgcgttgagtattattacatctggaaaaaaatgatcaagtttgactgtggccgagccccagggctagaaaagagggtcaagagagagccggaggaagtggaaaggacagaggaaaaggtcccatgcagccctcgggagagacccagccaccatccaactcccaagttaaagaccaagagttataggagggagtccatcctcagctccagcccaaatgcaggctccaagcggacccccgagctgttgggaagtgcagagagccagggcatttttccatgcagagagtgtgaaagggtgtttgacaagatcaagagtcgaaatgcccatatgaagcggcaccgccttcaggaccacgtggagcccatcatcagggtgaagtggccagtgaagcccttccagctaaaggaagaggagctgggagctgacatcggccccctgcagtggtgactcccgtggcagcaagtccgaatggggcctccagtgctgcccctcctcccttcggcctctccagggcgtttggggcacccctctgcctccccccaccctccctgtcccctgttggccaacctgcctgcaaacatggagggcatttggccacagataggcaggaggagctcagttgtcggacagctatgcagtccctgtccggtggtgctggaggctccactctccttaggttcatagtctctccccttctttcccttccacttctagagcagggaggcttggggaggggaaaatttagctctgggtagctcttaaatcttagcctcagttgtggggtttggtttcatgtgttagataaggccaagacttagagaatcagtgggaaaaaaccttgagatctccaacacgctgggcccctccctggggcggggactctaccttccagattcagtccctagtcttgcgatgaattctgcattgttcggtgttttttgtacatgtcaactcgtaaatctgattaaattgggttcttgagctgc

SEQ ID NO: 202859 - DNA, 2600 bp, Homo sapiens
  Payload ID: 20008
  Gene Name: zinc finger protein 541
  ENST ID: ENST00000595558
  CDS Start-End: 1-2600
ccaaaagcaaaggcaacaacgtgtttgttgtccacaagccctcggccgtgccctcgcgggagggctccgagtctggcccgggacccagcagcggaagcccctcggaggagtccccgcccggccccggcggtggcctggaggatgctctgcccttccctgccgcgctcctcagggtccccgcggaggccccgagcgaccccaggtcggccagcggggaagatgacccctgcgcccccaagaaggtcaaggtcgactgcgactccttcctgtgccagaaccccggggagcccggcctccaggaggcccagaaggcaggcgggctccctgcggatgcctcgccgctcttccgccagctcttcctcaagtcgcaggaacctcttgtgagccacgagcagatgcaggtgttccagatgatcaccaagtcccagcggatcttctcccatgcccaggtggcagcagtctcctcccagctccctgcgcccgagggcaaaccagccgccctgaggccgctgcaggggccgtggccgcagcagcccccaccactggctcctgctgtggactctctccacgccggccctggaaaccccgaggcagagggctccccagcccgcaggagaaaaaccacacccggggttcccagagaggcctcccccggcagcacgagacgagacgcaaaggggggactgaaagtggccgcggttccaacgccccttgcagcaccgtctctggacccttccaggaatccagacatctcttctctggccaagcagctgcgatcctctaaagggaccttggacctggaggacatcttcccctccacaggccaacggcagacccagttaggtggggaggagccaccaggagcctcgctgccagggaagcaggccccagccgagaatggcgcggcttcaaggatcacaaaaggtgaaaagggcccagcctgctcccggggtggaggctaccggctcttgggcaaccccagggccccgcgattctccggcttccggaaagagaaggcgaagatggatatgtgctgtgcggcttctccgagccaggtagccatggcctccttctcatcggccgggcccccggcagatccctccaagtccaagctgacaatattcagcagaatccagggtggaaacatctacaggctcccccatccggtgaaggaagagaatgtggcaggcagaggtaaccagcaaaacggcagtcccacagactggacgaagcccaggagcacttttgtctgcaagaactgcagccagatgttttatacggagaaagggctgagcagccacatgtgttttcacagcgaccagtggccgtcacctcgagggaagcaggaaccgcagggacaagagaaagacggggaggagcgagacagcaaggagagcagccagcagagaaagcggaagaagcggcccccaccctccacggctggggagcctggccctgcaggatgccaccagagccgcctgcggtcacccatgttcctggtggactgcctcctgaagggcttattccagtgctccccctacacaccacccccaatgctcagccccatccgggagggctctggggtgtacttcaacaccctctgttccacgtccactcaggccagccctgaccagctcatcagctccatgctcgatcaagtggatgggtcctttggcatctgtgtggtgaaggatgacaccaaaatcagcattgagccacatatcaatataggaagccggtttcaggcagagatcccggaactccaggagagatccctggctggaactgacgagcatgtagcttctctggtctggaagccatggggagatatgatgatcagctcagagacacaggatagagtgaccgagctctgcaatgtggcatgctccagcgtgatgccaggagggggcaccaacctggagctcgctctgcactgcctgcacgaggctcagggcaacgttcaggtcgccctggagactcttctgctccgagggccccacaagccacggacacacctgctcgctgactatcgctacacaggttcagacgtctggacccctatagagaagaggctttttaagaaggcgttctatgcccacaagaaggacttctacttgatacacaagatgatccagacaaagacggtagctcagtgcgttgagtattattacatctggaaaaaaatgatcaagtttgactgtggccgagccccagggctagaaaagagggtcaagagagagccggaggaagtggaaaggacagaggaaaaggtcccatgcagccctcgggagagacccagccaccatccaactcccaagttaaagaccaagagttataggagggagtccatcctcagctccagcccaaatgcaggctccaagcggacccccgagctgttgggaagtgcagagagccagggcatttttccatgcagagagtgtgaaagggtgtttgacaagatcaagagtcgaaatgcccatatgaagcggcaccgccttcaggaccacgtggagcccatcatcagggtgaagtggccagtgaagcccttccagctaaaggaagaggagctgggagctgacatcggccccctgcagtggtga

SEQ ID NO: 202860 - DNA, 3659 bp, Homo sapiens
  Payload ID: 20009
  Gene Name: zinc finger protein 543
  Uniprot ID: Q08ER8
  ENST ID: ENST00000321545
  CDS Start-End: 346-2148
ggaacagtgtggggcctggaccgctgggtaggcgcgtccagcggcctgagcaggggagggtaatgaggctgttacgcgccttctccgcatcttggcgggagcctgacgccccgcttcttccctaacggggtgttccaccggcgcctgccgaggcctaggcctccgcagccgccctccgtctcctcagccccgacgctgcgcccgctttgtgcgcatttttctctggggaaactgaggctccgagtgcgaaagtcagccgaggtcgccccgcccaggacagagaagggctgggggtcggctgagccgcggcattcccgggccccgctagggctgcagggtctcaggatggcagcctcggcgcaggtgtctgtgacctttgaggatgtggctgtgacattcacccaggaggagtggggacagttggatgcagcccagagaaccttgtatcaggaggtgatgctggagacctgcggacttctcatgtctctgggctgtcctttgttcaaaccagagctgatctaccagttggatcacagacaggagctatggatggctacaaaagacctctcccaaagctcctatccaggtgacaacacaaaacccaagaccacagagcctaccttttctcacctggccttgcctgaggaagtcttactccaggaacaactgacacaaggagcctcaaagaactcccaattagggcaatccaaggatcaggatgggccatctgaaatgcaagaagtccacttgaaaatagggataggcccccagcgggggaagctgctggagaaaatgagttctgaacgtgatggtttggggtcagatgatggtgtatgtacaaagattacacagaaacaagtttcaacagaaggtgatctctatgaatgtgattcacatggaccagttacagatgccttgattcgcgaagagaaaaattcctataaatgtgaggaatgcgggaaagtgtttaaaaagaatgccctccttgttcagcatgaacggattcacactcaagtgaagccctatgaatgcacagagtgtgggaaaacctttagcaagagcactcatcttcttcagcacctcatcatccacactggggagaagccctataagtgcatggagtgtgggaaggcttttaaccgcaggtcacacctcacacggcaccagcggattcacagtggagagaagccttataagtgcagtgaatgtggaaaggccttcacccaccgctccacttttgtcttgcatcacaggagccacactggagaaaaaccctttgtgtgcaaagagtgtggcaaagcctttcgagataggccaggtttcattcgacactacatcatccacacgggagagaagccctatgagtgcattgagtgtgggaaggccttcaaccgccggtcatacctcacgtggcaccaacagattcacactggagtgaaaccctttgaatgcaacgagtgtggaaaagctttttgcgagagtgcagacctcattcaacactacattatccacactggggagaagccctataagtgcatggagtgtgggaaggcgttcaaccgtaggtcacacctcaagcagcatcaacggattcacactggggagaagccttatgaatgcagtgaatgtggaaaggccttcacccactgctccacttttgtcttgcataaaaggacccacacaggagaaaaaccctatgaatgcaaagaatgtggaaaagcctttagtgatagggcagacctcattcgccacttcagcatccacactggagagaaaccctatgagtgcgtggagtgtggaaaggccttcaaccgcagctcacacctcacgaggcaccaacagattcacactggagagaaaccctatgaatgcatccagtgtgggaaagccttttgccggagcgcaaaccttattcgacactccatcattcacactggagagaagccgtatgaatgcagtgagtgtggaaaggcttttaatcgcggctcatccctcacacatcatcaaaggattcatactgggagaaaccctaccattgtaacagatgtgggaagaccttttatgactgcacagacttcagtcaacatccaggaacttttattagggaaagagtttttgaatatcaccactgaagaaaatctgtggtgaaagggaacatcttaccatctggccattcacactgaagagaaacttcataagcatcctctctttgagaaaacgtgtaatagatgatcatttgtcgtctaaacaatcaagttagaaattgaaccagcctggagtcttattctccacctgagaattcacccatgagagagacccagtggttgctatgcacttaggaaaactttcagccacatctttcttcttagtttacagtgaaatattatctcagggatattttttttttttttttgagacggagtctcgctctgtcgcccaggctggagtgcagtggcgggatctcggctcactgcaagctccgcctcccgggttcacgccattctcctgcctcagcctcccaagtagctgggactacaggcacccgccactacgcctggctaattttttgtatttttagtagagacggggtttcaccgttttagccgggatggtctcgatctcctgacctcgtgatccgcccgcctcagcctcccaaagtgctgggattacaggcgtgagccaccgcgcccggccatctcagggatatttaaacaaaggaagaggaaatatagggaagagaaagaaaccacagcttcttttagacttgtctgacaagcctatggcaattttgtcgtccctttgttattttatgtgggagagggaaatgtttcagaaacgaaagatctcatcccctttatttttctgtgtatgcattcactgctgcccagtgtcagaacagttatacaaacgagggcttgaaaacattttgtgaaaacttgcttagtcctgcaacgttctccactctcgaggtgcagaagcatacatctttataaaaaatatggaggcttgagttatgaaacacttttataaggagataaggatgtacatatgtttggacacattgtccacttcagatgcttgtttaaaaaaatgtttcaccatgtgtctttacccaatacacatactttttcttgatgtggatttactttttttttttttttttaagttttcctgggatagggatgatagtgtaattgttcatgcccacagtaatcctgggaatcttagttttttcctatgattgtggtttctcagcttctttacctctcctttgagttaggtccacctcagttttctaaaggtcaaattaaggcccccccaaaaatacagtatgtagctgaattcctttgaaagatcatgataaactcagaagaacaaacatagaaggaatgtcatttttaatctttttaaagagtgtgtgaaaattcactttaactggaattttaacaggcaagccggcatgcatatatgtagggatgtgtgactttcacagttgtcaccatggacttaggcttgattaaaatgctacacatttagagcgttttgtaattccttttttatatttttaagactagattttgagccatgtgatagttttacctcatattaaatatattgtacagaagtaaaaataatcatgtattcactttgaactcctc

SEQ ID NO: 202861 - DNA, 3547 bp, Homo sapiens
  Payload ID: 20010
  Gene Name: zinc finger protein 544
  Uniprot ID: Q6NX49
  ENST ID: ENST00000269829
  CDS Start-End: 62-2209
agactggtcttctgaggacctctgccctctacacagcggcctcttcaggtgcagggaggaaatggaagcacgttctatgctggttccaccccaggcatctgtgtgcttcgaggatgtggctatggcattcacacaggaggagtgggaacagctggacctggcccagaggacactgtaccgagaggtgacactggagacctgggagcatattgtctccctggggcttttcctttccaaatctgatgtgatctctcagctggagcaagaagaggacctgtgcagggcagagcaggaggccccccgagactggaaagctacccttgaggagaataggttgaattctgaaaaagatcgagctagggaagaactatcccaccacgtggaagtgtacaggagtggaccggaggagccaccctctttggtattaggaaaagtgcaagatcagagcaaccagttaagggaacaccaggagaactccttgaggttcatggtactcacctcagagagactgtttgctcaaagggaacattgtgagcttgaacttgggggaggttattctctaccttctactttaagccttctacctacaacattacctacaagtacaggtttccctaagcccaactcacaagttaaagagttgaaacaaaattcagctttcattaatcatgagaaaaatggagcagatgggaagcactgtgagagtcatcagtgtgctagagctttctgtcagagtatttacttgagtaaacttggaaacgttgaaacaggaaagaaaaacccttatgaatatattgtcagtggtgactctctcaactatggttcctccctttgttttcatggtagaactttttcagtgaagaaaagtgatgactgtaaggattatggaaacctcttcagtcacagtgtgtctctgaatgaacagaagccagtgcattttgggaaaagtcagtatgagtgtgatgagtgcagggaaacctgttctgagagtctgtgccttgtacaaacagaaagaagtggccctggagagacccccttcagatgtgaggaacgctgtgctgccttccccatggcctcatctttttctgactgtaacatcattcagactacagagaagccatctgtgtgtaatcagtgtggaaaatctttcagctgttgtaagctcatacaccagagaacacacactggagaaaagcccttcgaatgtactcagtgtgggaaatcttttagccagagctatgaccttgtcatacatcagaggacacacactggagagaagccctatgagtgtgacctgtgtgggaaatccttcacccagagatccaaacttattacacatcagcgaattcacactggagaaaaaccgtatcagtgtattgaatgcagaaaatccttcaggtggaactctaacctcattgtacatcagagaattcatactggagagaaaccgtatgagtgcactcactgtggaaagtccttcagccaaagctatgagttagttacacataaaagaacgcacactggagaaaaacccttcaaatgtactcagtgtgggaaatctttcagccagaagtatgaccttgttgtacatcagaggacacacactggagagaagccctatgagtgcaacctgtgtgggaaatccttctcccagagttccaaacttattacgcatcagcgaattcacactggagaaaaaccgtatcagtgtattgaatgtgggaaatccttcagatggaactctaacctcgtcatacatcagagaattcatactggagagaaaccgtacgattgcactcactgtggaaagtccttcagccaaagctatcagttagttgcacataaaagaactcacactggagaaaagccctatgaatgtaacgagtgtggaaaagccttcaatcgaagcactcagctcatcaggcatctgcaaattcacactggggagaagccgtacaaatgcaatcagtgcaataaagcctttgcaaggagctcctaccttgtgatgcatcagagaactcacactggtgagaaaccttttgagtgtagtcagtgtgggaaagccttttcagggagctctaaccttctttcccatcacagaattcattctggagagaaaccctatgaatgtagtgactgtgggaaatccttccggcagcaatctcaacttgtagtgcatcggcggacacatactggagagaaaccttaggagtgcagtcattgtgggaaagctttcatccagaggtctcccctcatcatgcaccagaggacgcatgtcggtgggaagagctatcagtgtgacgtgtattaagccagcggttgtgactcattgaacatcagaggacatatcctggagaaaagccctacgaatgcattgattgtgggaaagccttcaatgatcgctcaacccttagtaaacacgagaggacacacactggaggcaaaccctatgaatgtgaccattgcgagaaagcctttagccaacggtgtcaacttactaggcagcagagaattcatactggagagaagccctgtgaatgttaacaaatgtggaaaagcttccagttatgatactttccttattcaacatgagaaagctcatgggcaagaaactctatgaataaccaagatggagccgggtgcagttgccaacacttgtaatcccagcagtttgcgaggccgaggcaggtggatcacttgagcccaggagtttgaaaccagcctgggtaacatggcaaaatcctgtctttacaaaaaatacaaaaattagcctagcatggtggcgcatacctgtagtcctagctactcaggaggctgaggtgggaggatcacttgagcttgggaggcggtggttgcagtgagctgtgatcatgccatcacaccgctgccttgtgagagattgagacactctaaataaataataaccaagatgggaaatttccctgccagaccttgtttactagaaatcaggtggccaaaacatgactctcagagtggggcttcatgaccatgtgcatcagaattgcctggagtgtgcactgaaactgtgtattaccaagctcactctagccaactaaataaaaatctctggcagtaaaatccaggagtctgcagtttctaaaatcacacaggtgagtgggcatggtggctcatgcctgtaatcccagcactttggaaggctgaggtgggtggatcacctgaagtcagaagtttgagaccagcctggcaaacatggcaaaactgtctctattaaaaatacaggccaggggccgggcacggtgcctcacacctgtaatcccagcacttaggtaggccaaggtgggtggatcacgaggtcaggagattgagaccatcctggctaatatggtgaaaccctgtctctactaaaaatacaaaaaaattagctaggcatggtggcgggctcctgtagtcccagctactcaggaggctgaggcaggagaatggcgcgaacatgggaggcgtagcttgcagtgagctgagatcacactactgcactccagcctgggcaacagagcaagactgtctc

SEQ ID NO: 202862 - DNA, 555 bp, Homo sapiens
  Payload ID: 20010
  Gene Name: zinc finger protein 544
  ENST ID: ENST00000597240
  CDS Start-End: 265-555
accggaagcaccgccattggccggtgcgtgcaggtggcagccaagagcctcctggcacagcggcaccaggcaggtgacgcctattggaccccagaggtcatcccagctccagacgtggacacattttcttccaatgatgtctacggatgaggaaactgaggcctggagaggttaaagagacccgttcagagtcctacagtggcagactggtcttctgaggacctctgccctctacacagcggcctcttcaggtgcagggaggaaatggaagcacgttctatgctggttccaccccaggcatctgtgtgcttcgaggatgtggctatggcattcacacaggaggagtgggaacagctggacctggcccagaggacactgtaccgagaggtgacactggagacctgggagcatattgtctccctggggcttttcctttccaaatctgatgtgatctctcagctggagcaagaagaggacctgtgcagggcagagcaggaggccccccgagacggagtttcgctcttgttgcccagactggagtgcaatggcacaatc

SEQ ID NO: 202863 - DNA, 2274 bp, Homo sapiens
  Payload ID: 20010
  Gene Name: zinc finger protein 544
  ENST ID: ENST00000599953
  CDS Start-End: 351-2072
caggtggcagccaagagcctcctggcacagcggcaccaggcaggtgacgcctattggaccccagaggacactgtaccgagaggtgacactggagacctgggagcatattgtctccctggctggagcaagaagaggacctgtgcagggcagagcaggaggccccccgagactggaaagctacccttgaggagaataggttgaattctgaaaaagatcgagctagggaagaactatcccaccacgtggaagtgtacaggagtggaccggaggagccaccctctttggtattaggaaaagtgcaagatcagagcaaccagttaagggaacaccaggagaactccttgaggttcatggtactcacctcagagagactgtttgctcaaagggaacattgtgagcttgaacttgggggaggttattctctaccttctactttaagccttctacctacaacattacctacaagtacaggtttccctaagcccaactcacaagttaaagagttgaaacaaaattcagctttcattaatcatgagaaaaatggagcagatgggaagcactgtgagagtcatcagtgtgctagagctttctgtcagagtatttacttgagtaaacttggaaacgttgaaacaggaaagaaaaacccttatgaatatattgtcagtggtgactctctcaactatggttcctccctttgttttcatggtagaactttttcagtgaagaaaagtgatgactgtaaggattatggaaacctcttcagtcacagtgtgtctctgaatgaacagaagccagtgcattttgggaaaagtcagtatgagtgtgatgagtgcagggaaacctgttctgagagtctgtgccttgtacaaacagaaagaagtggccctggagagacccccttcagatgtgaggaacgctgtgctgccttccccatggcctcatctttttctgactgtaacatcattcagactacagagaagccatctgtgtgtaatcagtgtggaaaatctttcagctgttgtaagctcatacaccagagaacacacactggagaaaagcccttcgaatgtactcagtgtgggaaatcttttagccagagctatgaccttgtcatacatcagaggacacacactggagagaagccctatgagtgtgacctgtgtgggaaatccttcacccagagatccaaacttattacacatcagcgaattcacactggagaaaaaccgtatcagtgtattgaatgcagaaaatccttcaggtggaactctaacctcattgtacatcagagaattcatactggagagaaaccgtatgagtgcactcactgtggaaagtccttcagccaaagctatgagttagttacacataaaagaacgcacactggagaaaaacccttcaaatgtactcagtgtgggaaatctttcagccagaagtatgaccttgttgtacatcagaggacacacactggagagaagccctatgagtgcaacctgtgtgggaaatccttctcccagagttccaaacttattacgcatcagcgaattcacactggagaaaaaccgtatcagtgtattgaatgtgggaaatccttcagatggaactctaacctcgtcatacatcagagaattcatactggagagaaaccgtacgattgcactcactgtggaaagtccttcagccaaagctatcagttagttgcacataaaagaactcacactggagaaaagccctatgaatgtaacgagtgtggaaaagccttcaatcgaagcactcagctcatcaggcatctgcaaattcacactggggagaagccgtacaaatgcaatcagtgcaataaagcctttgcaaggagctcctaccttgtgatgcatcagagaactcacactggtgagaaaccttttgagtgtagtcagtgtgggaaagccttttcagggagctctaaccttctttcccatcacagaattcattctggagagaaaccctatgaatgtagtgactgtgggaaatccttccggcagcaatctcaacttgtagtgcatcggcggacacatactggagagaaaccttaggagtgcagtcattgtgggaaagctttcatccagaggtctcccctcatcatgcaccagaggacgcatgtcggtgggaagagctatcagtgtgacgtgtattaagccagcggttgtgactcattgaacatcagaggacatatcctggagaaaagccctacgaatgcattgattgtgggaaagccttcaatgatcgctcaaccct

SEQ ID NO: 202864 - DNA, 2818 bp, Homo sapiens
  Payload ID: 20010
  Gene Name: zinc finger protein 544
  Uniprot ID: Q6NX49
  ENST ID: ENST00000596652
  CDS Start-End: 235-2382
caggtggcagccaagagcctcctggcacagcggcaccaggcaggtgacgcctattggaccccagaggtcatcccagctccagacgtggacacattttcttccaatgatgtctacggatgaggaaactgaggcctggagaggttaaagagacccgttcagagtcctacagtggcagactggtcttctgaggacctctgccctctacacagcggcctcttcaggtgcagggaggaaatggaagcacgttctatgctggttccaccccaggcatctgtgtgcttcgaggatgtggctatggcattcacacaggaggagtgggaacagctggacctggcccagaggacactgtaccgagaggtgacactggagacctgggagcatattgtctccctggggcttttcctttccaaatctgatgtgatctctcagctggagcaagaagaggacctgtgcagggcagagcaggaggccccccgagactggaaagctacccttgaggagaataggttgaattctgaaaaagatcgagctagggaagaactatcccaccacgtggaagtgtacaggagtggaccggaggagccaccctctttggtattaggaaaagtgcaagatcagagcaaccagttaagggaacaccaggagaactccttgaggttcatggtactcacctcagagagactgtttgctcaaagggaacattgtgagcttgaacttgggggaggttattctctaccttctactttaagccttctacctacaacattacctacaagtacaggtttccctaagcccaactcacaagttaaagagttgaaacaaaattcagctttcattaatcatgagaaaaatggagcagatgggaagcactgtgagagtcatcagtgtgctagagctttctgtcagagtatttacttgagtaaacttggaaacgttgaaacaggaaagaaaaacccttatgaatatattgtcagtggtgactctctcaactatggttcctccctttgttttcatggtagaactttttcagtgaagaaaagtgatgactgtaaggattatggaaacctcttcagtcacagtgtgtctctgaatgaacagaagccagtgcattttgggaaaagtcagtatgagtgtgatgagtgcagggaaacctgttctgagagtctgtgccttgtacaaacagaaagaagtggccctggagagacccccttcagatgtgaggaacgctgtgctgccttccccatggcctcatctttttctgactgtaacatcattcagactacagagaagccatctgtgtgtaatcagtgtggaaaatctttcagctgttgtaagctcatacaccagagaacacacactggagaaaagcccttcgaatgtactcagtgtgggaaatcttttagccagagctatgaccttgtcatacatcagaggacacacactggagagaagccctatgagtgtgacctgtgtgggaaatccttcacccagagatccaaacttattacacatcagcgaattcacactggagaaaaaccgtatcagtgtattgaatgcagaaaatccttcaggtggaactctaacctcattgtacatcagagaattcatactggagagaaaccgtatgagtgcactcactgtggaaagtccttcagccaaagctatgagttagttacacataaaagaacgcacactggagaaaaacccttcaaatgtactcagtgtgggaaatctttcagccagaagtatgaccttgttgtacatcagaggacacacactggagagaagccctatgagtgcaacctgtgtgggaaatccttctcccagagttccaaacttattacgcatcagcgaattcacactggagaaaaaccgtatcagtgtattgaatgtgggaaatccttcagatggaactctaacctcgtcatacatcagagaattcatactggagagaaaccgtacgattgcactcactgtggaaagtccttcagccaaagctatcagttagttgcacataaaagaactcacactggagaaaagccctatgaatgtaacgagtgtggaaaagccttcaatcgaagcactcagctcatcaggcatctgcaaattcacactggggagaagccgtacaaatgcaatcagtgcaataaagcctttgcaaggagctcctaccttgtgatgcatcagagaactcacactggtgagaaaccttttgagtgtagtcagtgtgggaaagccttttcagggagctctaaccttctttcccatcacagaattcattctggagagaaaccctatgaatgtagtgactgtgggaaatccttccggcagcaatctcaacttgtagtgcatcggcggacacatactggagagaaaccttaggagtgcagtcattgtgggaaagctttcatccagaggtctcccctcatcatgcaccagaggacgcatgtcggtgggaagagctatcagtgtgacgtgtattaagccagcggttgtgactcattgaacatcagaggacatatcctggagaaaagccctacgaatgcattgattgtgggaaagccttcaatgatcgctcaacccttagtaaacacgagaggacacacactggaggcaaaccctatgaatgtgaccattgcgagaaagcctttagccaacggtgtcaacttactaggcagcagagaattcatactggagagaagccctgtgaatgttaacaaatgtggaaaagcttccagttatgatactttccttattcaacatgagaaagctcatgggcaagaaactctatgaataaccaagatggagccgggtgcag

SEQ ID NO: 202865 - DNA, 543 bp, Homo sapiens
  Payload ID: 20010
  Gene Name: zinc finger protein 544
  ENST ID: ENST00000596929
  CDS Start-End: 235-528
caggtggcagccaagagcctcctggcacagcggcaccaggcaggtgacgcctattggaccccagaggtcatcccagctccagacgtggacacattttcttccaatgatgtctacggatgaggaaactgaggcctggagaggttaaagagacccgttcagagtcctacagtggcagactggtcttctgaggacctctgccctctacacagcggcctcttcaggtgcagggaggaaatggaagcacgttctatgctggttccaccccaggcatctgtgtgcttcgaggatgtggctatggcattcacacaggaggagtgggaacagctggacctggcccagaggacactgtaccgagaggtgacactggagacctgggagcatattgtctccctggggcttttcctttccaaatctgatgtgatctctcagctggagcaagaagaggacctgtgcagggcagagcaggaggccccccgaggaacgaggcccagcaaaaagcagagacggtacagggccagaaggatctgagagagtgtggccagc

SEQ ID NO: 202866 - DNA, 895 bp, Homo sapiens
  Payload ID: 20010
  Gene Name: zinc finger protein 544
  ENST ID: ENST00000595981
  CDS Start-End: 232-651
gtggcagccaagagcctcctggcacagcggcaccaggcaggtgacgcctattggaccccagaggtcatcccagctccagacgtggacacattttcttccaatgatgtctacggatgaggaaactgaggcctggagaggttaaagagacccgttcagagtcctacagtggcagactggtcttctgaggacctctgccctctacacagcggcctcttcaggtgcagggaggaaatggaagcacgttctatgctggttccaccccaggcatctgtgtgcttcgaggatgtggctatggcattcacacaggaggagtgggaacagctggacctggcccagaggacactgtaccgagaggtgacactggagacctgggagcatattgtctccctggggcttttcctttccaaatctgatgtgatctctcagctggagcaagaagaggacctgtgcagggcagagcaggaggccccccgagagaaggggatgctgcctgggagctttttgggactcccaatagaagacagatttagtctcctggaaggctgcctgatccagttcccacagcagctgccacttgctcaggaacgaggcccagcaaaaagcagagacggtacagggccagaaggatctgagagagtgtggccagcttgagccctcaggagtcggccagaaggatctgagagagtgtggccagcttgagcccctcgggagtcagctcctccgtccccactggtaacgtcttcaccccttcaacacggtgtgaagggccatgtcatggttgatcttcagtccctcagactacaccatcagccccatgggggtgagcaaataacaagtaactatactgttccctgctatgtgtctggctcttggtaaaatttaaaaaagttaaaaa

SEQ ID NO: 202867 - DNA, 4109 bp, Homo sapiens
  Payload ID: 20010
  Gene Name: zinc finger protein 544
  ENST ID: ENST00000596677
  CDS Start-End: 270-494
caggtggcagccaagagcctcctggcacagcggcaccaggcaggtgacgcctattggaccccagaggtcatcccagctccagacgtggacacattttcttccaatgatgtctacggatgaggaaactgaggcctggagaggttaaagagacccgttcagagtcctacagtggcaggtaatggagccagtactttgacagcaggttgcaaaactggtcttctgaggacctctgccctctacacagcggcctcttcaggtgcagggaggaaatggaagcacgttctatgctggttccaccccaggcatctgtgtgcttcgaggatgtggctatggcattcacacaggaggagtgggaacagctggacctggcccagaggacactgtaccgagaggtgacactggagacctgggagcatattgtctccctggctggagcaagaagaggacctgtgcagggcagagcaggaggccccccgagcctgaagaaatggtagaattggtgcattaagaatatgaagtcagtgttgatgtctgagatgcaattatgagatccagaagtggaacagaaactgatattctaggactaagcaccagttaggagtctgtgtttgcttcctgtggctgctgtaaaaaatttccaccaacctgttggcttaaaacaatgcaaatttattctctaaaagttctggaggccacaagtccaaaatcaatgtcactggatcaaaatcaaggtgttgatatggttgtgctccctctggatgctccaaatggaaaacacatttctgtcttttccttctcctgttggttgcagcattctttccagtcttcagatatcttctgctgtgtcttctcatcacctcctctgtgtttcaaatctccctctgcctttctcctataggaacacttgtgattacatttagagcccccctggatagtacagaaaaaaaatccccatttaaaaatttttagcagggtgtggtagcaggcacctgtactcccaggctcaagcgattctcctgcctcggcctcccgaggagcttagactacaggcgcccaccaccacacctggctaattttttttttatttttattagagatgaggttttaccatgttgaccaagctggtctctaactcctgacctcaggtgatccacctgcctcagcctcccaaagttctgggattacaggtgtgagccactgcacctggcccctccctgcttattcttattcttctgccctctatttggggactagtgttacttagtcacttctttattatgtttgcttgtattttgcactttaccactgataccatgtttgctgatccatccctccctttcacagcctgcatacggattacagtttgtagtttggaaacaaaccagagacacttccattaaacagttgtctccttcatctccccctccccctccccctctgatgcttctccagtaacttaggcattttggatttctttcagactggaaagctacccttgaggagaataggttgaattctgaaaaagatcgagctagggaagaactatcccaccacgtggaagtgtacaggagtggaccggaggagccaccctctttggtattaggaaaagtgcaagatcagagcaaccagttaagggaacaccaggagaactccttgaggttcatggtactcacctcagagagactgtttgctcaaagggaacattgtgagcttgaacttgggggaggttattctctaccttctactttaagccttctacctacaacattacctacaagtacaggtttccctaagcccaactcacaagttaaagagttgaaacaaaattcagctttcattaatcatgagaaaaatggagcagatgggaagcactgtgagagtcatcagtgtgctagagctttctgtcagagtatttacttgagtaaacttggaaacgttgaaacaggaaagaaaaacccttatgaatatattgtcagtggtgactctctcaactatggttcctccctttgttttcatggtagaactttttcagtgaagaaaagtgatgactgtaaggattatggaaacctcttcagtcacagtgtgtctctgaatgaacagaagccagtgcattttgggaaaagtcagtatgagtgtgatgagtgcagggaaacctgttctgagagtctgtgccttgtacaaacagaaagaagtggccctggagagacccccttcagatgtgaggaacgctgtgctgccttccccatggcctcatctttttctgactgtaacatcattcagactacagagaagccatctgtgtgtaatcagtgtggaaaatctttcagctgttgtaagctcatacaccagagaacacacactggagaaaagcccttcgaatgtactcagtgtgggaaatcttttagccagagctatgaccttgtcatacatcagaggacacacactggagagaagccctatgagtgtgacctgtgtgggaaatccttcacccagagatccaaacttattacacatcagcgaattcacactggagaaaaaccgtatcagtgtattgaatgcagaaaatccttcaggtggaactctaacctcattgtacatcagagaattcatactggagagaaaccgtatgagtgcactcactgtggaaagtccttcagccaaagctatgagttagttacacataaaagaacgcacactggagaaaaacccttcaaatgtactcagtgtgggaaatctttcagccagaagtatgaccttgttgtacatcagaggacacacactggagagaagccctatgagtgcaacctgtgtgggaaatccttctcccagagttccaaacttattacgcatcagcgaattcacactggagaaaaaccgtatcagtgtattgaatgtgggaaatccttcagatggaactctaacctcgtcatacatcagagaattcatactggagagaaaccgtacgattgcactcactgtggaaagtccttcagccaaagctatcagttagttgcacataaaagaactcacactggagaaaagccctatgaatgtaacgagtgtggaaaagccttcaatcgaagcactcagctcatcaggcatctgcaaattcacactggggagaagccgtacaaatgcaatcagtgcaataaagcctttgcaaggagctcctaccttgtgatgcatcagagaactcacactggtgagaaaccttttgagtgtagtcagtgtgggaaagccttttcagggagctctaaccttctttcccatcacagaattcattctggagagaaaccctatgaatgtagtgactgtgggaaatccttccggcagcaatctcaacttgtagtgcatcggcggacacatactggagagaaaccttaggagtgcagtcattgtgggaaagctttcatccagaggtctcccctcatcatgcaccagaggacgcatgtcggtgggaagagctatcagtgtgacgtgtattaagccagcggttgtgactcattgaacatcagaggacatatcctggagaaaagccctacgaatgcattgattgtgggaaagccttcaatgatcgctcaacccttagtaaacacgagaggacacacactggaggcaaaccctatgaatgtgaccattgcgagaaagcctttagccaacggtgtcaacttactaggcagcagagaattcatactggagagaagccctgtgaatgttaacaaatgtggaaaagcttccagttatgatactttccttattcaacatgagaaagctcatgggcaagaaactctatgaataaccaagatggagccgggtgcagttgccaacacttgtaatcccagcagtttgcgaggccgaggcaggtggatcacttgagcccaggagtttgaaaccagcctgggtaacatggcaaaatcctgtctttacaaaaaatacaaaaattagcctagcatggtggcgcatacctgtagtcctagctactcaggaggctgaggtgggaggatcacttgagcttgggaggcggtggttgcagtgagctgtgatcatgccatcacaccgctgccttgtgagagattgagacactctaaataaataataaccaagatggg

SEQ ID NO: 202868 - DNA, 3587 bp, Homo sapiens
  Payload ID: 20010
  Gene Name: zinc finger protein 544
  ENST ID: ENST00000599227
  CDS Start-End: 585-812
gagatgacagcgccgagccccataggcgctagtcccgccctggacgccgaccgccgcctccacagtctcggcttcggttgctggatgagaaccagcgtggcccgtttaagggggaggggacaggcgctgcaaggagcagagccgcgggaagcaactccctaagccacaatgctagtcgcgaacacaggaaaaagctcatcccgccgccgcggggccccatgctcccgccggcaatgactatgcctgtgggagcaacggctaccggcgcgcggccttctgggagttgtttgttgcgcggagcgcgggcacgtccgccggccaccggaagcaccgccattggccggtgcgtgcaggtggcagccaagagcctcctggcacagcggcaccaggcaggtgacgcctattggaccccagaggtcatcccagctccagacgtggacacattttcttccaatgatgtctacggatgaggaaactgaggcctggagaggttaaagagacccgttcagagtcctacagtggcagactggtcttctgaggacctctgccctctacacagcggcctcttcaggtgcagggaggaaatggaagcacgttctatgctggttccaccccaggcatctgtgtgcttcgaggatgtggctatggcattcacacaggaggagtgggaacagctggacctggcccagaggacactgtaccgagaggtgacactggagacctgggagcatattgtctccctggctggagcaagaagaggacctgtgcagggcagagcaggaggccccccgagactggaaagctacccttgaggagaataggttgaattctgaaaaagatcgagctagggaagaactatcccaccacgtggaagtgtacaggagtggaccggaggagccaccctctttggtattaggaaaagtgcaagatcagagcaaccagttaagggaacaccaggagaactccttgaggttcatggtactcacctcagagagactgtttgctcaaagggaacattgtgagcttgaacttgggggaggttattctctaccttctactttaagccttctacctacaacattacctacaagtacaggtttccctaagcccaactcacaagttaaagagttgaaacaaaattcagctttcattaatcatgagaaaaatggagcagatgggaagcactgtgagagtcatcagtgtgctagagctttctgtcagagtatttacttgagtaaacttggaaacgttgaaacaggaaagaaaaacccttatgaatatattgtcagtggtgactctctcaactatggttcctccctttgttttcatggtagaactttttcagtgaagaaaagtgatgactgtaaggattatggaaacctcttcagtcacagtgtgtctctgaatgaacagaagccagtgcattttgggaaaagtcagtatgagtgtgatgagtgcagggaaacctgttctgagagtctgtgccttgtacaaacagaaagaagtggccctggagagacccccttcagatgtgaggaacgctgtgctgccttccccatggcctcatctttttctgactgtaacatcattcagactacagagaagccatctgtgtgtaatcagtgtggaaaatctttcagctgttgtaagctcatacaccagagaacacacactggagaaaagcccttcgaatgtactcagtgtgggaaatcttttagccagagctatgaccttgtcatacatcagaggacacacactggagagaagccctatgagtgtgacctgtgtgggaaatccttcacccagagatccaaacttattacacatcagcgaattcacactggagaaaaaccgtatcagtgtattgaatgcagaaaatccttcaggtggaactctaacctcattgtacatcagagaattcatactggagagaaaccgtatgagtgcactcactgtggaaagtccttcagccaaagctatgagttagttacacataaaagaacgcacactggagaaaaacccttcaaatgtactcagtgtgggaaatctttcagccagaagtatgaccttgttgtacatcagaggacacacactggagagaagccctatgagtgcaacctgtgtgggaaatccttctcccagagttccaaacttattacgcatcagcgaattcacactggagaaaaaccgtatcagtgtattgaatgtgggaaatccttcagatggaactctaacctcgtcatacatcagagaattcatactggagagaaaccgtacgattgcactcactgtggaaagtccttcagccaaagctatcagttagttgcacataaaagaactcacactggagaaaagccctatgaatgtaacgagtgtggaaaagccttcaatcgaagcactcagctcatcaggcatctgcaaattcacactggggagaagccgtacaaatgcaatcagtgcaataaagcctttgcaaggagctcctaccttgtgatgcatcagagaactcacactggtgagaaaccttttgagtgtagtcagtgtgggaaagccttttcagggagctctaaccttctttcccatcacagaattcattctggagagaaaccctatgaatgtagtgactgtgggaaatccttccggcagcaatctcaacttgtagtgcatcggcggacacatactggagagaaaccttaggagtgcagtcattgtgggaaagctttcatccagaggtctcccctcatcatgcaccagaggacgcatgtcggtgggaagagctatcagtgtgacgtgtattaagccagcggttgtgactcattgaacatcagaggacatatcctggagaaaagccctacgaatgcattgattgtgggaaagccttcaatgatcgctcaacccttagtaaacacgagaggacacacactggaggcaaaccctatgaatgtgaccattgcgagaaagcctttagccaacggtgtcaacttactaggcagcagagaattcatactggagagaagccctgtgaatgttaacaaatgtggaaaagcttccagttatgatactttccttattcaacatgagaaagctcatgggcaagaaactctatgaataaccaagatggagccgggtgcagttgccaacacttgtaatcccagcagtttgcgaggccgaggcaggtggatcacttgagcccaggagtttgaaaccagcctgggtaacatggcaaaatcctgtctttacaaaaaatacaaaaattagcctagcatggtggcgcatacctgtagtcctagctactcaggaggctgaggtgggaggatcacttgagcttgggaggcggtggttgcagtgagctgtgatcatgccatcacaccgctgccttgtgagagattgagacactctaaataaataataaccaagatgggaaatttccctgccagaccttgtttactagaaatcaggtggccaaaacatgactctcagagtggggcttcatgaccatgtgcatcagaattgcctggagtgtgcactgaaactgtgtattaccaagctcactctagccaactaaataaaaatctctggcagtaaaa

SEQ ID NO: 202869 - DNA, 2837 bp, Homo sapiens
  Payload ID: 20010
  Gene Name: zinc finger protein 544
  ENST ID: ENST00000600220
  CDS Start-End: 235-2298
caggtggcagccaagagcctcctggcacagcggcaccaggcaggtgacgcctattggaccccagaggtcatcccagctccagacgtggacacattttcttccaatgatgtctacggatgaggaaactgaggcctggagaggttaaagagacccgttcagagtcctacagtggcagactggtcttctgaggacctctgccctctacacagcggcctcttcaggtgcagggaggaaatggaagcacgttctatgctggttccaccccaggcatctgtgtgcttcgaggatgtggctatggcattcacacaggaggagtgggaacagctggacctggcccagaggacactgtaccgagaggtgacactggagacctgggagcatattgtctccctggactggaaagctacccttgaggagaataggttgaattctgaaaaagatcgagctagggaagaactatcccaccacgtggaagtgtacaggagtggaccggaggagccaccctctttggtattaggaaaagtgcaagatcagagcaaccagttaagggaacaccaggagaactccttgaggttcatggtactcacctcagagagactgtttgctcaaagggaacattgtgagcttgaacttgggggaggttattctctaccttctactttaagccttctacctacaacattacctacaagtacaggtttccctaagcccaactcacaagttaaagagttgaaacaaaattcagctttcattaatcatgagaaaaatggagcagatgggaagcactgtgagagtcatcagtgtgctagagctttctgtcagagtatttacttgagtaaacttggaaacgttgaaacaggaaagaaaaacccttatgaatatattgtcagtggtgactctctcaactatggttcctccctttgttttcatggtagaactttttcagtgaagaaaagtgatgactgtaaggattatggaaacctcttcagtcacagtgtgtctctgaatgaacagaagccagtgcattttgggaaaagtcagtatgagtgtgatgagtgcagggaaacctgttctgagagtctgtgccttgtacaaacagaaagaagtggccctggagagacccccttcagatgtgaggaacgctgtgctgccttccccatggcctcatctttttctgactgtaacatcattcagactacagagaagccatctgtgtgtaatcagtgtggaaaatctttcagctgttgtaagctcatacaccagagaacacacactggagaaaagcccttcgaatgtactcagtgtgggaaatcttttagccagagctatgaccttgtcatacatcagaggacacacactggagagaagccctatgagtgtgacctgtgtgggaaatccttcacccagagatccaaacttattacacatcagcgaattcacactggagaaaaaccgtatcagtgtattgaatgcagaaaatccttcaggtggaactctaacctcattgtacatcagagaattcatactggagagaaaccgtatgagtgcactcactgtggaaagtccttcagccaaagctatgagttagttacacataaaagaacgcacactggagaaaaacccttcaaatgtactcagtgtgggaaatctttcagccagaagtatgaccttgttgtacatcagaggacacacactggagagaagccctatgagtgcaacctgtgtgggaaatccttctcccagagttccaaacttattacgcatcagcgaattcacactggagaaaaaccgtatcagtgtattgaatgtgggaaatccttcagatggaactctaacctcgtcatacatcagagaattcatactggagagaaaccgtacgattgcactcactgtggaaagtccttcagccaaagctatcagttagttgcacataaaagaactcacactggagaaaagccctatgaatgtaacgagtgtggaaaagccttcaatcgaagcactcagctcatcaggcatctgcaaattcacactggggagaagccgtacaaatgcaatcagtgcaataaagcctttgcaaggagctcctaccttgtgatgcatcagagaactcacactggtgagaaaccttttgagtgtagtcagtgtgggaaagccttttcagggagctctaaccttctttcccatcacagaattcattctggagagaaaccctatgaatgtagtgactgtgggaaatccttccggcagcaatctcaacttgtagtgcatcggcggacacatactggagagaaaccttaggagtgcagtcattgtgggaaagctttcatccagaggtctcccctcatcatgcaccagaggacgcatgtcggtgggaagagctatcagtgtgacgtgtattaagccagcggttgtgactcattgaacatcagaggacatatcctggagaaaagccctacgaatgcattgattgtgggaaagccttcaatgatcgctcaacccttagtaaacacgagaggacacacactggaggcaaaccctatgaatgtgaccattgcgagaaagcctttagccaacggtgtcaacttactaggcagcagagaattcatactggagagaagccctgtgaatgttaacaaatgtggaaaagcttccagttatgatactttccttattcaacatgagaaagctcatgggcaagaaactctatgaataaccaagatggagccgggtgcagttgccaacacttgtaatcccagcagtttgcgaggccgaggcaggtggatcacttgagcccaggagtttgaaaccagcctgggtaacatggcaaaatcctgtct

SEQ ID NO: 202870 - DNA, 3516 bp, Homo sapiens
  Payload ID: 20010
  Gene Name: zinc finger protein 544
  ENST ID: ENST00000596825
  CDS Start-End: 514-741
ggaggtttcactgttagccgggtgcggccggagcgcaggaccaggccagagccgccccaagtgatctgggcgtgccggagaaacgagcagggcctgcgggggtccctcatgcggcgaggccgagcaagggcaggggcctgatgggatcgggatctctccggcctcagggacggggaaggccggtccagtcaggtttcccctgcaggagcgcccggctgggtctgagcttgtcgggaggctctcctgctgcagagctgggagggaacttatagtacctcgcaggtggcagccaagagcctcctggcacagcggcaccaggcaggtgacgcctattggaccccagaggtcatcccagctccagacgtggacacattttcttccaatgatgtctacggatgaggaaactgaggcctggagaggttaaagagacccgttcagagtcctacagtggcagactggtcttctgaggacctctgccctctacacagcggcctcttcaggtgcagggaggaaatggaagcacgttctatgctggttccaccccaggcatctgtgtgcttcgaggatgtggctatggcattcacacaggaggagtgggaacagctggacctggcccagaggacactgtaccgagaggtgacactggagacctgggagcatattgtctccctggctggagcaagaagaggacctgtgcagggcagagcaggaggccccccgagactggaaagctacccttgaggagaataggttgaattctgaaaaagatcgagctagggaagaactatcccaccacgtggaagtgtacaggagtggaccggaggagccaccctctttggtattaggaaaagtgcaagatcagagcaaccagttaagggaacaccaggagaactccttgaggttcatggtactcacctcagagagactgtttgctcaaagggaacattgtgagcttgaacttgggggaggttattctctaccttctactttaagccttctacctacaacattacctacaagtacaggtttccctaagcccaactcacaagttaaagagttgaaacaaaattcagctttcattaatcatgagaaaaatggagcagatgggaagcactgtgagagtcatcagtgtgctagagctttctgtcagagtatttacttgagtaaacttggaaacgttgaaacaggaaagaaaaacccttatgaatatattgtcagtggtgactctctcaactatggttcctccctttgttttcatggtagaactttttcagtgaagaaaagtgatgactgtaaggattatggaaacctcttcagtcacagtgtgtctctgaatgaacagaagccagtgcattttgggaaaagtcagtatgagtgtgatgagtgcagggaaacctgttctgagagtctgtgccttgtacaaacagaaagaagtggccctggagagacccccttcagatgtgaggaacgctgtgctgccttccccatggcctcatctttttctgactgtaacatcattcagactacagagaagccatctgtgtgtaatcagtgtggaaaatctttcagctgttgtaagctcatacaccagagaacacacactggagaaaagcccttcgaatgtactcagtgtgggaaatcttttagccagagctatgaccttgtcatacatcagaggacacacactggagagaagccctatgagtgtgacctgtgtgggaaatccttcacccagagatccaaacttattacacatcagcgaattcacactggagaaaaaccgtatcagtgtattgaatgcagaaaatccttcaggtggaactctaacctcattgtacatcagagaattcatactggagagaaaccgtatgagtgcactcactgtggaaagtccttcagccaaagctatgagttagttacacataaaagaacgcacactggagaaaaacccttcaaatgtactcagtgtgggaaatctttcagccagaagtatgaccttgttgtacatcagaggacacacactggagagaagccctatgagtgcaacctgtgtgggaaatccttctcccagagttccaaacttattacgcatcagcgaattcacactggagaaaaaccgtatcagtgtattgaatgtgggaaatccttcagatggaactctaacctcgtcatacatcagagaattcatactggagagaaaccgtacgattgcactcactgtggaaagtccttcagccaaagctatcagttagttgcacataaaagaactcacactggagaaaagccctatgaatgtaacgagtgtggaaaagccttcaatcgaagcactcagctcatcaggcatctgcaaattcacactggggagaagccgtacaaatgcaatcagtgcaataaagcctttgcaaggagctcctaccttgtgatgcatcagagaactcacactggtgagaaaccttttgagtgtagtcagtgtgggaaagccttttcagggagctctaaccttctttcccatcacagaattcattctggagagaaaccctatgaatgtagtgactgtgggaaatccttccggcagcaatctcaacttgtagtgcatcggcggacacatactggagagaaaccttaggagtgcagtcattgtgggaaagctttcatccagaggtctcccctcatcatgcaccagaggacgcatgtcggtgggaagagctatcagtgtgacgtgtattaagccagcggttgtgactcattgaacatcagaggacatatcctggagaaaagccctacgaatgcattgattgtgggaaagccttcaatgatcgctcaacccttagtaaacacgagaggacacacactggaggcaaaccctatgaatgtgaccattgcgagaaagcctttagccaacggtgtcaacttactaggcagcagagaattcatactggagagaagccctgtgaatgttaacaaatgtggaaaagcttccagttatgatactttccttattcaacatgagaaagctcatgggcaagaaactctatgaataaccaagatggagccgggtgcagttgccaacacttgtaatcccagcagtttgcgaggccgaggcaggtggatcacttgagcccaggagtttgaaaccagcctgggtaacatggcaaaatcctgtctttacaaaaaatacaaaaattagcctagcatggtggcgcatacctgtagtcctagctactcaggaggctgaggtgggaggatcacttgagcttgggaggcggtggttgcagtgagctgtgatcatgccatcacaccgctgccttgtgagagattgagacactctaaataaataataaccaagatgggaaatttccctgccagaccttgtttactagaaatcaggtggccaaaacatgactctcagagtggggcttcatgaccatgtgcatcagaattgcctggagtgtgcactgaaactgtgtattaccaagctcactctagccaactaaataaaaatctctggcagtaaaa

SEQ ID NO: 202871 - DNA, 588 bp, Homo sapiens
  Payload ID: 20010
  Gene Name: zinc finger protein 544
  ENST ID: ENST00000594384
  CDS Start-End: 265-492
accggaagcaccgccattggccggtgcgtgcaggtggcagccaagagcctcctggcacagcggcaccaggcaggtgacgcctattggaccccagaggtcatcccagctccagacgtggacacattttcttccaatgatgtctacggatgaggaaactgaggcctggagaggttaaagagacccgttcagagtcctacagtggcagactggtcttctgaggacctctgccctctacacagcggcctcttcaggtgcagggaggaaatggaagcacgttctatgctggttccaccccaggcatctgtgtgcttcgaggatgtggctatggcattcacacaggaggagtgggaacagctggacctggcccagaggacactgtaccgagaggtgacactggagacctgggagcatattgtctccctggctggagcaagaagaggacctgtgcagggcagagcaggaggccccccgagactggaaagctacccttgaggagaataggttgaattctgaaaaagatcgagctagggaagaactatcccaccacgtggaagtgtacaggagtggaccggaggagccaccctcttt

SEQ ID NO: 202872 - DNA, 2784 bp, Homo sapiens
  Payload ID: 20010
  Gene Name: zinc finger protein 544
  ENST ID: ENST00000600044
  CDS Start-End: 270-2333
caggtggcagccaagagcctcctggcacagcggcaccaggcaggtgacgcctattggaccccagaggtcatcccagctccagacgtggacacattttcttccaatgatgtctacggatgaggaaactgaggcctggagaggttaaagagacccgttcagagtcctacagtggcaggtaatggagccagtactttgacagcaggttgcaaaactggtcttctgaggacctctgccctctacacagcggcctcttcaggtgcagggaggaaatggaagcacgttctatgctggttccaccccaggcatctgtgtgcttcgaggatgtggctatggcattcacacaggaggagtgggaacagctggacctggcccagaggacactgtaccgagaggtgacactggagacctgggagcatattgtctccctggactggaaagctacccttgaggagaataggttgaattctgaaaaagatcgagctagggaagaactatcccaccacgtggaagtgtacaggagtggaccggaggagccaccctctttggtattaggaaaagtgcaagatcagagcaaccagttaagggaacaccaggagaactccttgaggttcatggtactcacctcagagagactgtttgctcaaagggaacattgtgagcttgaacttgggggaggttattctctaccttctactttaagccttctacctacaacattacctacaagtacaggtttccctaagcccaactcacaagttaaagagttgaaacaaaattcagctttcattaatcatgagaaaaatggagcagatgggaagcactgtgagagtcatcagtgtgctagagctttctgtcagagtatttacttgagtaaacttggaaacgttgaaacaggaaagaaaaacccttatgaatatattgtcagtggtgactctctcaactatggttcctccctttgttttcatggtagaactttttcagtgaagaaaagtgatgactgtaaggattatggaaacctcttcagtcacagtgtgtctctgaatgaacagaagccagtgcattttgggaaaagtcagtatgagtgtgatgagtgcagggaaacctgttctgagagtctgtgccttgtacaaacagaaagaagtggccctggagagacccccttcagatgtgaggaacgctgtgctgccttccccatggcctcatctttttctgactgtaacatcattcagactacagagaagccatctgtgtgtaatcagtgtggaaaatctttcagctgttgtaagctcatacaccagagaacacacactggagaaaagcccttcgaatgtactcagtgtgggaaatcttttagccagagctatgaccttgtcatacatcagaggacacacactggagagaagccctatgagtgtgacctgtgtgggaaatccttcacccagagatccaaacttattacacatcagcgaattcacactggagaaaaaccgtatcagtgtattgaatgcagaaaatccttcaggtggaactctaacctcattgtacatcagagaattcatactggagagaaaccgtatgagtgcactcactgtggaaagtccttcagccaaagctatgagttagttacacataaaagaacgcacactggagaaaaacccttcaaatgtactcagtgtgggaaatctttcagccagaagtatgaccttgttgtacatcagaggacacacactggagagaagccctatgagtgcaacctgtgtgggaaatccttctcccagagttccaaacttattacgcatcagcgaattcacactggagaaaaaccgtatcagtgtattgaatgtgggaaatccttcagatggaactctaacctcgtcatacatcagagaattcatactggagagaaaccgtacgattgcactcactgtggaaagtccttcagccaaagctatcagttagttgcacataaaagaactcacactggagaaaagccctatgaatgtaacgagtgtggaaaagccttcaatcgaagcactcagctcatcaggcatctgcaaattcacactggggagaagccgtacaaatgcaatcagtgcaataaagcctttgcaaggagctcctaccttgtgatgcatcagagaactcacactggtgagaaaccttttgagtgtagtcagtgtgggaaagccttttcagggagctctaaccttctttcccatcacagaattcattctggagagaaaccctatgaatgtagtgactgtgggaaatccttccggcagcaatctcaacttgtagtgcatcggcggacacatactggagagaaaccttaggagtgcagtcattgtgggaaagctttcatccagaggtctcccctcatcatgcaccagaggacgcatgtcggtgggaagagctatcagtgtgacgtgtattaagccagcggttgtgactcattgaacatcagaggacatatcctggagaaaagccctacgaatgcattgattgtgggaaagccttcaatgatcgctcaacccttagtaaacacgagaggacacacactggaggcaaaccctatgaatgtgaccattgcgagaaagcctttagccaacggtgtcaacttactaggcagcagagaattcatactggagagaagccctgtgaatgttaacaaatgtggaaaagcttccagttatgatactttccttattcaacatgagaaagctcatgggcaagaaactctatgaataaccaagatggagccgggtgcagttgccaacacttgta

SEQ ID NO: 202873 - DNA, 383 bp, Homo sapiens
  Payload ID: 20010
  Gene Name: zinc finger protein 544
  ENST ID: ENST00000627781
  CDS Start-End: 63-383
cagactggtcttctgaggacctctgccctctacacagcggcctcttcaggtgcagggaggaaatggaagcacgttctatgctggttccaccccaggcatctgtgtgcttcgaggatgtggctatggcattcacacaggaggagtgggaacagctggacctggcccagaggacactgtaccgagaggtgacactggagacctgggagcatattgtctccctggggcttttcctttccaaatctgatgtgatctctcagctggagcaagaagaggacctgtgcagggcagagcaggaggccccccgaggtacttcaggtctttcacaagtcacaggtgtagtggctgatgggagcttcaggttcccggtctgggacttcacataa

SEQ ID NO: 202874 - DNA, 7987 bp, Homo sapiens
  Payload ID: 20011
  Gene Name: zinc finger protein 546
  Uniprot ID: Q86UE3
  ENST ID: ENST00000347077
  CDS Start-End: 217-2727
caagggccctttacattgcgttcttaacggttcagtcaccttaaccgttattattcacttgcgggcgagaagtccgagctagggatcctgaaaaggagggaacaattgttgtagcaggtctaaaagttcaggtccaggaaatggaaacattgctttgcttttcctgaattgtccagtgacctatcccaggccttcctttccagtgaacaatggaccatgcaggtggaccctcctcttcacgggcctccaaatgactttctcatttttcaaatcattcctctgcactcactttctataatgccccggtttctctggattctgtgcttctccatggaggaaactcaaggagaactgacaagttcttgtggttctaaaaccatggccaatgtatctttggcatttagggatgtgtccatagacctctcccaagaggagtgggagtgcctggacgctgtgcagagggacttgtacaaggatgtgatgttggagaactacagcaacctggtctcactgggatataccattcctaagccagatgtgattactttattggagcaagagaaagagccctggatagtaatgagggaagggacaaggaattggttcacagatttggaatacaagtatattaccaagaatttgctttcagaaaagaatgtttgcaaaatctatttatctcaattgcagacaggggaaaaaagtaaaaacaccatccatgaggacaccattttcagaaatggtttgcagtgtaaacatgaatttgagagacaagagagacatcagatgggatgcgttagtcaaatgctaatccaaaaacaaatatctcatcctctacatccaaaaattcatgctagagagaaatcatatgaatgtaaggaatgtagaaaggcctttagacaacagtcataccttattcaacatctgagaattcacactggtgagagaccctataaatgtatggaatgtggaaaggccttttgtcgagtgggagaccttagagtacatcacacaatccatgctggggagagaccctatgaatgtaaagaatgtgggaaggcctttagacttcattatcaccttactgaacatcagagaatacattctggtgtgaaaccctacgagtgtaaggaatgtgggaaagcctttagtcgtgttagagaccttagagtacatcagacaattcatgctggagagagaccttatgaatgtaaagaatgtgggaaggcctttagacttcattatcaactaactgaacatcaaagaattcatactggtgagaggccttatgaatgtaaggtttgtggcaagacctttagggtacaacgacatattagtcaacatcagaaaattcatactggtgtcaaaccctataaatgtaatgaatgtgggaaggcctttagtcatggctcataccttgttcaacatcagaaaattcatactggtgaaaaaccctacgaatgtaaagaatgtggtaagtcctttagttttcatgcagaacttgctcgacatcgtagaattcatactggtgagaaaccctatgaatgtagagaatgtggaaaagcctttcgtcttcaaacggaacttactcggcatcatagaactcatactggtgagaaaccctatgaatgtaaggaatgtgggaaggcctttatttgtggttatcaacttactttacatctgagaactcacaccggtgagattccctatgaatgtaaggaatgtggaaaaaccttcagtagtcgctatcatctcactcaacactacagaattcatactggtgagaaaccctacatatgtaacgaatgtggaaaagcctttcgtcttcaaggagaacttacccgacatcacagaattcatacatgtgagaaaccctatgaatgtaaggaatgtgggaaggcttttattcatagcaatcaatttatttcacaccagcgaattcacaccagtgagagcacctacatatgtaaagaatgtgggaagatttttagtcgtcgctataatcttactcaacattttaaaattcatactggtgaaaaaccctacatatgtaatgaatgtgggaaagcctttcgatttcaaacagaacttactcagcatcacagaattcatactggtgaaaaaccctataaatgtacagaatgtgggaaggcctttattcgtagcactcatctcacgcaacatcacagaattcatactggtgagaaaccctacgaatgtacggaatgtgggaagacgtttagtcggcactatcatcttactcaacatcacagaggccatactggtgagaagccctacatatgtaatgaatgtgggaatgcttttatttgcagttatcgacttacattacatcaaagaattcacactggtgagcttccatatgaatgtaaggaatgtggaaagacctttagtcgtcggtatcatcttactcaacattttagacttcatactggtgagaaaccttatagctgtaaagaatgtgggaatgcctttcgtcttcaagcagaacttactcgacatcacatagttcacacgggtgagaaaccctataaatgtaaagaatgtgggaaagccttcagtgttaattcagaacttactcgacatcacagaattcatactggtgaaaaaccctatcaatgtaaagaatgtggaaaagcctttattcgtagtgatcaacttactttacatcagagaaatcatattagtgaggaagtcctatgcataatgtaaagagaatacgatggcctttagaaaatgccctttagcagagaatttgtaatttaagaaattttctgtttgttacggaacatgtgggaatcccttttacttcatgctcacaatttatcagaaattatttcgtatgttaaagagtcgaaagactatagcatcactcagtccctgttagactttagaagattgatactgatgcactgcatcccaaaccatcaagggccttttcccctacaaactgttgttgaacagtgcttctctaaaatgcaataataatgggccaggtgaagtggctcacacctgtaatcccagcactgtggaaagacaggagttcgaaaccagcctgggcaacatagtgagaccctgcctcatggctttagtgagccatgattgtgccactgcactccagcttggtgacagagtgagatcctgtctctaaataaataaataaaatgcgggccaggcacagtggctcacacctgtaatcccagcactatgggaggcccaggtgagcagatcacctgaggtcaggagttcaagaccagcctggccaacatggtgaaaccccttctctactaaaatacacaaattagctaggcattgtggggggtgcctgtaatcccagctactcaggaggctgaggcaggaaaattgcatgaacctaagtggcagaggttgcagtgagctgagatcgcaccactgcactctagcttgggcaacagagcaagactctgtctcttaaataaataaataaatagattaccagaaaaatgaaaagaaaaaaacagacatacaaaataaaagccccagttttttattatggtatttaactgagttaactctgtcagattgctgcaaacatttctaaatacttgctcttggtatctataacttttgcagagaccagaagcaaacaatttgtgggccagtgtcaacacatggaccacactttatatagcactgtaacggaaaatgattctgttaatgtaatgaacatgggaaagaccagccttggcctatctttatgatatatataaataatataattctcataattccacctctgcctatgtggtgtttggcaaaacatgcccctgtgccttggtttttaaaatggtaataacagtaccacctaatagtatttttgtgaggatgaaatgctaataaaagataaaacctttaaaagagtatttggcacacagcattttatcaataaatattgctttatttttttcattggggatacatttagtacattcatgtgagaggaaggccctgtgggtgtaagaaatttgtaaaaactgtccattacctttcactccttatttagattggaataattaactggagataatatccagtaaaatagattaaacttccatttataaagtcagaacctatctctgaaaattaatgtgagaaagaaatctctagatttgatgggtgtgaagattatgagagtaaagttttgaagactcagggatagctgtaatgcttttttctttttataacccaaaaagcaggtatgtcagtcgctttttctgcccacaatgataaattaaaaacagccactatccatttggaaaacttaaaagaataatgaacagttatgttctatctagattcagcaattgttaatatgttgtcacatttggtttgcttatacataatatttacatattttgctgtagtatttgagtataaattgcagatactataacacatcacatctaagaataaaggctgcctcctacttaattgctatataacaattgtccaacctgtctgtgccccagggcagctttgaatgcagtccaacagaaatttgtaagctgtcttaaaacatgagattttttttgtgattttttttaagctcatccgccattgttagcacattttatgtgtagcccaagataattcttcttccagtgtaacccagggaagccaaaagatttgacccccagtaacttcacacctaaggagattagcaataattccataatctgtaatattcagtctgtgttcatattctcagttgtgttcattcttttcatttgtgtaaacaatgcttttcataggttatttttaaattcaggaaccaaattcatgaattacatttgtgcattgttcgtctcttttaaagtaagaatggcccttccccccacaactttattgcaacattgactttttttttttttttttttttttttttttgagatggagtctctgtcgcccaggctggagtgcagtggtgcgatcttggctcactgcaagctccgcctcccgggttcaggcaattctgcctcagcctccccagtagctgggactacaggcgccttcaaccatgcccggctaattttttgtatttttagtagagacggggtttcaccatgttagccaggacggtctcgatctcctgacctggtgatctgcccgcctcagcctcccaaagtgctgggattacaggcatgagccaccgcacccggccttcccaaagtatttttaaatgtgcttttttatccccagtatttcccattaactggaatttgggattagagacccaattagggacagattaaatattttggcaagaatacttaatgggagaaattttgtatttcaatttgtaacccattaggtggcatacaatgtcattataccactatggtatccttagttcattcacttggtgtagcagaacatacattccaaagatggccacaccaatatatcccattctgcatgttcatcttacaatgtgataccaacactccccaagaggtagagctcatggtccttccttttgaatctggccaggtgggcctgtgtttatggcaggaataacactgtgatttccacgactaagtcataaaaggcaatacagcttctgcctgacccacttgggatgaagcccagccaccatgctatgaagatgccaagtaatcacatagaaaagctaagtaaagctgtcctgattacagctgtaattgaggtaacagccgggatccagcaccaagtgtatgagggtatgagccttcagatgattctaacccttagccttcaggctatcctagctggtgctaagtggagcagagaaaagctttcccccatgagcctgcccaaattgcagatttacgtttaaaatatggcctgttttaagccactaagttttggagtagtttgccacacagcgataggtaactgaaatacttgcttcatatggtaatcaccaggtttctctgttgtagagctaaatatttcttttaatttagtaaacgatctgtagagtagtactttggcatttcggaaatttaaaatctccaataatataatgacactagatcaaaaagaaaatgaaaccataaaggacaatttagaaatgaatggtaagatcagaatttgtgaatgtggccaaacctgtgctcagtgaaaaatcagtaacctgttaatatattcaggaaacaaatattgagggccagcactttgtttctcctgctcaccactctactcccagtgacttaatactgtctctttaacatagtaatcacttataaaactgttaaaagaatgaagaagcattaaactcaagaaactaagggaaaaataagtcaatataagaaagaagggaggatcattaaaaggagttaatgaatttgaaaataaaatagacttattaaggctttgtgaaaaaatattaatacttgattttagtatagctaatcaaaggaaaaagataattacagcattgtgaatgagaattggatgtaagtacagatggaggagatattttttgttttattgaaaatttcaaggaggaagtaatatcaaaatttcactagctctttctacactgatattataatcctgataatacaacagatgaggatagttcttaaaaggcaaaaatgtaggtgagtcattacgaagaaagcagaaattctaaaccatcagcacattcattcaaaaacctagtaaagcaattaagcaaaataatttgtttacttggactgtccagggatagatctgttctagttttccaaattaatgatgggaaaggaagagctgatccagtccaagtatcttcaagatccatgttctcagtttttcttagctttaaatggccaaattgtggcttagattggatatgataatttcctcaatgcttaacactgagcacaatttttcacatatttgaaatcaaggtgtatcttacaatttatggcatctgacaatacttccaaccaggtggcagtcatcaagcagttttgtgaaaagccttcccggtaagaatacaaaagcatctgcaccaaaatatatagatttaatggcatgtaggggtttgcgtgaatatatacagttgaaattcaattcttccttaaaaataattgtaactcatttctttaagactaccatactaccactttcctcaacttggactaatgtccattgtcaaccaaaatgtctgtgatctcatggatccattatgatttgcaactccaggtccattttatgcaaataagacagccataatatatcattgtacaagtcatttactatctaattatatcattgctcaacatttgcaaattatttttacaaataacaataattggatgtaacaaaaagcagagtattttgagacgtatattaatgcaaaatattgttaatgtatcagtggattgttcctccaaagtaccagtgccttaacacaacatatctaaaagaacatctctgggaacagtagtacttaatggcaacttgagaattggtttgtgggcacacagccttgtgaagttttgaatactaaatcccttttttaaaaaagtgcttattatcaggctatcaatcaaaagatttgagtctttcagtaaagaaaatttgcttaattttatctagtgcatgataaactttactaaggaagtctcattcagaatatctaatattttggatgtgagcccacactggaaatgccataaccaaaaaagagtgaccctaaagatagaatattcagatctaatggcagatgcttagctatgctgggaaaggaagtgaattgtatattgctctgctgctcacatattcctctgcaataaattgctggcccagtttagtttttatatactcactactatactaatgaggatggctcaattttttatttgaacgtactataatgaatttaaactttcattggtatttatgttttaacaggttttcactatttcaaatatacttcaataaatatccttgtctgtgatca

SEQ ID NO: 202875 - DNA, 561 bp, Homo sapiens
  Payload ID: 20011
  Gene Name: zinc finger protein 546
  ENST ID: ENST00000601138
  CDS Start-End: 184-561
agtgttgcctggaccccaagggccctttacattgcgttcttaacggttcagtcaccttaaccgttattattcacttgcgggcgagaagtccgagctagggatcctgaaaaggagggaacaattgttgtagcaggtctaaaagttcaggtccagccccggtttctctggattctgtgcttctccatggaggaaactcaaggagaactgacaagttcttgtggttctaaaaccatggccaatgtatctttggcatttagggatgtgtccatagacctctcccaagaggagtgggagtgcctggacgctgtgcagagggacttgtacaaggatgtgatgttggagaactacagcaacctggtctcactgggatataccattcctaagccagatgtgattactttattggagcaagagaaagagccctggatagtaatgagggaagggacaaggaattggttcacagagtctcgctctgtcacccaggctggagtgcagtggcacaatctcggctcactgcaacctccacctcccgggttcaagcaattcttctgcctcagcctc

SEQ ID NO: 202876 - DNA, 626 bp, Homo sapiens
  Payload ID: 20011
  Gene Name: zinc finger protein 546
  ENST ID: ENST00000599504
  CDS Start-End: 208-626
acatttcccagaagccccttgggcagtgttgcctggaccccaagggccctttacattgcgttcttaacggttcagtcaccttaaccgttattattcacttgcgggcgagaagtccgagctagggatcctgaaaaggagggaacaattgttgtagcaggtctaaaagttcaggtccagccccggtttctctggattctgtgcttctccatggaggaaactcaaggagaactgacaagttcttgtggttctaaaaccatggccaatgtatctttggcatttagggatgtgtccatagacctctcccaagaggagtgggagtgcctggacgctgtgcagagggacttgtacaaggatgtgatgttggagaactacagcaacctggtctcactgggatataccattcctaagccagatgtgattactttattggagcaagagaaagagccctggatagtaatgagggaagggacaaggaattggttcacagatttggaatacaagtatattaccaagaatttgctttcagaaaagaatgtttgcaaaatctatttatctcaattgcagacaggggaaaaaagtaaaaacaccatccatgaggacaccattttcagaaatggtttgcagtg

SEQ ID NO: 202877 - DNA, 3426 bp, Homo sapiens
  Payload ID: 20011
  Gene Name: zinc finger protein 546
  ENST ID: ENST00000600094
  CDS Start-End: 230-2662
gttgcctggaccccaagggccctttacattgcgttcttaacggttcagtcaccttaaccgttattattcacttgcgggcgagaagtccgagctagggatcctgaaaaggagggaacaattgttgtagcaggtctaaaagttcaggtccaggaaatggaaacattgctttgcttttcctgaattgtccagtgacctatcccaggccttcctttccagtgaacaatggaccatgcagccccggtttctctggattctgtgcttctccatggaggaaactcaaggagaactgacaagttcttgtggttctaaaaccatggccaatgtatctttggcatttagggatgtgtccatagacctctcccaagaggagtgggagtgcctggacgctgtgcagagggacttgtacaaggatgtgatgttggagaactacagcaacctggtctcactgggatataccattcctaagccagatgtgattactttattggagcaagagaaagagccctggatagtaatgagggaagggacaaggaattggttcacagatttggaatacaagtatattaccaagaatttgctttcagaaaagaatgtttgcaaaatctatttatctcaattgcagacaggggaaaaaagtaaaaacaccatccatgaggacaccattttcagaaatggtttgcagtgtaaacatgaatttgagagacaagagagacatcagatgggatgcgttagtcaaatgctaatccaaaaacaaatatctcatcctctacatccaaaaattcatgctagagagaaatcatatgaatgtaaggaatgtagaaaggcctttagacaacagtcataccttattcaacatctgagaattcacactggtgagagaccctataaatgtatggaatgtggaaaggccttttgtcgagtgggagaccttagagtacatcacacaatccatgctggggagagaccctatgaatgtaaagaatgtgggaaggcctttagacttcattatcaccttactgaacatcagagaatacattctggtgtgaaaccctacgagtgtaaggaatgtgggaaagcctttagtcgtgttagagaccttagagtacatcagacaattcatgctggagagagaccttatgaatgtaaagaatgtgggaaggcctttagacttcattatcaactaactgaacatcaaagaattcatactggtgagaggccttatgaatgtaaggtttgtggcaagacctttagggtacaacgacatattagtcaacatcagaaaattcatactggtgtcaaaccctataaatgtaatgaatgtgggaaggcctttagtcatggctcataccttgttcaacatcagaaaattcatactggtgaaaaaccctacgaatgtaaagaatgtggtaagtcctttagttttcatgcagaacttgctcgacatcgtagaattcatactggtgagaaaccctatgaatgtagagaatgtggaaaagcctttcgtcttcaaacggaacttactcggcatcatagaactcatactggtgagaaaccctatgaatgtaaggaatgtgggaaggcctttatttgtggttatcaacttactttacatctgagaactcacaccggtgagattccctatgaatgtaaggaatgtggaaaaaccttcagtagtcgctatcatctcactcaacactacagaattcatactggtgagaaaccctacatatgtaacgaatgtggaaaagcctttcgtcttcaaggagaacttacccgacatcacagaattcatacatgtgagaaaccctatgaatgtaaggaatgtgggaaggcttttattcatagcaatcaatttatttcacaccagcgaattcacaccagtgagagcacctacatatgtaaagaatgtgggaagatttttagtcgtcgctataatcttactcaacattttaaaattcatactggtgaaaaaccctacatatgtaatgaatgtgggaaagcctttcgatttcaaacagaacttactcagcatcacagaattcatactggtgaaaaaccctataaatgtacagaatgtgggaaggcctttattcgtagcactcatctcacgcaacatcacagaattcatactggtgagaaaccctacgaatgtacggaatgtgggaagacgtttagtcggcactatcatcttactcaacatcacagaggccatactggtgagaagccctacatatgtaatgaatgtgggaatgcttttatttgcagttatcgacttacattacatcaaagaattcacactggtgagcttccatatgaatgtaaggaatgtggaaagacctttagtcgtcggtatcatcttactcaacattttagacttcatactggtgagaaaccttatagctgtaaagaatgtgggaatgcctttcgtcttcaagcagaacttactcgacatcacatagttcacacgggtgagaaaccctataaatgtaaagaatgtgggaaagccttcagtgttaattcagaacttactcgacatcacagaattcatactggtgaaaaaccctatcaatgtaaagaatgtggaaaagcctttattcgtagtgatcaacttactttacatcagagaaatcatattagtgaggaagtcctatgcataatgtaaagagaatacgatggcctttagaaaatgccctttagcagagaatttgtaatttaagaaattttctgtttgttacggaacatgtgggaatcccttttacttcatgctcacaatttatcagaaattatttcgtatgttaaagagtcgaaagactatagcatcactcagtccctgttagactttagaagattgatactgatgcactgcatcccaaaccatcaagggccttttcccctacaaactgttgttgaacagtgcttctctaaaatgcaataataatgggccaggtgaagtggctcacacctgtaatcccagcactgtggaaagacaggagttcgaaaccagcctgggcaacatagtgagaccctgcctcatggctttagtgagccatgattgtgccactgcactccagcttggtgacagagtgagatcctgtctctaaataaataaataaaatgcgggccaggcacagtggctcacacctgtaatcccagcactatgggaggcccaggtgagcagatcacctgaggtcaggagttcaagaccagcctggccaacatggtgaaaccccttctctactaaaatacacaaattagctaggcattgtggggggtgcctgtaatcccagctactcaggaggctgaggcaggaaaattgcatgaacctaagtggcagaggttgcagtgagctgagatcgcaccactgcactctagcttgggcaacagagcaagactctgtctcttaaataaataaataaatagattacc

SEQ ID NO: 202878 - DNA, 714 bp, Homo sapiens
  Payload ID: 20011
  Gene Name: zinc finger protein 546
  ENST ID: ENST00000596894
  CDS Start-End: 257-370
acatttcccagaagccccttgggcagtgttgcctggaccccaagggccctttacattgcgttcttaacggttcagtcaccttaaccgttattattcacttgcgggcgagaagtccgagctagggatcctgaaaaggagggaacaattgttgtagcaggtctaaaagttcaggtccaggaaatggaaacattgctttgcttttcctgaattgtccagtgacctatcccaggccttcctttccagtgaacaatggaccatgcagagtctcgttctgttgcccaggctggagtgcagtgatgtgatcttggcttactgcaacctccatctcccaggaaaattgcatgaacctaagtggcagaggttgcagtgagctgagatcgcaccactgcactctagcttgggcaacagagcaagactctgtctcttaaataaataaataaatagattaccagaaaaatgaaaagaaaaaaacagacatacaaaataaaagccccagttttttattatggtatttaactgagttaactctgtcagattgctgcaaacatttctaaatacttgctcttggtatctataacttttgcagagaccagaagcaaacaatttgtgggccagtgtcaacacatggaccacactttatatagcactgtaacggaaaatgattctgttaatgtaatgaacatgggaaagaccagccttggcctatctttatga

SEQ ID NO: 202879 - DNA, 542 bp, Homo sapiens
  Payload ID: 20011
  Gene Name: zinc finger protein 546
  ENST ID: ENST00000595225
  CDS Start-End: 169-542
ctggcgtgtcgtgcccgcagggagcctcaggcctggatcctgaaaaggagggaacaattgttgtagcaggtctaaaagttcaggtccaggaaatggaaacattgctttgcttttcctgaattgtccagtgacctatcccaggccttcctttccagtgaacaatggaccatgcaggtggaccctcctcttcacgggcctccaaatgactttctcatttttcaaatcattcctctgcactcactttctataatgccccggtttctctggattctgtgcttctccatggaggaaactcaaggagaactgacaagttcttgtggttctaaaaccatggccaatgtatctttggcatttagggatgtgtccatagacctctcccaagaggagtgggagtgcctggacgctgtgcagagggacttgtacaaggatgtgatgttggagaactacagcaacctggtctcactgggatataccattcctaagccagatgtgattactttattggagcaagagaaagagccctggatagtaatgagggaagg

SEQ ID NO: 202880 - DNA, 626 bp, Homo sapiens; identical to SEQ ID NO: 202876
  Payload ID: 20011
  Gene Name: Zinc finger protein 546
  ENST ID: ENST00000631242
  CDS Start-End: 208-626

SEQ ID NO: 202881 - DNA, 542 bp, Homo sapiens; identical to SEQ ID NO: 202879
  Payload ID: 20011
  Gene Name: Zinc finger protein 546
  ENST ID: ENST00000626396
  CDS Start-End: 169-542

SEQ ID NO: 202882 - DNA, 561 bp, Homo sapiens; identical to SEQ ID NO: 202875
  Payload ID: 20011
  Gene Name: Zinc finger protein 546
  ENST ID: ENST00000628247
  CDS Start-End: 184-561

SEQ ID NO: 202883 - DNA, 7987 bp, Homo sapiens; identical to SEQ ID NO: 202874
  Payload ID: 20011
  Gene Name: Zinc finger protein 546
  ENST ID: ENST00000626389
  CDS Start-End: 217-2727

SEQ ID NO: 202884 - DNA, 3426 bp, Homo sapiens; identical to SEQ ID NO: 202877
  Payload ID: 20011
  Gene Name: Zinc finger protein 546
  ENST ID: ENST00000627583
  CDS Start-End: 230-2662

SEQ ID NO: 202885 - DNA, 714 bp, Homo sapiens; identical to SEQ ID NO: 202878
  Payload ID: 20011
  Gene Name: Zinc finger protein 546
  ENST ID: ENST00000629260
  CDS Start-End: 257-370

SEQ ID NO: 202886 - DNA, 2739 bp, Homo sapiens
  Payload ID: 20012
  Gene Name: zinc finger protein 547
  Uniprot ID: Q8IVP9
  ENST ID: ENST00000282282
  CDS Start-End: 151-1359
agtgacacaggcacaactgacagtggcagaagctcagctgacaaggactggggacggcggtgtccttgtcttgcctttgtcgcccccgcccctctcttccctggctggacttgcggagtccccgccgaagaacccgagggtcccctggcgatggcagaaatgaaccctgcacagggtcatgtggtttttgaagacgtggccatatatttctcccaggaggagtgggggcatctcgatgaggctcagagattgctgtaccgtgatgtgatgctggagaatttggcccttttgtcctcactaggttgttgccatggagctgaggatgaggaggcacctttagagccaggtgtttctgtaggagtgtcacaggtcatggctccaaagccctgtctatctacccagaatacccagccctgtgagacatgtagctcacttctgaaggacattctgcgtctggctgagcatgacggaacacaccccgagcagggactgtacacgtgtccagcacatcttcaccagcaccaaaaggagcagattagagagaaactttctagaggggatggaggaagaccgacatttgtgaagaaccacagagttcacatggcagggaagaccttcttgtgcagtgaatgtgggaaagcctttagccacaaacataaactttctgaccatcagaaaatccacactggagaaagaacttataagtgcagcaaatgtgggatattgtttatggaaaggtccacactcaatagacatcagagaactcacactggagaaaggccttatgagtgcaatgaatgtgggaaagcctttctttgtaagtctcaccttgttcgtcaccagacaatccactctggagaaaggccttatgagtgcagtgaatgtgggaaattgtttatgtggagttccacactcattacacatcagagggttcacactggaaagaggccttatggttgcagtgaatgtgggaagttctttaagtgcaactcaaacctctttaggcattacagaattcatacaggaaaaaggtcttatggttgcagtgaatgtgggaaattctttatggaaaggtctacactcagtagacatcagagagttcacactggagaaaggccttatgagtgcaatgaatgtgggaaattcttcagcttgaaatccgtcctcattcaacaccaaagagttcacactggagaacggccttatgaatgcagtgagtgtgggaaggccttccttacaaagtcccacctcatttgtcatcagacagttcacactgcagcaaagcagtgcagtgaatgtgggaaattctttaggtataactctacacttctcagacatcagaaagtccacactggataaggcccttatgaatgcagtggatatgggaaagccttcagtcaccaacatattgtggctggacagcaggcagtacacactggagaaagactgaatgccgtgaacgtgggtaattatgtaggtacagctctccagtcgctatgtatcagagaattcacactgcagaaatgtgtgttcagcaaactcgggacattattttggtttgactctcatctcattagacattggagagtttacactgaagaagagtcttttcaataaagtagaaagtggtaaagattcaacatgcaagattgtacttattgggcttcagaatatccacactagtgaaagtcttctgagtacagcaaatgtgtgacattattttgctactactccacactacttagacatcatgtagttcacactggaaaaaggccacgtatgtgccttgaatgtagccaaaatgacgaacaacacccagaaatctgtgatttagcactgagaactagtattatatggtttttaaaaaacaatggtgaagtacatgccacataaaatttgccatcttaactattgtaatgtcttgtttaatacttgaagtacattaacattgttgagcaaagaatatcctgaactctttatcttgtaaaatgaaactctataaccaccattaaaaaaacaactcattcccacattcttcagtccctggcgaccaccatatttttaagtcattatgactctgactattcttggtacttctcagaagaagaatcttagagtgtttttcattattttttttcacttaggataatatcctcaaagttcattcattttttagcatgtgtcagaaattttaaggctgagcaatatttcattgtttgcatttaccacatttcctttatttctgacatctattcatggacacttgggttacttctacctctggctattgtgaatattgctactacaagcataagggcacaaatatctctttgagaccctgctttcaattcttattgggtaccccaaaaagtggaactgctggatcacatggtacttctaactttaattctttgatgaactgagaaacttttccataaaacttgcaccgttttacattcctaacattccacaaaagttgtgatttgtcctcattctaatccatagaaggcaacatttctaacaggtttctaggtgattttgttgttgctgatgtagggactacattttgagaactgtcctatcccatttttataacaatgcagagcttctctgtaaataccccttgtttctatgttctatcctgtgagccttttcattttgttaatttttcccagtgtttacaaccaggaaatagcttgtcatctttgatacaaaacagaaatctttgcaaaataccaa

SEQ ID NO: 202887 - DNA, 602 bp, Homo sapiens
  Payload ID: 20012
  Gene Name: zinc finger protein 547
  ENST ID: ENST00000599604
  CDS Start-End: 478-602
aaacactacataattgatttgacccaaatttgcctataattatcaacataccatggaaaattttagtatcctctaaaattttaaaagctaaaaatatacacctcagtttttgaaattctactacatcatttatactgaaaacatatagtaaaccattaatccaagaacagtaatagctgatatatatgatgagcaacgagtgtttgacaccggtaagagtcctatgaggtgggagccattcttacaacctatttacagatgagagcactgaagctccagcaggttcagttcttttctagagtcacagtgctgctaagagccaacagtgaagtcggaggagctgagtttatacaatcaacttgagatcagtttgctttagggtaaggaagaagagatggtggtccaactctgcctgtaagatcttcccatcgttgcccatttctcacggtttccctcttccttcagggtcccctggcgatggcagaaatgaaccctgcacagggtcatgtggtttttgaagacgtggccatatatttctcccaggaggagtgggggcatctcgatgaggctcagagattgctgtaccgtgatgtgatgctgga

SEQ ID NO: 202888 - DNA, 570 bp, Homo sapiens
  Payload ID: 20012
  Gene Name: zinc finger protein 547
  ENST ID: ENST00000597567
  CDS Start-End: 127-570
gtgcccaggatggtaggggagatggaaacacatttagctgttagtttgtccctgtgtttaatgggtggtaaatataagtagaaaataaatagagaacttaagtaaatacagtttgaaaagctgctcatgtattcatctttcccaatttggcagggtcatgtggtttttgaagacgtggccatatatttctcccaggaggagtgggggcatctcgatgaggctcagagattgctgtaccgtgatgtgatgctggagaatttggcccttttgtcctcactaggttgttgccatggagctgaggatgaggaggcacctttagagccaggtgtttctgtaggagtgtcacaggtcatggctccaaagccctgtctatctacccagaatacccagccctgtgagacatgtagctcacttctgaaggacattctgcgtctggctgagcatgacggaacacaccccgagcagggactgtacacgtgtccagcacatcttcaccagcaccaaaaggagcagattagagagaaactttctagaggggatggaggaagaccgacatttgtgaagaaccac

SEQ ID NO: 202889 - DNA, 596 bp, Homo sapiens
  Payload ID: 20012
  Gene Name: zinc finger protein 547
  ENST ID: ENST00000595335
  CDS Start-End: 240-377
gttccggcctttggcgctctatgacgtcaccgaagtgacggagcggaaaagcgcgagaagcggcttggttccttgtacgcagaggcggtagtgacacaggcacaactgacagtggcagaagctcagctgacaaggactggggacggcggtgtccttgtcttgcctttgtcgcccccgcccctctcttccctggctggacttgcggagtccccgccgaagaacccgagggtcccctggcgatggcagaaatgaaccctgcacagatggagtcttgctgtgttgtcacccaggctggagtgcagtggcatgatcttggctcactgcaacctgcacctcctggattcaagcagttctgcctcaatctcccaagtagctaggactacagggtcatgtggtttttgaagacgtggccatatatttctcccaggaggagtgggggcatctcgatgaggctcagagattgctgtaccgtgatgtgatgctggagaatttggcccttttgtcctcactaggttgttgccatggagctgaggatgaggaggcacctttagagccaggtgtttctgtaggagtgtcacaggtcatggctccaaagc

SEQ ID NO: 202890 - DNA, 2115 bp, Homo sapiens
  Payload ID: 20013
  Gene Name: zinc finger protein 548
  Uniprot ID: Q8NEK5
  ENST ID: ENST00000336128
  CDS Start-End: 204-1841
gtggtgtttcaccaacttcggcctatggctctgtctgacgtcaccgaagtgacggaacggaaaagcgcgagaagcggctcggttcccaccacggagaggcgggagtgagtcaactgacaagcgctggggacagtggcgtccttgtcttgcctttgtcgctcccgccccgctcttccctggctgggctggcggaggccttgctgatgaacctgactgagggtcccctggcgatggcagaaatggaccctacacagggccgtgtggtctttgaggacgtggccatatatttctcccaggaggagtgggggcaccttgatgaggctcagagattgctgtaccgtgatgtgatgctggagaatttggcccttttgtcctcactaggttcttggcatggagctgaggatgaggaggcaccttcacagcaaggtttttctgtaggagtgtcagaggttacagcttcaaagccctgtctgtccagccagaaggtccaccctagtgagacatgtggcccacccttgaaagacattctgtgcctggttgagcacaatggaattcatcctgagcaacacatatatatttgtgaggcagagctttttcagcacccaaagcagcaaattggagaaaatctttccagaggggatgattggataccttcatttgggaagaaccacagagttcacatggcagaggagatcttcacatgcatggagggctggaaggacttaccagccacctcatgccttctccagcaccagggccctcaaagcgagtggaagccatacagggacacagaggacagagaagcctttcagactggacaaaatgattacaaatgtagtgaatgtgggaaaaccttcacctgcagctattcatttgttgagcaccagaaaatccacacaggagaaaggtcttatgaatgtaacaaatgtgggaaattctttaagtacagtgccaatttcatgaaacatcagacagttcacactagtgaaaggacttatgagtgcagagaatgtggaaaatcctttatgtacaactaccgactcatgagacataagcgagttcacactggagaaaggccttatgagtgcaacacatgtgggaaattctttcggtacagctccacatttgttagacatcagagagttcacaccggagaaaggccgtatgagtgcagggaatgtgggaaattctttatggacagctccacactcattaaacatcagagagttcacaccggagaaagaccttataagtgcaatgattgtgggaaattttttaggtatatctccacactcattagacatcagagaattcacactggagaaaggccttatgagtgcagtgtatgtggggaattgtttaggtacaactccagccttgttaaacattggagaaatcacactggagaaaggccttataaatgcagtgaatgtgggaaatcatttaggtaccactgcaggctcattagacaccagagagtccacacgggagaaaggccttatgagtgcagcgaatgcgggaaattctttcgttacaactccaacctcattaaacattggagaaatcacactggagaaaggccttacgagtgcagagagtgtgggaaagcctttagccacaagcatatacttgttgagcaccagaaaatccacagtggagaaagaccttatgagtgcagcgaatgccagaaggcctttattagaaagtctcacctggttcatcaccagaaaatccacagtgaagagaggcttgtgtgctccatgaatgtggggaattctttagctaaaactccaacctcattaaacatcagagatttcacaatggagaaagtttaccattgactattgtaattgggtagtaatgttatataaattccacatttttatgcaactaatctccagaacatttttcctcttaccaagaagtaaaatgctgtacccattaacaacaactcattccccttccctacttccccagaaatgtctcaactatatttctatactctatggtacttatatgaggtaccaatagatatctatgaatttgatatatatttgtacctcatataagtggattctacagtatttatcttttgagactggcttatttcactta

SEQ ID NO: 202891 - DNA, 4955 bp, Homo sapiens
  Payload ID: 20013
  Gene Name: zinc finger protein 548
  Uniprot ID: Q8NEK5
  ENST ID: ENST00000366197
  CDS Start-End: 251-1852
gggcgggacttccgccgtcctcctggtggtggtcgttttggttctgtgtggtgtttcaccaacttcggcctatggctctgtctgacgtcaccgaagtgacggaacggaaaagcgcgagaagcggctcggttcccaccacggagaggcgggagtgagtcaactgacaagcgctggggacagtggcgtccttgtcttgcctttgtcgctcccgccccgctcttccctggctgggctggcggaggccttgctgatgaacctgactgagggccgtgtggtctttgaggacgtggccatatatttctcccaggaggagtgggggcaccttgatgaggctcagagattgctgtaccgtgatgtgatgctggagaatttggcccttttgtcctcactaggttcttggcatggagctgaggatgaggaggcaccttcacagcaaggtttttctgtaggagtgtcagaggttacagcttcaaagccctgtctgtccagccagaaggtccaccctagtgagacatgtggcccacccttgaaagacattctgtgcctggttgagcacaatggaattcatcctgagcaacacatatatatttgtgaggcagagctttttcagcacccaaagcagcaaattggagaaaatctttccagaggggatgattggataccttcatttgggaagaaccacagagttcacatggcagaggagatcttcacatgcatggagggctggaaggacttaccagccacctcatgccttctccagcaccagggccctcaaagcgagtggaagccatacagggacacagaggacagagaagcctttcagactggacaaaatgattacaaatgtagtgaatgtgggaaaaccttcacctgcagctattcatttgttgagcaccagaaaatccacacaggagaaaggtcttatgaatgtaacaaatgtgggaaattctttaagtacagtgccaatttcatgaaacatcagacagttcacactagtgaaaggacttatgagtgcagagaatgtggaaaatcctttatgtacaactaccgactcatgagacataagcgagttcacactggagaaaggccttatgagtgcaacacatgtgggaaattctttcggtacagctccacatttgttagacatcagagagttcacaccggagaaaggccgtatgagtgcagggaatgtgggaaattctttatggacagctccacactcattaaacatcagagagttcacaccggagaaagaccttataagtgcaatgattgtgggaaattttttaggtatatctccacactcattagacatcagagaattcacactggagaaaggccttatgagtgcagtgtatgtggggaattgtttaggtacaactccagccttgttaaacattggagaaatcacactggagaaaggccttataaatgcagtgaatgtgggaaatcatttaggtaccactgcaggctcattagacaccagagagtccacacgggagaaaggccttatgagtgcagcgaatgcgggaaattctttcgttacaactccaacctcattaaacattggagaaatcacactggagaaaggccttacgagtgcagagagtgtgggaaagcctttagccacaagcatatacttgttgagcaccagaaaatccacagtggagaaagaccttatgagtgcagcgaatgccagaaggcctttattagaaagtctcacctggttcatcaccagaaaatccacagtgaagagaggcttgtgtgctccatgaatgtggggaattctttagctaaaactccaacctcattaaacatcagagatttcacaatggagaaagtttaccattgactattgtaattgggtagtaatgttatataaattccacatttttatgcaactaatctccagaacatttttcctcttaccaagaagtaaaatgctgtacccattaacaacaactcattccccttccctacttccccagaaatgtctcaactatatttctatactctatggtacttatatgaggtaccaatagatatctatgaatttgatatatatttgtacctcatataagtggattctacagtatttatcttttgagactggcttatttcacttaggataaggtcttcacggttcacccatgttgtataatgtgtcagaatatccttcctttttaggtgaaataatattctatggtatttatataccacatttatttatccattcatctgttagtggatacttgggctacttccaccttttgcctattgaaataatgctgctatgaagatgagtgtacaagtgtctattcaagattctactttcaattcttatagggtatatactcagaaatggtggtgctggatcatataggatttctattttttttttttgtttgtttttgagacagagtcttgctctgtcacccaggctggagtgcagtgctgtgatcttggctcactgcaagctccgcctcccaggttcatgccattctcctgcctcaccctcccgagtagctgggactacaggtgcctgccaccacgcctggctaatttttttgtatttttagtagagacggggtttcaccgtgttagccaggatggtcctgatctcctgaccttgtgatctgcctgccttggcctctcaaagtgctgggattacgggcgtgagccaccgcgcctggccaggatttctatttttaatatttttgggaaaatttttccatagtacctgtgccattttacattcccaccagcagtgcacaaggattgcaatctatatacatcctcaccaacattgttcattttctatttctgtttttggggttttttgtagtgccttttgttttggatagcagctatcttgttggatgtgaggtggaatctatagtgtctttcatttttattttgtgaatgattgatgatgttgaggatcttttcatgtgcttgttaggcatttgtgtatctggaaaaatattcaagtcttttttttccatttttaatgggactatttgctttttgttgttgagttgtagttctttatacattctggatattaactccttaccaaatatatgctttttacatattacctcccagtccataggttgctttttcgctctgttgattgtgtcctttgatgaaattttaagttttgatgtactgttgactctttctgtctgtgggttctgtattcatggatcgaagcaaccatggatcaaaagtatttggagcatccatggattgcagtgatcattaatcaaaaatatttggaaaacaaaaagggtagttgcatctgtactaaacatgaacagacattttttcttgtcattattccctaaactatatagtataataaatatttacatagcatttacattgtattagaagttataaataacctaatgataatctatataggaagatgtgtgtaggttatattcaaacactatgcctttttatgtgagggacctcttgagcatcagatgattttggtatccacaaggggtcctggaatcagtcccccacagacaccaagggatgactgtagtgcattttatctatttttacttctgttacctgggcttttgatgttatatattaaaaaaaattagtatcaaatccaatgccaagcattttccctatgctttattctaagaattttatatttgaaggtcttacatttaggtcttttttttttttttcttttggaggcagagtcttgctctgtcacccagcctggagtgcagtagtggaatctcagctcactacaacctccgcctcctgggttcgagccatcaccccacctcagcctcccaagtagcttggattacaagtgtacaccaccacacctggctaatttttgtatttttagtagagatggggttttgccatgttggccaggctggtcttaaacttctggccttaagtgatccccctgcctcggcctcccaaattgctgagattacaggcaggagttgtaatgcactgtgcctggctacatttagatctttaatctacttggggttcatttttgcatatggtttaaggcaaaagtccactttatgtggctatccagttttccaagcaccattttttgaaaagagcatctttcctctgttgagtagtcttggcacacttgtcaaaatcatttgtccatatatgccatggtttatatgtggattctctattttattggtcatatgtctgtctttatgtcagtaccacacattttaggtgtgtgtgtgtgagactcagtgttgaggacaaggctagtgggctttcacactccagactgctgtattccagcccaaattactcaaattagccaatccatggggaacatggaaaacgtagctaatgcaatccgcttgccttacctaagttgtcccctgcagcctcaggttgctgttactgtgtttcagatgcaaccctctgtgggaccctacccaagttctctcattcttagctataggtaataaattgttctgattttgtgtatccaagtgacattgggttgtttcttgctatcagaagaacccagaaaagtattatgaatctagtgaatgttggaaaatctttagccattagcataacctcatttcgtgccagcatgttcaccctagagaaaagtagaagtgaaggcaatgtcatctttccttgttaacatgataactcagtagagcaatgctttggagattagctttttagggagagagccagcagttgagcctcctgcatctgaacatccacactagggatattgtctgtactgccagatatatgggaagattttgtgaactgtgttgcagttttcaacttgactggggcctttcccagagttatgcccctgccagtgcctatttaaaaatgtcatctcttttctaccaactggcaaagagccatggtgtgtagcattttagtcacattaaaatgcagttatggca

SEQ ID NO: 202892 - DNA, 569 bp, Homo sapiens
  Payload ID: 20013
  Gene Name: zinc finger protein 548
  ENST ID: ENST00000596282
  CDS Start-End: 398-569
gtggtggtcgttttggttctgtgtggtgtttcaccaacttcggcctatggctctgtctgacgtcaccgaagtgacggaacggaaaagcgcgagaagcggctcggttcccaccacggagaggcgggagtgagtcaactgacaagcgctggggacagtggcgtccttgtcttgcctttgtcgctcccgccccgctcttccctggctgggctggcggaggccttgctgatgaacctgactgagagctgcagcactgaggcctgaggaactttattcaatgaattgagatcagtttgctcccaggcagggcagacgaggtggtggtccatctcagcctgaaggatccttccatggctgtcaatttctcacggcctttctcttccctcagggtcccctggcgatggcagaaatggaccctacacagggccgtgtggtctttgaggacgtggccatatatttctcccaggaggagtgggggcaccttgatgaggctcagagattgctgtaccgtgatgtgatgctggagaatttggcccttttgtcctcactaggttcttggcatggagctgagg

SEQ ID NO: 202893 - DNA, 571 bp, Homo sapiens
  Payload ID: 20013
  Gene Name: zinc finger protein 548
  ENST ID: ENST00000598895
  CDS Start-End: 217-480
gttttggttctgtgtggtgtttcaccaacttcggcctatggctctgtctgacgtcaccgaagtgacggaacggaaaagcgcgagaagcggctcggttcccaccacggagaggcgggagtgagtcaactgacaagcgctggggacagtggcgtccttgtcttgcctttgtcgctcccgccccgctcttccctggctgggctggcggaggccttgctgatgaacctgactgagggtcccctggcgatggcagaaatggaccctacacagggccgtgtggtctttgaggacgtggccatatatttctcccaggaggagtgggggcaccttgatgaggctcagagattgctgtaccgtgatgtgatgctggagaatttggcccttttgtcctcactaggtaaggccctcacacttgcccagtgtcctgggttaggctgtgttacccctttttacccaaaggcagctctgcgtttcccacagtgagaccgtgggtgctgcttcttttccctgtttcttggcatatatgctgtgggaggcagggctgggccgtgtgttttataccccctttttccta

SEQ ID NO: 202894 - DNA, 563 bp, Homo sapiens
  Payload ID: 20013
  Gene Name: zinc finger protein 548
  ENST ID: ENST00000594668
  CDS Start-End: 337-563
agagttcgaagtttcaagttaggaaaaccaggttaggaatggacacagggagacgcgaaaaggccctgaggccactgcagtagacccaggagaattatggttggggctggaccagtgacagtagagggagatgtgatgagattcttcataggcctgaaagatagggcccgtaggttttcctggtgcttcagttatgtctgaacaaaggcagtgaagaaccgtttcaagtgtttgttttgttttttgttttctgtttgaacgtttggaagaatggagttggggaagtcagcataaagagcagatttccgggagaagatcacaggttggattttggacatggtgattctcaaatgtctcaagatggatatgtcacacagacaggtggacataaagggtcccctggcgatggcagaaatggaccctacacagggccgtgtggtctttgaggacgtggccatatatttctcccaggaggagtgggggcaccttgatgaggctcagagattgctgtaccgtgatgtgatgctggagaatttggcccttttgtcctcactaggttcttg

SEQ ID NO: 202895 - DNA, 535 bp, Homo sapiens
  Payload ID: 20013
  Gene Name: zinc finger protein 548
  ENST ID: ENST00000600442
  CDS Start-End: 96-266
gtcaactgacaagcgctggggacagtggcgtccttgtcttgcctttgtcgctcccgccccgctcttccctggctgggctggcggaggccttgctgatgaacctgactgagaatggagttggggaagtcagcataaagagcagatttccgggagaagatcacaggttggattttggacatggtgattctcaaatgtctcaagatggatatgtcacacagacaggtggacataaaggtgggctctgtgttgagagaacagggggctgagacttgggggccagaccattggtggctccacagacatcatactctgtccagaacggtgcagacctggcataacagggattctggattgcatctgtaaaaagggaggcctggactggggtcccctggcgatggcagaaatggaccctacacagggccgtgtggtctttgaggacgtggccatatatttctcccaggaggagtgggggcaccttgatgaggctcagagattgctgtaccgtgatgtgatgctggagaatttggcccttttg

SEQ ID NO: 202896 - DNA, 616 bp, Homo sapiens
  Payload ID: 20013
  Gene Name: zinc finger protein 548
  ENST ID: ENST00000600927
  CDS Start-End: 274-616
aagagcagatttccgggagaagatcacaggttggattttggacatggtgattctcaaatgtctcaagatggatatgtcacacagacaggtggacataaaggttgtcatttcaggtgggctctgtgttgagagaacagggggctgagacttgggggccagaccattggtggctccacagacatcatactctgtccagaacggtgcagacctggcataacagggattctggattgcatctgtaaaaagggaggcctggactggggtcccctggcgatggcagaaatggaccctacacagggccgtgtggtctttgaggacgtggccatatatttctcccaggaggagtgggggcaccttgatgaggctcagagattgctgtaccgtgatgtgatgctggagaatttggcccttttgtcctcactaggttcttggcatggagctgaggatgaggaggcaccttcacagcaaggtttttctgtaggagtgtcagaggttacagcttcaaagccctgtctgtccagccagaaggtccaccctagtgagacatgtggcccacccttgaaagacattctgtgcctggttgagcacaatggaattcatcctgagcaacacatat

SEQ ID NO: 202897 - DNA, 682 bp, Homo sapiens
  Payload ID: 20013
  Gene Name: zinc finger protein 548
  ENST ID: ENST00000597047
  CDS Start-End: 96-287
gtcaactgacaagcgctggggacagtggcgtccttgtcttgcctttgtcgctcccgccccgctcttccctggctgggctggcggaggccttgctgatgaacctgactgagaatggagttggggaagtcagcataaagagcagatttccgggagaagatcacaggttggattttggacatggtgattctcaaatgtctcaagatggatatgtcacacagacaggtggacataaagggtcccctggcgatggcagaaatggaccctacacagggccgtgtggtctttgaggacgtggccatatatttctcccaggaggagtgggggcaccttgatgaggctcagagattgctgtaccgtgatgtgatgctggagaatttggcccttttgtcctcactaggttcttggcatggagctgaggatgaggaggcaccttcacagcaaggtttttctgtaggagtgtcagaggttacagcttcaaagccctgtctgtccagccagaaggtccaccctagtgagacatgtggcccacccttgaaagacattctgtgcctggttgagcacaatggaattcatcctgagcaacacatatatatttgtgaggcagagctttttcagcacccaaagcagcaaattggagaaaatctttccagaggggatgattggataccttcatttgggaaga

SEQ ID NO: 202898 - DNA, 567 bp, Homo sapiens
  Payload ID: 20013
  Gene Name: zinc finger protein 548
  ENST ID: ENST00000602086
  CDS Start-End: 136-279
gagaagcggctcggttcccaccacggagaggcgggagtgagtcaactgacaagcgctggggacagtggcgtccttgtcttgcctttgtcgctcccgccccgctcttccctggctgggctggcggaggccttgctgatgaacctgactgaggtgggctctgtgttgagagaacagggggctgagacttgggggccagaccattggtggctccacagacatcatactctgtccagaacggtgcagacctggcataacagggattctggattgcatctgtaaaaagggaggcctggactggggtcccctggcgatggcagaaatggaccctacacagggccgtgtggtctttgaggacgtggccatatatttctcccaggaggagtgggggcaccttgatgaggctcagagattgctgtaccgtgatgtgatgctggagaatttggcccttttgtcctcactaggttcttggcatggagctgaggatgaggaggcaccttcacagcaaggtttttctgtaggagtgtcagaggttacagcttcaaagccctgtctgtccagccagaaggt

SEQ ID NO: 202899 - DNA, 552 bp, Homo sapiens
  Payload ID: 20013
  Gene Name: zinc finger protein 548
  ENST ID: ENST00000594693
  CDS Start-End: 419-552
aggttcagagcatggaggcgctgccgagtgggctgtgttggggcgtcaggggtgtgtgttgtttctgcgggaaagagagggttttgtgaattctcgcttggaatggcaacctgagcagccagtaaccatggaagaatggagttggggaagtcagcataaagagcagatttccgggagaagatcacaggttggattttggacatggtgattctcaaatgtctcaagatggatatgtcacacagacaggtggacataaaggtgggctctgtgttgagagaacagggggctgagacttgggggccagaccattggtggctccacagacatcatactctgtccagaacggtgcagacctggcataacagggattctggattgcatctgtaaaaagggaggcctggactggggtcccctggcgatggcagaaatggaccctacacagggccgtgtggtctttgaggacgtggccatatatttctcccaggaggagtgggggcaccttgatgaggctcagagattgctgtaccgtgatgtgatgctggagaatttggc

SEQ ID NO: 202900 - DNA, 589 bp, Homo sapiens
  Payload ID: 20013
  Gene Name: zinc finger protein 548
  ENST ID: ENST00000597400
  CDS Start-End: 226-417
gtggtggtcgttttggttctgtgtggtgtttcaccaacttcggcctatggctctgtctgacgtcaccgaagtgacggaacggaaaagcgcgagaagcggctcggttcccaccacggagaggcgggagtgagtcaactgacaagcgctggggacagtggcgtccttgtcttgcctttgtcgctcccgccccgctcttccctggctgggctggcggaggccttgctgatgaacctgactgagggtcccctggcgatggcagaaatggaccctacacagggccgtgtggtctttgaggacgtggccatatatttctcccaggaggagtgggggcaccttgatgaggctcagagattgctgtaccgtgatgtgatgctggagaatttggcccttttgtcctcactagcatttctgttctgacaggttcttggcatggagctgaggatgaggaggcaccttcacagcaaggtttttctgtaggagtgtcagaggttacagcttcaaagccctgtctgtccagccagaaggtccaccctagtgagacatgtggcccacccttgaaagacattctgtgcctggttgagcacaatgg

SEQ ID NO: 202901 - DNA, 3969 bp, Homo sapiens
  Payload ID: 20014
  Gene Name: zinc finger protein 549
  Uniprot ID: Q6P9A3
  ENST ID: ENST00000240719
  CDS Start-End: 250-2133
agaatcttccggcgtctttccggtggtggtcgtttttgctgcctgcgagcgcgtccgcgggctgggcgtttccggctcgctgggtccgggccaggtaactggagccggaaaccggtggaggtggtgtccgcccgcagaggagcttgcctggtctcggtctgagcgtcgcccagcgatttgccaccgcacgcacgccggatcccgggctttaccgcccgcctttccaggccccgccccgcctaaagtcccatggccgaggcagcgctagtgattacgccgcagggccatgtgacctttgaggatattgctgtgtacttctcccaggaggagtggggcctccttgatgaagctcaaaggtgcctgtatcatgatgtgatgctggagaacttttcgcttatggcctcagtaggttgtttgcatggaatagaggctgaggaggccccttctgagcagactctttctgcgcaaggagtgtcacaggccaggactccaaagctaggtccttccatcccaaatgctcattcttgtgagatgtgtatcctggtcatgaaagacattttgtacctcagtgagcatcaggggacacttccctggcagaaaccttatacgtctgtggccagtgggaaatggttttcatttggttctaacctgcaacagcaccagaaccaggacagtggagagaaacacatcagaaaggaggagagcagtgccttgcttctgaatagctgcaaaattcctctgtcagacaatcttttcccatgcaaagatgttgagaaggattttccaaccatcctgggccttctccaacaccagaccacccacagcagacaagagtatgcacatagaagcagggagacctttcaacaaagacgttacaaatgtgagcaagttttcaatgagaaagttcatgttactgagcatcagagagtccacactggagaaaaagcttataagcgtagggaatatgggaaatccttgaactctaaatacttatttgttgaacaccagagaacccataatgcagaaaagccttatgtgtgcaatatatgtgggaaatcattcctccataaacaaacactcgttgggcaccagcagagaattcacactagagaaaggtcttatgtgtgcatcgaatgtgggaaatccttgagctccaaatactcacttgtggaacaccagagaacccataatggagaaaagccttatgtgtgcaatgtatgtgggaaatcattccgccacaaacaaacatttgttggccatcagcagagaatccacactggagagaggccttatgtgtgtatggaatgtgggaaatcttttattcattcctatgaccgcattcgacaccagagagttcacactggagaaggggcttatcagtgcagtgaatgtgggaaatccttcatatacaaacagtcacttcttgatcaccatagaatccacacgggagaaaggccttatgagtgcaaagaatgtgggaaggccttcattcacaaaaaaagacttcttgagcaccagagaattcatactggagaaaagccttatgtgtgcatcatatgtgggaaatcatttatccgctcgtctgactacatgcgacaccagagaattcacactggagaaagggcttatgaatgcagtgactgtgggaaagccttcatctccaaacaaacacttcttaagcatcacaaaatccacactagagaaaggccttatgaatgcagtgaatgtggaaaaggcttctaccttgaggttaaacttcttcagcaccaaagaatccatactagagaacaactttgtgagtgcaatgaatgtggaaaagtcttcagccaccaaaaaagacttcttgagcaccagaaagttcacactggcgaaaagccctgtgagtgcagtgaatgtgggaaatgctttagacaccgcaccagcctcattcaacaccagaaagttcacagtggagagaggccttataactgcactgcatgtgagaaggcctttatctataaaaacaaacttgttgagcatcagcgaatccacaccggagaaaagccgtatgaatgtggtaaatgtgggaaagccttcaacaaaagatattcccttgtcaggcaccagaaggtacatataacagaagagccctagcaattgttgggatgtgtaattgtcttattcactgtaggacaccagagagctgatttttcaagggatccaacagacagaaattcaccctcatacatctgcatatcactagttgaaagattcactacaaggtccaagtacttgggaagctttctagagattacttgtactttctaatctgcccagtgttacaacagacactaccatgtggcatatcctcaccgttttcatcagtcactcacatgtgctcaaggaatgcagaccactgtgcttaccaaattctgaagggaataatataataaaagcctgttgagggtcctcttccatcttgctgaactgttcgaggcaaagacaaaacccaactttgaccaagaagagcaatctggattcttgtagcccatggaggtttaccttcttcataggttttttttttttttatgtgattgccatagtgggatattccctctcccacattacccaagagggaaatgggctgtcttaccatgtgctgatgtatgtgctctgccagtgtgaagggtgaacagctccaactttatgtccccccagggacatagtatgagatcggaaaatagttcttagtcctgtttgtcttaatttttattggtttccaaggtctcctaggaaggagagcagagctgtgtggtcctaatcatggtgtcgatgccagatttatttgtaggtccagaggtctccctgagaagaggcatttgtgacaaactcaagtgctgggacctgcatgaattgtttatttgcagtgatgcttcatatttcccagcactgttcatggtatcttatttcccaggtccttcattgtagccatgggcactgaaggactgaattggtaggtaggtcactggttgtaagacctactggggccaggtaagaacagtaattggcccagacaggtaggtgtgataaacagagtagaaaagattgtggccaagaagagtgaatgtgtcccatccaaaggtgcatccagatatgtctgtgttactatggcttcatggtttgggggtatatagaaattctcaggacctcagacctttgattctcctttagcaacacacatcgtcagcataaggcatctaaagattttgtggactcataacttatgtactgtttttgagatgattgctgcacgggcaggaaagcaggatttgagagaacatacaccttgccttccagatatgtggtttttgtgattcacccagatctgttgtgccagttaggaattatctttattacttcccgtttattgccactgctgagaaggctgtccttcctaacttgtgaggagatgaatccttaataataagtaaatcttgtgttatcctatagtctggttttccaaaaggagaggtagatgcatatttttgtgtggaaccatttatcttaaaacattgaggtgcagttttcatacacaaaaccttctatctttttaagaactgtctgtatggtttattgcccagttaatgggttttgatagtcatgttatctcagtaagtgtcttgtcttagaaatatgtgtgtataggctgggtgcggtggctcatgcctgtaatcccagcactttgggaggccaaggcaggtggatcacctgaggtcaggagtttgagaccagcctgaccaacatggtgaaatccagtctctacttaaaatacaaaaattagccaggcgtggtggcgtgcatttgtaatcccagctacacaggaggctgaggcaggagaattgcttgaacctggggggcggaggttgcaatgagccaaggtcgcgccattgcactccagcctgggcgacagagtgacacttctcaaaaaac

SEQ ID NO: 202902 - DNA, 4053 bp, Homo sapiens
  Payload ID: 20014
  Gene Name: zinc finger protein 549
  Uniprot ID: Q6P9A3
  ENST ID: ENST00000376233
  CDS Start-End: 182-2104
tttccggctcgctgggtccgggccaggtaactggagccggaaaccggtggaggtggtgtccgcccgcagaggagcttgcctggtctcggtctgagcgtcgcccagcgatttgccaccgcacgcacgccggatcccgggctttaccgcccgcctttccaggccccgccccgcctaaagtcccatggccgaggcagcgctagtgattacgccgcagattcccatggtaacagaagagtttgtgaaaccatcacagggccatgtgacctttgaggatattgctgtgtacttctcccaggaggagtggggcctccttgatgaagctcaaaggtgcctgtatcatgatgtgatgctggagaacttttcgcttatggcctcagtaggttgtttgcatggaatagaggctgaggaggccccttctgagcagactctttctgcgcaaggagtgtcacaggccaggactccaaagctaggtccttccatcccaaatgctcattcttgtgagatgtgtatcctggtcatgaaagacattttgtacctcagtgagcatcaggggacacttccctggcagaaaccttatacgtctgtggccagtgggaaatggttttcatttggttctaacctgcaacagcaccagaaccaggacagtggagagaaacacatcagaaaggaggagagcagtgccttgcttctgaatagctgcaaaattcctctgtcagacaatcttttcccatgcaaagatgttgagaaggattttccaaccatcctgggccttctccaacaccagaccacccacagcagacaagagtatgcacatagaagcagggagacctttcaacaaagacgttacaaatgtgagcaagttttcaatgagaaagttcatgttactgagcatcagagagtccacactggagaaaaagcttataagcgtagggaatatgggaaatccttgaactctaaatacttatttgttgaacaccagagaacccataatgcagaaaagccttatgtgtgcaatatatgtgggaaatcattcctccataaacaaacactcgttgggcaccagcagagaattcacactagagaaaggtcttatgtgtgcatcgaatgtgggaaatccttgagctccaaatactcacttgtggaacaccagagaacccataatggagaaaagccttatgtgtgcaatgtatgtgggaaatcattccgccacaaacaaacatttgttggccatcagcagagaatccacactggagagaggccttatgtgtgtatggaatgtgggaaatcttttattcattcctatgaccgcattcgacaccagagagttcacactggagaaggggcttatcagtgcagtgaatgtgggaaatccttcatatacaaacagtcacttcttgatcaccatagaatccacacgggagaaaggccttatgagtgcaaagaatgtgggaaggccttcattcacaaaaaaagacttcttgagcaccagagaattcatactggagaaaagccttatgtgtgcatcatatgtgggaaatcatttatccgctcgtctgactacatgcgacaccagagaattcacactggagaaagggcttatgaatgcagtgactgtgggaaagccttcatctccaaacaaacacttcttaagcatcacaaaatccacactagagaaaggccttatgaatgcagtgaatgtggaaaaggcttctaccttgaggttaaacttcttcagcaccaaagaatccatactagagaacaactttgtgagtgcaatgaatgtggaaaagtcttcagccaccaaaaaagacttcttgagcaccagaaagttcacactggcgaaaagccctgtgagtgcagtgaatgtgggaaatgctttagacaccgcaccagcctcattcaacaccagaaagttcacagtggagagaggccttataactgcactgcatgtgagaaggcctttatctataaaaacaaacttgttgagcatcagcgaatccacaccggagaaaagccgtatgaatgtggtaaatgtgggaaagccttcaacaaaagatattcccttgtcaggcaccagaaggtacatataacagaagagccctagcaattgttgggatgtgtaattgtcttattcactgtaggacaccagagagctgatttttcaagggatccaacagacagaaattcaccctcatacatctgcatatcactagttgaaagattcactacaaggtccaagtacttgggaagctttctagagattacttgtactttctaatctgcccagtgttacaacagacactaccatgtggcatatcctcaccgttttcatcagtcactcacatgtgctcaaggaatgcagaccactgtgcttaccaaattctgaagggaataatataataaaagcctgttgagggtcctcttccatcttgctgaactgttcgaggcaaagacaaaacccaactttgaccaagaagagcaatctggattcttgtagcccatggaggtttaccttcttcataggttttttttttttttatgtgattgccatagtgggatattccctctcccacattacccaagagggaaatgggctgtcttaccatgtgctgatgtatgtgctctgccagtgtgaagggtgaacagctccaactttatgtccccccagggacatagtatgagatcggaaaatagttcttagtcctgtttgtcttaatttttattggtttccaaggtctcctaggaaggagagcagagctgtgtggtcctaatcatggtgtcgatgccagatttatttgtaggtccagaggtctccctgagaagaggcatttgtgacaaactcaagtgctgggacctgcatgaattgtttatttgcagtgatgcttcatatttcccagcactgttcatggtatcttatttcccaggtccttcattgtagccatgggcactgaaggactgaattggtaggtaggtcactggttgtaagacctactggggccaggtaagaacagtaattggcccagacaggtaggtgtgataaacagagtagaaaagattgtggccaagaagagtgaatgtgtcccatccaaaggtgcatccagatatgtctgtgttactatggcttcatggtttgggggtatatagaaattctcaggacctcagacctttgattctcctttagcaacacacatcgtcagcataaggcatctaaagattttgtggactcataacttatgtactgtttttgagatgattgctgcacgggcaggaaagcaggatttgagagaacatacaccttgccttccagatatgtggtttttgtgattcacccagatctgttgtgccagttaggaattatctttattacttcccgtttattgccactgctgagaaggctgtccttcctaacttgtgaggagatgaatccttaataataagtaaatcttgtgttatcctatagtctggttttccaaaaggagaggtagatgcatatttttgtgtggaaccatttatcttaaaacattgaggtgcagttttcatacacaaaaccttctatctttttaagaactgtctgtatggtttattgcccagttaatgggttttgatagtcatgttatctcagtaagtgtcttgtcttagaaatatgtgtgtataggctgggtgcggtggctcatgcctgtaatcccagcactttgggaggccaaggcaggtggatcacctgaggtcaggagtttgagaccagcctgaccaacatggtgaaatccagtctctacttaaaatacaaaaattagccaggcgtggtggcgtgcatttgtaatcccagctacacaggaggctgaggcaggagaattgcttgaacctggggggcggaggttgcaatgagccaaggtcgcgccattgcactccagcctgggcgacagagtgacacttctcaaaaaacaaaaacaaaaacaaaaagaacagataagaaatacgtgtgtatatattctattttgtgtgttttcattcaccttatttcattcagtcttccaaatgaaatgttcttaattttga

SEQ ID NO: 202903 - DNA, 5505 bp, Homo sapiens
  Payload ID: 20014
  Gene Name: zinc finger protein 549
  ENST ID: ENST00000602149
  CDS Start-End: 149-463
gagccggaaaccggtggaggtggtgtccgcccgcagaggagcttgcctggtctcggtctgagcgtcgcccagcgatttgccaccgcacgcacgccggatcccgggctttaccgcccgcctttccaggccccgccccgcctaaagtcccatggccgaggcagcgctagtgattacgccgcagattcccatggtaacagaagagtttgtgaaaccatcacagggccatgtgacctttgaggatattgctgtgtacttctcccaggaggagtggggcctccttgatgaagctcaaaggtgcctgtatcatgatgtgatgctggagaacttttcgcttatggcctcagtagctggattgagccagagcaaccataaagattcctgttcacagcaaaaggtacctgtgtctctgaataattgtgtggctcagtgctcacctgatgatggacactatgacccaaagtgagtcagaaacaaccaggcccccggaaagccacaatgagcagtttcacacagaaattcagaggcagtggtgccctcacattatctgaagactgccatgactccacatgaccagctggtggctgcttacctgcacaggtagcatgtgagaggcctctcttcactatccacagctcctgcccatgctctagcaggtggaccaactctggtttgggaacccgatgccctgttgatagcaaaagaaatagaataggggtaatttaatgagaaaatgaaagtctctccatcttgcctaggacttcatgacagggtccagacatgaatgcagctgctcccaaagtaagcaaaatgctgatgtgagccctgaaaatcaagggcattgctctgagtgagctgtgttccccataaaaatcatatgttgatgccctaacacccaacgtgactgtatatggagacaggatctttagaaggtaattaaaattaaatgaggccacaagggtggagccttaatctgataaaattatggcctcataaaaacagagagagatctctcctctgtccctccaccttgtaagaacacagcaagtcagccatctgcaagccaggaagagaggtctcaataggaatcaaatttgccgacaccttgatcttggacttctcagcctccagaagcataagaaaataaactctcgttgtttaaaccacccaatccatgacattttattatggcagccaaggagataaaagacaggcacaaatcccactgttgggctacaactgccatggagggtagtgctatctgtctacacaacacccactgcccatgacctccgtctatggaagccaacgttgttcaggcacacaacactttgacagccatgggacacggcaaaggtgtgctgcttcctccagaaggcattttctttctttctttctttctttttttgaaacagagtctcactctgttgcccaggctggagtgcagtgctcggctcactgcaacctctgcctcccaggttcaagggattctcgtgcctcagccacccgagtagcagggattacaggcatgcaaaaccatgcctggctagtttttgtatttttaatagagactgggattcacaatattggtcaggctggtctcgagtgcctggcctcaagtgatcctcctgcctcagtctcccaaggtgctactgcacccggccccaggaggcattttctaacaaatctaaatcattgcttctcaaacacctcgtgctttcagaaccacttggggatgcgtgattccaacctcaaaccaaatgaaacaaaatttcttcgtgtgagacctgggcatcagtacttccaaaatgtgccccccaaaattctggtgcccagatggggctgcaaaccactggctgaggctggacatggtggctcatgctgtaatcccagcactataggaggccgaggcaggaggatcacttgaggccaggagttctaaaccagcctggccaacatggtgaaaccccgtctctaccaaaaatataaaaaattagccaggtatggtggtgtgcacctatggtcctagctactcaaggggatgaggttgggaggattgcttgagcctaggaagcagaggctgcagtgagctgagatcatggcactgcacttcagcctgaatgacagagcaagactccatctcaaaaaaaaaggaaaagaaaaaccagtggttgaaataaattggtaatgcaagagtcttcattaggcaggtgaccaaagctggattctcattgtgaaaagaaagcatttattccaaggtgggaggatggattgaacatgggggcctgctgccccagtcaaggctgcagcacccagcatccctatgaggagccagcctgaggacaatcagaagcctgaaccaagaagaaggaacagagaaccaagacatccttgatggcgtcactgggctgcggcaccgaacaagcctggagccaaccacacctcaggcttctcatcaggcgagttagtgaatttccttccaggtgaagccagtttgatctggttttctgttatatgcagccaaatgctttccactagatgtggtgagtaaaagacaggaggattctgtatagaagaccaatgactgaggtacaaggatccacagaaacatcgactggcagattctgaaccatagcccaggattccttcagacatgtcacagtaaggtccaccaatgtgtgctacatgcctggctttgagttctgggacagggctgtgggaaaggtgaatcagatgatcctttggctctcccaagagctgagctccctgtcacttttcacacgctggttcctccacctggaacactgttaccctcttccacctccttctatccagctaactcctactcagctttcaggtctcagctccactgtcacttcctgagatgccctctttggaactcccacaataggttatgacatcctgcttatttattcctaaattcccctcatttttctttctagaacttatttcagttgtcatctatggattgatgtccaccttcccaactgaactcagagtgtgccatcaattctaataacttctttatcctgacccacttttgttaaatattgtattctaaaagggaaccttgttttgctctggtaagtgagaaagtcaatttcccttcctacaaatagaagtctgcaatcacaacacaacaaaatcaaaacaatgccactaagtcccaggaaacccttgtatgtttcttagggctaagttggaggttgtcccctctgttaaaaaaaagaaatgaactgcactgggggagtgaaaggaaaatgaaagactcagcgctgatctgagacttttctttttttttgagccggagtcttgctcagtcacccaggctagaatgcactggcgcaatgttggctcactgcaacctccgcctcccaggttcaagcgattctcctgcttcaaactcctgagtagctgggattacaggcgcgcaccactgcgcccagctaatttttgtatttttagtacagacggggtttcaccatcttggccaggttggtattgaactcctgacctcgtgatccacccgcctcggcctcccaaagtgctgggattacaggcgtgagccaccacacccagctgatgagacttttatgacaagaattagcgtgctggacagagaaagtaaaaggaatggctttatcagggtatcaaaccatgccatttgaggacattcctgtgtaccctctaaaaacacctcctggatcaacagagcatggatatcaagcatcagaaaacaactaatgaccatgcaggcacccagatgcctttttacagagattgtattgcttaggaagatatccgaggggcactgaggacaaatgtcttctggggggctgcctgactcacccctttctctaagaacagcccatcacccatggcccctgcttaatagggctgtggccacagctgaccccaccaggatggccaatcagcttccttcttatgcaatcttgattaaggacctcagaatgggctgagcactggagtgagggtttgtgttaaaaggacattttctaccccgacaatctctgatgcagacaaagggagaccagtcaggaagaggtgggaacagaaaggtctgtcaagagaaaggtgggcagttccagtgacctttttgcctggccaagaatcagggttagggtcctcctcagggatgagaggtgagtcattacctagtgaaaccagaagcccacaggtctccagcatcacctctcggtacagggtcctctgggccaggtccagctgtctccactcctcccgggtaaaggtcacagccacatccttgaaggtcaccaacatctggaaagtcaaacagaagtaatgctattggccttgtgttgtcgcataggatcagaacctgtcactcagtctctagtcaatgtgcagagagatccaggtctgaatcaactaggtctcctttgggctgacttccgtgcagggctcaaaggggaggcagatactgccttttgacaatgcaattgtgcctgagagaaaagccttctatggggaagctgttgaagatgacacaaacaatggcaatcccacgaggactatgggaagcagagagtaagtactctggcatattaaaagaatggaggaaaatgactgatactaatccaaccacaataacagcaacagcagcagctaagtgtgggggaaagaaaaatagatcagaccgttactgtgtctatgtagaaaaaggaagacataagaaactccattttgatctgtactaagaaaaattcttctgccttgagatgctgttaatctgtaaccctagccccaaccctgtgctcacagaaacatgtgctgtattgactcaaggtttaatggagttagggctgtgcaggatgtgccttggtaaacatgtgtttgcaggcagtatgcttggtaaaagtcatcgccattctcccgtctcgggtacccagggacacaatgcactgcggaaggccacagggacctctgcccgagaaagcctgggtattgtccaaggtttccccccactgagacagcctgagatgtggcctcgtgggaagggaaagaccttaccttccctcagcccgacacccataaagggtctgtgctgacgaggattcatgaaagaggaaggcctctttgcagttgagataagaggaaggcatctgtctcctgcttgtccctgggaatggaatgtcttggtgtaaaacccgagcgtacattctatttactgagataggagaaagccgccttatggctggaggtaagacatgctggcggcaatactgctctttactgcactgagatgtttgggtaaagtcaaacataaatctggcctacgtgcacatcgaggcacagcacctttccttaaacttatttatgacacagagtcctttgctcacatgttttcctgctgaccctctccccactcattaccctatagtcctgccacatccccctcatggagatggtagagatagtgatcaataaatactgagagaactcaga

SEQ ID NO: 202904 - DNA, 556 bp, Homo sapiens
  Payload ID: 20014
  Gene Name: zinc finger protein 549
  ENST ID: ENST00000594943
  CDS Start-End: 154-195
aactggagccggaaaccggtggaggtggtgtccgcccgcagaggagcttgcctggtctcggtctgagcgtcgcccagcgatttgccaccgcacgcacgccggatcccgggctttaccgcccgcctttccaggccccgccccgcctaaagtcccatggccgaggcagcgctagtgattacgccgcagctggattgagccagagcaaccataaagattcctgttcacagcaaaaggtacctgtgtctctgaataattgtgtggctcagtgctcacctgatgatggacactatgacccaaagtgagtcagaaacaaccaggcccccggaaagccacaatgagcagtttcacacagaaattcagaggcagtggtgccctcacattatctgaagactgccatgactccacatgaccagctggtggctgcttacctgcacaggtagcatgtgagaggcctctcttcactatccacagctcctgcccatgctctagcaggtggaccaactctggtttgggaacccgatgccctgttgatagcaaaagaaatagaataggggta

SEQ ID NO: 202905 - DNA, 1361 bp, Homo sapiens
  Payload ID: 20015
  Gene Name: zinc finger protein 550
  ENST ID: ENST00000506609
  CDS Start-End: 4-1149
cagatgttggtgaccttcaaggatgtggctgtgacctttacccgggaggagtggagacagctggacctggcccagaggaccctgtaccgagaggtgatgctggagacctgtgggcttctggtttcactaggtgacagagcacaagttcataccagagagccaaccacttacccgccagtcttatctgagcgggcctttctccggggaagcctgactctggaatcttcaacctcaagtgattcgaggttggggagagctagggatgaggaagggcttttggaaatgcagaaaggtaaagtgacaccggagacagacctccacaaggagacccatcttgggaaagtgagccttgaaggtgaaggtttggggacagatgatggtctgcactccagggcattacaagagtggttatcagcagatgttctccatgaatgtgactcacagcaaccagggaaagacgccttgattcatgcagggacaaacccctacaaatgcaagcagtgtgggaaaggttttaacaggaagtggtatctcgttcgacatcagagggttcacactggaatgaaaccctatgaatgcaatgcatgtgggaaagcctttagccagagctcaactctcattcggcactacctcatccacaccggggagaaaccatacaagtgccttgagtgtgggaaggccttcaaacgcaggtcgtacctcatgcagcaccatccaatccacactggagagaaaccctatgagtgtagtcaatgtcgaaaggccttcacccaccggtctacttttattcgccataataggacccacactggagaaaagccctttgagtgcaaagaatgtgagaaagcctttagcaatagagcccacctaattcaacattacatcatccacactggagagaagccctatgattgcatggcatgtggaaaggccttcagatgcagctcagaactcatacagcaccagcggattcacactggggagaagccctatgaatgcacccagtgtgggaaagcctttcaccggagcacgtacctcattcagcactctgtcatccacactggggagatgccctacaagtgtatcgagtgtgggaaggccttcaaacgcaggtcacaccttctgcagcaccaaagggtccatacatgagagaaccctattgctgcaatgaatacagcaaggcctttacccactgttattttatcattcataatgggacccacactgtaggaagaagtccttcgaatgcaaagaatgtcaggaaacttttcattttttttgtcagctctttcttaactaacacatgagcagtcactttggagagaagccctgtgaatacagtgaatgtaaggatcccttca

SEQ ID NO: 202906 - DNA, 3485 bp, Homo sapiens
  Payload ID: 20015
  Gene Name: zinc finger protein 550
  ENST ID: ENST00000344222
  CDS Start-End: 1-1019
gtgacagagcacaagttcataccagagagccaaccacttacccgccagtcttatctgagcgggcctttctccggggaagcctgactctggaatcttcaacctcaagtgattcgaggttggggagagctagggatgaggaagggcttttggaaatgcagaaaggtaaagtgacaccggagacagacctccacaaggagacccatcttgggaaagtgagccttgaaggtgaaggtttggggacagatgatggtctgcactccagggcattacaagagtggttatcagcagatgttctccatgaatgtgactcacagcaaccagggaaagacgccttgattcatgcagggacaaacccctacaaatgcaagcagtgtgggaaaggttttaacaggaagtggtatctcgttcgacatcagagggttcacactggaatgaaaccctatgaatgcaatgcatgtgggaaagcctttagccagagctcaactctcattcggcactacctcatccacaccggggagaaaccatacaagtgccttgagtgtgggaaggccttcaaacgcaggtcgtacctcatgcagcaccatccaatccacactggagagaaaccctatgagtgtagtcaatgtcgaaaggccttcacccaccggtctacttttattcgccataataggacccacactggagaaaagccctttgagtgcaaagaatgtgagaaagcctttagcaatagagcccacctaattcaacattacatcatccacactggagagaagccctatgattgcatggcatgtggaaaggccttcagatgcagctcagaactcatacagcaccagcggattcacactggggagaagccctatgaatgcacccagtgtgggaaagcctttcaccggagcacgtacctcattcagcactctgtcatccacactggggagatgccctacaagtgtatcgagtgtgggaaggccttcaaacgcaggtcacaccttctgcagcaccaaagggtccatacatgagagaaccctattgctgcaatgaatacagcaaggcctttacccactgttattttatcattcataatgggacccacactgtaggaagaagtccttcgaatgcaaagaatgtcaggaaacttttcattttttttgtcagctctttcttaactaacacatgagcagtcactttggagagaagccctgtgaatacagtgaatgtaaggatcccttcagtcaccactcagttctcactcattgcagaaggattcataccagggggaaatgtggaaggcattccatcaacatcagagaactcatgctggagaaagacattccaaatataactattaaggacagtctttggccagagcagaaatcttactatctgagaatcataatgaaaagttactacataattgttattgatgtgagaaaactttgtgaccaggttgtcacttgcttgtcctataaagagccatgctggaatttgacccaccttgggattttctctatgaacttatgaaaaccttcagttacaggacagagtgcacagtttcctctcctgtgggaaggagagttgactcttgaggacccccaccctcctgcatcctctctctggaaggctgcatgtattgtagctgtggctgtacttgtacctaaggccctgggttcaagagagttggagaaacccctctagaaacatattggctgtcatcaaagggttctttccaggcctgaggacctaggccccagtttgtcccaaagcaggagtgttttccatgggataaaggacaccctaggtttttcttagcttccagctctttccatacagtcttcactgaagtgtttggtacaaggatctactatgaacttgctgctgtgataggcaagaatctcatgagacacctgtcatttagctccatggccactcactgttgtggtcatacttagaagagtgggatgcagtggatggctgggctatgggtcctgcccttgagcagggaaggaacttactgtctaatataggaaaaacacatgagaacaggtgcaatatattgacttaaacttgtttagcacccgtttttaagtcagtagaagttttgaacttacagtaaaagttgtgaacttctgtatgttttccacagtttatgattgaggtaaaacatgttttttgttttgtttttgagacagagtttcactcttgttgcccaggctggagtgcagtggcgccatctcagctcactgcaacttctgcctcccgagttcaagggattctcctgcctcagcctcccgagtagctgggattacaggcgcccaccaccatgcccggctagtttttttgtatttttagtagagacggggtttcaccatgttggccaggctggtcttgaactcttgacctcatgtagtccacccgcctctgcctcccaaagtgctgcgattacaggcgtgagccaccgtgcccggcagaggtaaaacgttttcatgttcatgtttttgtaactttgttacatttaatgaacaaattagataaaaagcactatgctcttatgctgcttaatctgtgagaaatgattgtgggggtgggactagttatgaccattcacagttggtgcacttcaatcagtaaatgtcacagaggaaatgtggacggtaaattaactcggcaagtcggtcatgcaaagacgaattagaaatcttaatatttgtaagcagacaaaaaatgtgtctggaaggatcctcacccagttaaatggtatttgctccttgggtgtagagggagggaagggatggggtagaggggaatgtcagagttcactttaacttcatgcacatgtggaaatgtttgaaatgttcacagtaaattttataatttcagaaaaactgcttaaggttgaaaagagaaatttaagaaattgctgacggaataaaaacataatagaactacaacaccgaaggaaatgaaagaagcaagaaggaaagcaccagaagtgatttggaagagaaatcctaaaatgaatgtgaacaacagagtgatcagaagagtgtagggaattaatagtttctttaaacaagccatctcacaatggaagcctgtgtgtcttgaaattgctgtggttattattcactctgccctttgaagaactgcagaaattcatagggcaatgttaagtgtttgtgtctccaaaaaagatgttggagtcgttaccctcagaacctcaggtaatcatgttagttaatccattaggttagttcctaattgactatgactgtgtccttagaaaaatgggaaatttggtcacagaggcagatgtacagagggaagacgatgtgaagacacaggaagaacatcttcaagccaaggaacacacggggctaccagaagccgagatagaagcatggaacatatgttctagtaagaagtgtctgggttgttttggttttttttctttggagtttttgtggtattaaattatttttaaatta

SEQ ID NO: 202907 - DNA, 4305 bp, Homo sapiens
  Payload ID: 20015
  Gene Name: zinc finger protein 550
  Uniprot ID: Q7Z398
  ENST ID: ENST00000325134
  CDS Start-End: 182-1450
gggacttccggcctcgctggcgtggacgtttgtggtggggcgtgttggtccgcgctctcagaactgtgctgggaaggatggtagggcgactggggctcacctccgcaccgttgtaggacccggggtagggttttgagcccgtgggagctgccccacgcggcctcgtcctgccaacggtcggatggcggagacgaaggacgcagcgcagatgttggtgaccttcaaggatgtggctgtgacctttacccgggaggagtggagacagctggacctggcccagaggaccctgtaccgagaggtgatgctggagacctgtgggcttctggtttcactagggcatcgggttcccaaaccagagttggtccacctgctagagcatgggcaggagctgtggatagtgaagagaggcctctcacatgctacctgtgcaggtgacagagcacaagttcataccagagagccaaccacttacccgccagtcttatctgagcgggcctttctccggggaagcctgactctggaatcttcaacctcaagtgattcgaggttggggagagctagggatgaggaagggcttttggaaatgcagaaaggtaaagtgacaccggagacagacctccacaaggagacccatcttgggaaagtgagccttgaaggtgaaggtttggggacagatgatggtctgcactccagggcattacaagagtggttatcagcagatgttctccatgaatgtgactcacagcaaccagggaaagacgccttgattcatgcagggacaaacccctacaaatgcaagcagtgtgggaaaggttttaacaggaagtggtatctcgttcgacatcagagggttcacactggaatgaaaccctatgaatgcaatgcatgtgggaaagcctttagccagagctcaactctcattcggcactacctcatccacaccggggagaaaccatacaagtgccttgagtgtgggaaggccttcaaacgcaggtcgtacctcatgcagcaccatccaatccacactggagagaaaccctatgagtgtagtcaatgtcgaaaggccttcacccaccggtctacttttattcgccataataggacccacactggagaaaagccctttgagtgcaaagaatgtgagaaagcctttagcaatagagcccacctaattcaacattacatcatccacactggagagaagccctatgattgcatggcatgtggaaaggccttcagatgcagctcagaactcatacagcaccagcggattcacactggggagaagccctatgaatgcacccagtgtgggaaagcctttcaccggagcacgtacctcattcagcactctgtcatccacactggggagatgccctacaagtgtatcgagtgtgggaaggccttcaaacgcaggtcacaccttctgcagcaccaaagggtccatacatgagagaaccctattgctgcaatgaatacagcaaggcctttacccactgttattttatcattcataatgggacccacactgtaggaagaagtccttcgaatgcaaagaatgtcaggaaacttttcattttttttgtcagctctttcttaactaacacatgagcagtcactttggagagaagccctgtgaatacagtgaatgtaaggatcccttcagtcaccactcagttctcactcattgcagaaggattcataccagggggaaatgtggaaggcattccatcaacatcagagaactcatgctggagaaagacattccaaatataactattaaggacagtctttggccagagcagaaatcttactatctgagaatcataatgaaaagttactacataattgttattgatgtgagaaaactttgtgaccaggttgtcacttgcttgtcctataaagagccatgctggaatttgacccaccttgggattttctctatgaacttatgaaaaccttcagttacaggacagagtgcacagtttcctctcctgtgggaaggagagttgactcttgaggacccccaccctcctgcatcctctctctggaaggctgcatgtattgtagctgtggctgtacttgtacctaaggccctgggttcaagagagttggagaaacccctctagaaacatattggctgtcatcaaagggttctttccaggcctgaggacctaggccccagtttgtcccaaagcaggagtgttttccatgggataaaggacaccctaggtttttcttagcttccagctctttccatacagtcttcactgaagtgtttggtacaaggatctactatgaacttgctgctgtgataggcaagaatctcatgagacacctgtcatttagctccatggccactcactgttgtggtcatacttagaagagtgggatgcagtggatggctgggctatgggtcctgcccttgagcagggaaggaacttactgtctaatataggaaaaacacatgagaacaggtgcaatatattgacttaaacttgtttagcacccgtttttaagtcagtagaagttttgaacttacagtaaaagttgtgaacttctgtatgttttccacagtttatgattgaggtaaaacatgttttttgttttgtttttgagacagagtttcactcttgttgcccaggctggagtgcagtggcgccatctcagctcactgcaacttctgcctcccgagttcaagggattctcctgcctcagcctcccgagtagctgggattacaggcgcccaccaccatgcccggctagtttttttgtatttttagtagagacggggtttcaccatgttggccaggctggtcttgaactcttgacctcatgtagtccacccgcctctgcctcccaaagtgctgcgattacaggcgtgagccaccgtgcccggcagagaaaaactgcttaaggttgaaaagagaaatttaagaaattgctgacggaataaaaacataatagaactacaacaccgaaggaaatgaaagaagcaagaaggaaagcaccagaagtgatttggaagagaaatcctaaaatgaatgtgaacaacagagtgatcagaagagtgtagggaattaatagtttctttaaacaagccatctcacaatggaagcctgtgtgtcttgaaattgctgtggttattattcactctgccctttgaagaactgcagaaattcatagggcaatgttaagtgtttgtgtctccaaaaaagatgttggagtcgttaccctcagaacctcaggtaatcatgttagttaatccattaggttagttcctaattgactatgactgtgtccttagaaaaatgggaaatttggtcacagaggcagatgtacagagggaagacgatgtgaagacacaggaagaacatcttcaagccaaggaacacacggggctaccagaagccgagatagaagcatggaacatatgttctagtaagaagtgtctgggttgttttggttttttttctttggagtttttgtggtattaaattatttttaaattatgttttattgtagacctcacaattctttttttttctttttcactcaaactacagcaaaatattatatttctatcctatatttcatgggcttacctctagccaattgtttttaactgccatgtaatattttacatcatgaagctttcatccttgattcaaatcctctgattatggacatgtatttcctccattttcctgctatgaaatatatcaccaccagcttgattcaaccttaaaaataaggtcatcagtattatgttctaaataaacttatggccatacatgagaaatgtaccttgcagctgaatggctaggtcatatggtgatctagtatgtaactggaattatgttatacattgcccttcctctcccataagatggacaaaagtgtttctgtatcactgtgtcccagacaatatttagaattacccagctttccagtttttactttagaagtttaaagtgatatagaatatatctggtatttctcatattgaaatacatttgaacattagttcatatcctttcattgccttttgtttttcctcttctgtcaatggtctactcatatgttggcctgtctttatttgtatcttgactttttattgtgtattttgtttatggtggggtactttattggtgattaatacgattttcaagtatattatatgggctagtcccttgatactattgacactgtatttatcttcagtctcttgttggtatctaactttggttctgaagtttatggaatggaagtatttaattggaaagattaaacatattgattttaatt

SEQ ID NO: 202908 - DNA, 3719 bp, Homo sapiens
  Payload ID: 20015
  Gene Name: zinc finger protein 550
  Uniprot ID: Q7Z398
  ENST ID: ENST00000376230
  CDS Start-End: 182-1450
gggacttccggcctcgctggcgtggacgtttgtggtggggcgtgttggtccgcgctctcagaactgtgctgggaaggatggtagggcgactggggctcacctccgcaccgttgtaggacccggggtagggttttgagcccgtgggagctgccccacgcggcctcgtcctgccaacggtcggatggcggagacgaaggacgcagcgcagatgttggtgaccttcaaggatgtggctgtgacctttacccgggaggagtggagacagctggacctggcccagaggaccctgtaccgagaggtgatgctggagacctgtgggcttctggtttcactagggcatcgggttcccaaaccagagttggtccacctgctagagcatgggcaggagctgtggatagtgaagagaggcctctcacatgctacctgtgcaggtgacagagcacaagttcataccagagagccaaccacttacccgccagtcttatctgagcgggcctttctccggggaagcctgactctggaatcttcaacctcaagtgattcgaggttggggagagctagggatgaggaagggcttttggaaatgcagaaaggtaaagtgacaccggagacagacctccacaaggagacccatcttgggaaagtgagccttgaaggtgaaggtttggggacagatgatggtctgcactccagggcattacaagagtggttatcagcagatgttctccatgaatgtgactcacagcaaccagggaaagacgccttgattcatgcagggacaaacccctacaaatgcaagcagtgtgggaaaggttttaacaggaagtggtatctcgttcgacatcagagggttcacactggaatgaaaccctatgaatgcaatgcatgtgggaaagcctttagccagagctcaactctcattcggcactacctcatccacaccggggagaaaccatacaagtgccttgagtgtgggaaggccttcaaacgcaggtcgtacctcatgcagcaccatccaatccacactggagagaaaccctatgagtgtagtcaatgtcgaaaggccttcacccaccggtctacttttattcgccataataggacccacactggagaaaagccctttgagtgcaaagaatgtgagaaagcctttagcaatagagcccacctaattcaacattacatcatccacactggagagaagccctatgattgcatggcatgtggaaaggccttcagatgcagctcagaactcatacagcaccagcggattcacactggggagaagccctatgaatgcacccagtgtgggaaagcctttcaccggagcacgtacctcattcagcactctgtcatccacactggggagatgccctacaagtgtatcgagtgtgggaaggccttcaaacgcaggtcacaccttctgcagcaccaaagggtccatacatgagagaaccctattgctgcaatgaatacagcaaggcctttacccactgttattttatcattcataatgggacccacactgtaggaagaagtccttcgaatgcaaagaatgtcaggaaacttttcattttttttgtcagctctttcttaactaacacatgagcagtcactttggagagaagccctgtgaatacagtgaatgtaaggatcccttcagtcaccactcagttctcactcattgcagaaggattcataccagggggaaatgtggaaggcattccatcaacatcagagaactcatgctggagaaagacattccaaatataactattaaggacagtctttggccagagcagaaatcttactatctgagaatcataatgaaaagttactacataattgttattgatgtgagaaaactttgtgaccaggttgtcacttgcttgtcctataaagagccatgctggaatttgacccaccttgggattttctctatgaacttatgaaaaccttcagttacaggacagagtgcacagtttcctctcctgtgggaaggagagttgactcttgaggacccccaccctcctgcatcctctctctggaaggctgcatgtattgtagctgtggctgtacttgtacctaaggccctgggttcaagagagttggagaaacccctctagaaacatattggctgtcatcaaagggttctttccaggcctgaggacctaggccccagtttgtcccaaagcaggagtgttttccatgggataaaggacaccctaggtttttcttagcttccagctctttccatacagtcttcactgaagtgtttggtacaaggatctactatgaacttgctgctgtgatagaaaaactgcttaaggttgaaaagagaaatttaagaaattgctgacggaataaaaacataatagaactacaacaccgaaggaaatgaaagaagcaagaaggaaagcaccagaagtgatttggaagagaaatcctaaaatgaatgtgaacaacagagtgatcagaagagtgtagggaattaatagtttctttaaacaagccatctcacaatggaagcctgtgtgtcttgaaattgctgtggttattattcactctgccctttgaagaactgcagaaattcatagggcaatgttaagtgtttgtgtctccaaaaaagatgttggagtcgttaccctcagaacctcaggtaatcatgttagttaatccattaggttagttcctaattgactatgactgtgtccttagaaaaatgggaaatttggtcacagaggcagatgtacagagggaagacgatgtgaagacacaggaagaacatcttcaagccaaggaacacacggggctaccagaagccgagatagaagcatggaacatatgttctagtaagaagtgtctgggttgttttggttttttttctttggagtttttgtggtattaaattatttttaaattatgttttattgtagacctcacaattctttttttttctttttcactcaaactacagcaaaatattatatttctatcctatatttcatgggcttacctctagccaattgtttttaactgccatgtaatattttacatcatgaagctttcatccttgattcaaatcctctgattatggacatgtatttcctccattttcctgctatgaaatatatcaccaccagcttgattcaaccttaaaaataaggtcatcagtattatgttctaaataaacttatggccatacatgagaaatgtaccttgcagctgaatggctaggtcatatggtgatctagtatgtaactggaattatgttatacattgcccttcctctcccataagatggacaaaagtgtttctgtatcactgtgtcccagacaatatttagaattacccagctttccagtttttactttagaagtttaaagtgatatagaatatatctggtatttctcatattgaaatacatttgaacattagttcatatcctttcattgccttttgtttttcctcttctgtcaatggtctactcatatgttggcctgtctttatttgtatcttgactttttattgtgtattttgtttatggtggggtactttattggtgattaatacgattttcaagtatattatatgggctagtcccttgatactattgacactgtatttatcttcagtctcttgttggtatctaactttggttctgaagtttatggaatggaagtatttaattggaaagattaaacatattgattttaatt

SEQ ID NO: 202909 - DNA, 4305 bp, Homo sapiens; identical to SEQ ID NO: 202907
  Payload ID: 20015
  Gene Name: zinc finger protein 550
  Uniprot ID: Q7Z398
  ENST ID: ENST00000447310
  CDS Start-End: 182-1450

SEQ ID NO: 202910 - DNA, 3376 bp, Homo sapiens
  Payload ID: 20015
  Gene Name: zinc finger protein 550
  Uniprot ID: Q7Z398
  ENST ID: ENST00000457177
  CDS Start-End: 182-1450
gggacttccggcctcgctggcgtggacgtttgtggtggggcgtgttggtccgcgctctcagaactgtgctgggaaggatggtagggcgactggggctcacctccgcaccgttgtaggacccggggtagggttttgagcccgtgggagctgccccacgcggcctcgtcctgccaacggtcggatggcggagacgaaggacgcagcgcagatgttggtgaccttcaaggatgtggctgtgacctttacccgggaggagtggagacagctggacctggcccagaggaccctgtaccgagaggtgatgctggagacctgtgggcttctggtttcactagggcatcgggttcccaaaccagagttggtccacctgctagagcatgggcaggagctgtggatagtgaagagaggcctctcacatgctacctgtgcaggtgacagagcacaagttcataccagagagccaaccacttacccgccagtcttatctgagcgggcctttctccggggaagcctgactctggaatcttcaacctcaagtgattcgaggttggggagagctagggatgaggaagggcttttggaaatgcagaaaggtaaagtgacaccggagacagacctccacaaggagacccatcttgggaaagtgagccttgaaggtgaaggtttggggacagatgatggtctgcactccagggcattacaagagtggttatcagcagatgttctccatgaatgtgactcacagcaaccagggaaagacgccttgattcatgcagggacaaacccctacaaatgcaagcagtgtgggaaaggttttaacaggaagtggtatctcgttcgacatcagagggttcacactggaatgaaaccctatgaatgcaatgcatgtgggaaagcctttagccagagctcaactctcattcggcactacctcatccacaccggggagaaaccatacaagtgccttgagtgtgggaaggccttcaaacgcaggtcgtacctcatgcagcaccatccaatccacactggagagaaaccctatgagtgtagtcaatgtcgaaaggccttcacccaccggtctacttttattcgccataataggacccacactggagaaaagccctttgagtgcaaagaatgtgagaaagcctttagcaatagagcccacctaattcaacattacatcatccacactggagagaagccctatgattgcatggcatgtggaaaggccttcagatgcagctcagaactcatacagcaccagcggattcacactggggagaagccctatgaatgcacccagtgtgggaaagcctttcaccggagcacgtacctcattcagcactctgtcatccacactggggagatgccctacaagtgtatcgagtgtgggaaggccttcaaacgcaggtcacaccttctgcagcaccaaagggtccatacatgagagaaccctattgctgcaatgaatacagcaaggcctttacccactgttattttatcattcataatgggacccacactgtaggaagaagtccttcgaatgcaaagaatgtcaggaaacttttcattttttttgtcagctctttcttaactaacacatgagcagtcactttggagagaagccctgtgaatacagtgaatgtaaggatcccttcagtcaccactcagttctcactcattgcagaaggattcataccagggggaaatgtggaaggcattccatcaacatcagagaactcatgctggagaaagacattccaaatataactattaaggacagtctttggccagagcagaaatcttactatctgagaatcataatgaaaagttactacataattgttattgatgtgagaaaactttgtgaccaggttgtcacttgcttgtcctataaagagccatgctggaatttgacccaccttgggattttctctatgaacttatgaaaaccttcagttacagaaaaactgcttaaggttgaaaagagaaatttaagaaattgctgacggaataaaaacataatagaactacaacaccgaaggaaatgaaagaagcaagaaggaaagcaccagaagtgatttggaagagaaatcctaaaatgaatgtgaacaacagagtgatcagaagagtgtagggaattaatagtttctttaaacaagccatctcacaatggaagcctgtgtgtcttgaaattgctgtggttattattcactctgccctttgaagaactgcagaaattcatagggcaatgttaagtgtttgtgtctccaaaaaagatgttggagtcgttaccctcagaacctcaggtaatcatgttagttaatccattaggttagttcctaattgactatgactgtgtccttagaaaaatgggaaatttggtcacagaggcagatgtacagagggaagacgatgtgaagacacaggaagaacatcttcaagccaaggaacacacggggctaccagaagccgagatagaagcatggaacatatgttctagtaagaagtgtctgggttgttttggttttttttctttggagtttttgtggtattaaattatttttaaattatgttttattgtagacctcacaattctttttttttctttttcactcaaactacagcaaaatattatatttctatcctatatttcatgggcttacctctagccaattgtttttaactgccatgtaatattttacatcatgaagctttcatccttgattcaaatcctctgattatggacatgtatttcctccattttcctgctatgaaatatatcaccaccagcttgattcaaccttaaaaataaggtcatcagtattatgttctaaataaacttatggccatacatgagaaatgtaccttgcagctgaatggctaggtcatatggtgatctagtatgtaactggaattatgttatacattgcccttcctctcccataagatggacaaaagtgtttctgtatcactgtgtcccagacaatatttagaattacccagctttccagtttttactttagaagtttaaagtgatatagaatatatctggtatttctcatattgaaatacatttgaacattagttcatatcctttcattgccttttgtttttcctcttctgtcaatggtctactcatatgttggcctgtctttatttgtatcttgactttttattgtgtattttgtttatggtggggtactttattggtgattaatacgattttcaagtatattatatgggctagtcccttgatactattgacactgtatttatcttcagtctcttgttggtatctaactttggttctgaagtttatggaatggaagtatttaattggaaagattaaacatattgattttaattaata

SEQ ID NO: 202911 - DNA, 515 bp, Homo sapiens
  Payload ID: 20015
  Gene Name: zinc finger protein 550
  ENST ID: ENST00000601415
  CDS Start-End: 131-508
gcgctctcagaactgtgctgggaaggatggtagggcgactggggctcacctccgcaccgttgtaggacccggggtagggttttgagcccgtgggagctgccccacgcggcctcgtcctgccaacggtcggatggcggagacgaaggacgcagcgcagatgttggtgaccttcaaggatgtggctgtgacctttacccgggaggagtggagacagctggacctggcccagaggaccctgtaccgagaggtgatgctggagacctgtgggcttctggtttcactagggcatcgggttcccaaaccagagttggtccacctgctagagcatgggcaggagctgtggatagtgaagagaggcctctcacatgctacctgtgcaggtcaagaaccaaggaaagaagaagggcccatgtccaactctgggaaagacaggaaactcctggaaaaaggggaagagcagagtccagcagaggttgatggtgtggttttaagagatcttacctactgaggccata

SEQ ID NO: 202912 - DNA, 4564 bp, Homo sapiens
  Payload ID: 20016
  Gene Name: zinc finger protein 551
  Uniprot ID: Q7Z340
  ENST ID: ENST00000282296
  CDS Start-End: 186-2198
aacttccggcgtcctcctcgtggcggtcattttggcctctgtcctgtttgtccagcccgccagtttctgcagtggaggtcgcgactgagggacgggacagagaagtcgcgaaagtgggccagaggttctgcgacaccacctcgggtgagctgcgccaggcccgggatagggactgttgtgttcgaatgcccgccccggtcggccgccgctccccgcctagtccacggagctcaatggcggcagtcgcgctgagggactcggctcagggtatgacctttgaggatgtggccatttatttctcccaagaagagtgggagctccttgatgagtctcagaggttcctgtactgcgatgtgatgctggagaactttgcacatgtaacatccctgggttattgccatggaatggagaatgaggcgatagcttctgagcagagtgtatctatacaggtcaggacttctaagggcaatacacccacccagaaaactcacctcagtgagattaagatgtgtgtcccagtcttgaaagacattttgcctgcggctgagcaccaaaccacatcccctgtgcaaaagtcatacttgggtagcacaagcatgagaggcttctgcttcagtgctgaccttcaccagcatcaaaagcattacaatgaagaagagccctggaaaaggaaggtggatgaggctacatttgtgaccggctgcagattccatgtgttgaattatttcacctgtggggaggccttcccagcccccacggacctactccaacacgaagccactcccagtggtgaggagccacacagtagcagcagcaagcatatacaggcatttttcaatgcaaaaagttattacaagtggggtgaatacagaaaagcttcaagccacaaacacacacttgttcagcatcagagtgtctgttctgaaggagggctttatgagtgtagcaaatgtgagaaagccttcacttgcaagaacacacttgttcagcaccagcaaattcacactggacaaaagatgtttgagtgtagtgaatgtgaggaatcctttagcaaaaagtgccacctaatcttacacaagataattcacactggagaaaggccttatgaatgcagtgatcgtgagaaagcctttatccataaatctgaattcattcaccaccagagacgtcacactggaggagtgcgtcatgagtgtggtgaatgtaggaaaacctttagctacaaatctaacctcattgaacaccagagagttcacactggagaaaggccttatgaatgtggcgagtgcgggaaatcctttagacaaagctctagcctttttcgacaccagagagttcactctggagaaaggccttatcagtgctgtgagtgtgggaaatcctttagacaaatcttcaatctcattcgacatagaagagttcacactggagaaatgccttatcagtgcagtgattgtgggaaatcttttagctgcaaatcggaactcattcaacaccagagaattcacagtggagaaagaccttatgaatgcagagaatgtgggaaatcctttagacaattctctaacctcattcgacaccgcagcattcacactggtgataggccttatgagtgcagtgaatgtgagaaatcctttagccgcaaatttatcctgattcaacaccaaagagttcacactggagaaagaccttatgaatgcagtgaatgtggaaaatcctttacccgcaaatctgacctcattcaacaccggagaattcatactggcacaagaccttatgagtgcagtgaatgtggcaaatcttttagacagcgctctggcctcattcagcaccggagacttcatactggagaaaggccttatgaatgtagtgaatgtggaaagtcttttagccaaagtgctagcctcattcaacaccagagagttcacactggagaaaggccttatgaatgtagtgaatgtgggaaatcctttagccagagctctagcctcattcaacaccagagaggtcacactggagaaagaccttatgagtgcagtcaatgtgggaaaccctttacccacaaatcagaccttattcagcaccaaagagttcacactggagaaaggccttatgaatgcagtgaatgtgggaaatcctttagccgcaaatctaacctcattcgacatcggagagttcacactgaagaaaggccttaaatgtgaagggaatgtgctatttctttattcagtataatagcactggaggagactgtggtagccatcttcgtaaatttaaactttgagcacccacagtggggtattcttcataagtttcaggtatgtgggaagctctgaggaggttcattgtaatttctaatctgccgaggcctatagcctgatttatgtcactgccaatttctgaggctgaagccatttcacatttcacccctaccacctggcaggtgcacaccatgtgcatgagtcacttccccacagtgctcagagaagcaaacctctgtactctcccatttgcttggggaaattattaatagcccaagcatgtagggtcttcatgtcttttctctgactttagagtatacacctgacccagttgtggtccagagaatctgagttgtgctgtcagctttctaaggattacttttttaaggaacattgtcggtctcacatgatgcttgtaatgaatttttccacattctgattcaccagcctggaaactgcttggtgcacattgctttaatttataatgtttttataaaggttttaaaaaaatttacgcacctttaatcttgggtgttctattcattgcatagaatgacttgtaagcagaatagtgatgtcagcatgaaggggtgaatagattttgtggagatctcaaactttctgtactcagaagggacaatgtgatggcagaagacagctctttgttctgtattgctctaattggcctgctgcccaaggcctcaaagtaaagactgccaggctttgtgttcctgtattgtggcctggtgccatttttgtcaggtcagaggtcaccatgaaaaggaggcagttgtgacaatccccagtgcttctgtgaacgtgaattttgttcagttgtccacaggagatccacataattcctagcactggtgaggggaatctgttgcccaggtcctgcaaaggagccaggtgccatggcatataagtcagtgtagactggtgccatttgttgtcagactataggtgtggaggtgaaattacaggttcaacagtaattgggacagaaactccaggtaaatggggagtggagaagactgcagtaaattagatggaatgactcttctaaaagttcatctacaaattttccagtgaatatggttgtgtaggatcagtgcatacagaaattctcaggatcttctgtttactatcgctgagatcattatcagaaaatagtctggccgggcatggtgtaatcctaacactttgggaggccaaggcgggcggattgcctgagctcaggagttcaagaccagcctgggcaacatggtgaaatcccatgtctactaaaatacaaaaaattagccaggcgtggcagcatgcgcctatagtcccagccacttgggaggctgaggcaggagaatcgcttgaacccagaaggcggaagttgcagtgagctgagattgcaccactgcactccagcccaggcaacagagtgagactccgtctccaaaaaaaaaaaagaaaatagtctataaaggttttgtggctccttgtatcctgtctgggctgttcacctcaaggccattgctatgcaggtaggagaacaagaatagagagaaggatcattccgcggtccagggatgtggcttttgtgactcagccaacattcctattaattcaggtggcaacagccttcattgcttgccaaaatttgctgcccctgaggcaaggttgcctctctcagggcatgaggagagagagagatggtgaagtccatatcaggttgccaccctgattaaaaaaaaaggaacatctaggctcttaattttgagccactttttaaagctttttgaaggtctaatttgtataactgacatgcaacaaagtacacgtatccaaagtgtacagtttggtaaagccatgaaaccatcattacaaccataaaaatgaatttgtgtgtcacccatatatttaccttgtatctttttataatctttctcccttccccagctcttcaggttcaactgatttcctttacagtaaattagtttgcattttctggagtttttactgagatacatacacacacacacacacacacacacacacacgtatacgcatatacgtatacgtatatatatacatatgtgtttatatatgtgtgtgtgtatatatatatacttactggttttcttcatgctgtataattattttgagattcaaaaatgatgaatctttgtattgctgagtatcatgctgttctatggataagtcagtgtttatccatgtgtttagggacatttatattatttatagatttttgtatattacaaataaagctgctgtaaatacttgaattcatt

SEQ ID NO: 202913 - DNA, 469 bp, Homo sapiens
  Payload ID: 20016
  Gene Name: zinc finger protein 551
  ENST ID: ENST00000596085
  CDS Start-End: 178-354
ccgccagtttctgcagtggaggtcgcgactgagggacgggacagagaagtcgcgaaagtgggccagaggttctgcgacaccacctcgggtgagctgcgccaggcccgggatagggactgttgtgttcgaatgcccgccccggtcggccgccgctccccgcctagtccacggagctcaatggcggcagtcgcgctgagggactcggctcagggtatgacctttgaggatgtggccatttatttctcccaagaagagtgggagctccttgatgagtctcagaggttcctgtactgcgatgtgatgctggagaactttgcacatgtaacatccctggatcaagccaccaatatctgagagagaaatgctggcttcaggagagctcaagtcagaggatcccagcagggattttatacccttctggggtaacacagttgagccagagtgcctacctaatcatgtatgccaacca

SEQ ID NO: 202914 - DNA, 1826 bp, Homo sapiens
  Payload ID: 20016
  Gene Name: zinc finger protein 551
  ENST ID: ENST00000601064
  CDS Start-End: 158-1826
gacgggccggaacttccggcgtcctcctcgtggcggtcattttggcctctgtcctgtttgtccagcccgccagtttctgcagtggaggtcgcgactgagggacgggacagagaagtcgcgaaagtgggccagaggttctgcgacaccacctcggggtatgacctttgaggatgtggccatttatttctcccaagaagagtgggagctccttgatgagtctcagaggttcctgtactgcgatgtgatgctggagaactttgcacatgtaacatccctgggttattgccatggaatggagaatgaggcgatagcttctgagcagagtgtatctatacaggtcaggacttctaagggcaatacacccacccagaaaactcacctcagtgagattaagatgtgtgtcccagtcttgaaagacattttgcctgcggctgagcaccaaaccacatcccctgtgcaaaagtcatacttgggtagcacaagcatgagaggcttctgcttcagtgctgaccttcaccagcatcaaaagcattacaatgaagaagagccctggaaaaggaaggtggatgaggctacatttgtgaccggctgcagattccatgtgttgaattatttcacctgtggggaggccttcccagcccccacggacctactccaacacgaagccactcccagtggtgaggagccacacagtagcagcagcaagcatatacaggcatttttcaatgcaaaaagttattacaagtggggtgaatacagaaaagcttcaagccacaaacacacacttgttcagcatcagagtgtctgttctgaaggagggctttatgagtgtagcaaatgtgagaaagccttcacttgcaagaacacacttgttcagcaccagcaaattcacactggacaaaagatgtttgagtgtagtgaatgtgaggaatcctttagcaaaaagtgccacctaatcttacacaagataattcacactggagaaaggccttatgaatgcagtgatcgtgagaaagcctttatccataaatctgaattcattcaccaccagagacgtcacactggaggagtgcgtcatgagtgtggtgaatgtaggaaaacctttagctacaaatctaacctcattgaacaccagagagttcacactggagaaaggccttatgaatgtggcgagtgcgggaaatcctttagacaaagctctagcctttttcgacaccagagagttcactctggagaaaggccttatcagtgctgtgagtgtgggaaatcctttagacaaatcttcaatctcattcgacatagaagagttcacactggagaaatgccttatcagtgcagtgattgtgggaaatcttttagctgcaaatcggaactcattcaacaccagagaattcacagtggagaaagaccttatgaatgcagagaatgtgggaaatcctttagacaattctctaacctcattcgacaccgcagcattcacactggtgataggccttatgagtgcagtgaatgtgagaaatcctttagccgcaaatttatcctgattcaacaccaaagagttcacactggagaaagaccttatgaatgcagtgaatgtggaaaatcctttacccgcaaatctgacctcattcaacaccggagaattcatactggcacaagaccttatgagtgcagtgaatgtggcaaatcttttagacagcgctctggcctcattcagcaccggagacttcatactggagaaaggccttatgaatgtagtgaatgtggaaagtcttttagccaaagtgctagcctcattcaacaccagagagttcacactggagaaa

SEQ ID NO: 202915 - DNA, 2352 bp, Homo sapiens
  Payload ID: 20017
  Gene Name: zinc finger protein 552
  Uniprot ID: Q9H707
  ENST ID: ENST00000391701
  CDS Start-End: 171-1394
agtagcgaccatttccattggcgttagggagtccttggagcgctgtgttgggaccgtggtggtgactggatccaggaggtcgagagtcgttcttctctttgcacagacgtgactctgcagctctttaacggcgcccgctgctctcaacccagcttaccccacgtggtcccatggcggcggccgcgctaaggttccccgttcagggcacagtgacttttgaagacgtggctgtgaaatttacccaggaggaatggaatctccttagtgaggctcagagatgcctgtaccgtgatgtgacgctggagaacctggcacttatgtcctccctgggttgttggtgtggagtggaagatgaggcggcaccttctaagcagagtatttatatacaaagagagactcaggtcaggactcctatggcaggtgtgtctcccaagaaggcccacccctgtgagatgtgtggcccgatcttgggagacattttgcatgtggcagatcatcagggaacacatcacaagcagaaactgcacaggtgtgaggcctgggggaataaattgtatgacagtggaaactttcatcagcaccagaatgagcacattggagagaaaccctacagagggagtgttgaggaggcgttgtttgcgaagaggtgtaagttgcatgtgtcaggggagtcatctgtcttcagtgagagtgggaaagactttttgctcaggtcaggattactccagcaagaggccactcacactgggaagtcaaacagcaaaactgagtgtgtgtctctgtttcatgggggaaaaagccattacagctgtggaggatgcatgaaacattttagcaccaaagatatactcagtcagcacgagagactgctccctacagaagaaccttctgtgtggtgtgaatgtgggaaatcctctagcaaatatgacagcttcagtaatcatcaaggagttcacactagagaaaaaccttatacgtgtgggatatgtgggaaattatttaacagtaagtcccacctccttgtacaccagagaattcacactggagagaagccatatgagtgtgaggtttgtcagaaattttttaggcacaagtaccacctcattgcacaccagagagttcacactggagaaaggccatatgaatgcagtgattgtgggaagtcatttacccacagctctacattccgtgttcataagagagttcacactggtcagaagccttatgagtgcagtgaatgtgggaaatcttttgccgaaagctccagtctcactaaacacaggagagttcacactggagaaaagccttacgggtgcagtgaatgtgaaaaaaaatttaggcaaatctcttcacttcgtcatcatcagagagttcacaaaagaaagggcttatgagtgcagtgagtccagtctcattaaatattggagaatacacacctgagtaagatcctgtgattgcagcaaatgtggaaaatgtttacccaaaggtctgctctccttggatattggagagttcacactagagaagagtccttacaagtaaaataaatttgggcagttttgtagccacacctctgtattccttcaggattatagttaacactgaatgaaggccttactagtgtgacaaatacaggatatttatccagaagtctggctgcataactcacaggagagctgtcatgtgggaggattgctacatgggaggatttgcttgagcctgggaggcagaggttgcagtgagccgagattgcaacactgcagtccagtctggaccacagagtgagaccctgtttcaaaaataaaatatataaatgacatccaataaagtatgcatatttgagctgtaggataagtcttgaattttctttttcttttttttgagacagcctcgctctgtcacccaggctggagtacagtggcataatctcggctcactgcaagccctgcctcctgggttcatgccattctcctgcctcagcctccctaatagctgggactacaggcaaccaccaccactcctaccttttttgtatttttagtagagatggggtttcaccctgttagccaggaagttctcaatctcctgacctcgtgatctgcccgccttggcctctcaaagtgttgggattgcaggcgtgagccactgctcctggcttgaattttcttataatcccatgaaaccatcatcagagtcacaataatgaatttatctaatctatcacctttgtattcacctggagcctttataaagtttttctctatgcagacaaccattgatttactctgctgtataatactttccattttctagaattttctgactgatgtaataaagtgtttcctcttataa

SEQ ID NO: 202916 - DNA, 1703 bp, Homo sapiens
  Payload ID: 20017
  Gene Name: zinc finger protein 552
  ENST ID: ENST00000596248
  CDS Start-End: 171-320
agtagcgaccatttccattggcgttagggagtccttggagcgctgtgttgggaccgtggtggtgactggatccaggaggtcgagagtcgttcttctctttgcacagacgtgactctgcagctctttaacggcgcccgctgctctcaacccagcttaccccacgtggtcccatggcggcggccgcgctaaggttccccgttcaggtaattgtggcgccttccgtgctctccggtcacctcctagtcacacaagtcctaaagcagcgagggagcggcacctgtttacggctctgcaacccggacccggcgtcgggacactgaggcgctctcgggagggatccctgtttcagacacccgtgggatgcggtggggagagcgacagggcacagtgacttttgaagacgtggctgtgaaatttacccaggaggaatggaatctccttagtgaggctcagagatgcctgtaccgtgatgtgacgctggagaacctggcacttatgtcctccctgggttgttggtgtggagtggaagatgaggcggcaccttctaagcagagtatttatatacaaagagagactcaggtcaggactcctatggcaggtgtgtctcccaagaaggcccacccctgtgagatgtgtggcccgatcttgggagacattttgcatgtggcagatcatcagggaacacatcacaagcagaaactgcacaggtgtgaggcctgggggaataaattgtatgacagtggaaactttcatcagcaccagaatgagcacattggagagaaaccctacagagggagtgttgaggaggcgttgtttgcgaagaggtgtaagttgcatgtgtcaggggagtcatctgtcttcagtgagagtgggaaagactttttgctcaggtcaggattactccagcaagaggccactcacactgggaagtcaaacagcaaaactgagtgtgtgtctctgtttcatgggggaaaaagccattacagctgtggaggatgcatgaaacattttagcaccaaagatatactcagtcagcacgagagactgctccctacagaagaaccttctgtgtggtgtgaatgtgggaaatcctctagcaaatatgacagcttcagtaatcatcaaggagttcacactagagaaaaaccttatacgtgtgggatatgtgggaaattatttaacagtaagtcccacctccttgtacaccagagaattcacactggagagaagccatatgagtgtgaggtttgtcagaaattttttaggcacaagtaccacctcattgcacaccagagagttcacactggagaaaggccatatgaatgcagtgattgtgggaagtcatttacccacagctctacattccgtgttcataagagagttcacactggtcagaagccttatgagtgcagtgaatgtgggaaatcttttgccgaaagctccagtctcactaaacacaggagagttcacactggagaaaagccttacgggtgcagtgaatgtgaaaaaaaatttaggcaaatctcttcacttcgtcatcatcagagagttcacaaaagaaagggcttatgagtgcagtgagtccagtctcattaaatattggagaatacacacctgagtaagatcctgtgattgcagcaaatgtggaaaatgtttacccaaaggtctgctctccttggatattggagagttcacactagaga

SEQ ID NO: 202917 - DNA, 335 bp, Homo sapiens
  Payload ID: 20017
  Gene Name: zinc finger protein 552
  ENST ID: ENST00000594473
  CDS Start-End: 1-188
aagacgtggctgtgaaatttacccaggaggaatggaatctccttagtgaggctcagagatgcctgtaccgtgatgtgacgctggagaacctggcacttatgtcctccctggggaaagaaacagtagctccactcctgccggtccctcccctaggggagagggaagcagaggagaaaacagcagcataggtggctggcaaagacaaaggaaagaccagtagaagagaaagaaaccaaaaacagcaagcgcagagccaaacagccaggcaggcaggccaaaggttaagtccctctccccagccctgcggtttgtgaaaaagagggtgggcaccggct

SEQ ID NO: 202918 - DNA, 2736 bp, Homo sapiens
  Payload ID: 20018
  Gene Name: zinc finger protein 554
  Uniprot ID: Q86TJ5
  ENST ID: ENST00000317243
  CDS Start-End: 199-1815
gagtttacctctgcgcgcgtcggggttggtggcggcggctgcggcgagttcctgaggggcgcctgcggggggcgtccgctccgagcgccgaggagccgagcggaggaggcgtcccagggacacgcaggggaggccggccggcctgcacggggcgctcccgcctcgggggccctgtctggcgcctcagcgcgcgccccgatggtcacctgcgcccacctgggccggcgcgcgcggctcccggcagctcagccctctgcctgcccaggaacctgcttttcccaagaggagagaatggctgctgggtacctgccccgctggtcccaggaattagtaacctttgaggacgtgtccatggacttctcccaggaggagtgggagttgctggagcctgctcagaagaacctgtacagagaggtgatgctggagaactacaggaacgtggtctccctggaagccttgaagaaccaatgtactgatgtggggattaaagagggtccactttccccagcacaaacctcacaagtcactagtctttcctcatggacggggtatttactttttcaaccagtggcttcttcccacttggagcaaagagaagccctgtggatagaggaaaaaggaactcctcaagcctcctgttcagattggatgactgtactaagaaaccaagactcaacttacaagaaggtggctttgcaggaggaaccagccagtggtataaatatgataaagcttatcagagaagatgggggatggaagcagttagaggacagccatgaagacccccaggggcttttgagccaaaaggcatcccttcacgtagtggccgttcctcaggagaaggctactgcatggcatggatttggggaaaatggtaatctgagcccagcccttgttttatcacagggaagctctaaagggaaccacttgtgtggcagcgagttagatattacaagcttggcatccgattcagtcttaaaccaccatcagctgggatatgcagatcggagaccttgtgaaagtaatgaatgtggaaatgccatccgccagaacagtcactttattcaacacggggggaagatgtttgtgtatttggaaaatgggcagtcattgaaccacggtatggccctgactatccacaacaaaatcaacacggcagagaaaccctttgagtgccaccagtgtgggaaggtgttcaaccggaggcattctttgagcgaacatcaaagaattcacacgggggagaaaccctacgagtgtcaggagtgtgggcgagcctttacgcacagctccaccctcacgcgccatctgagaactcatactggagagaagccctacgggtgcggtgagtgcgggaaagccttcaacaggatctcatcgctgactcagcatcagaggattcacaccggggaaaagccctataaatgtgaagactgtgggaaatccttctgccagagctcttacctgatcttgcacaagaggacacacaccggagagaagccctacgaatgcagtgaatgtggaaaggccttcagtgaccgttcctctctcaaccagcacgagcgaactcacacgggcgagaacccctatgaatgtaagcagtgtgggagagccttcagccagaggtcttcccttgtgaggcacgagagaactcacactggagagaaaccctacaggtgtcaggaatgtgggaaagccttcagccagagctcatcccttgtcacacatcagaaaactcacagcagccagaaaacctataaaatcattgactgtgggaaagcgttctaccagaacagacatcttattggatattagcaattgcacgctgctttgtaagccactttttagtactctgacacatacatgtggttatcttttgccctgttgtgatggataatttgaaaagaagtgggtttatgtcaccttctcaccttcttataagaaagctctgagaatgggcatttttgtattttgttgttgttgttgagatggagtctgccacccaggctggagtccagtggcgtgatcatacctcactgcagcttcaacttcctgggctcaagtaatcctcccaccccagcctcccaggtagctagtactataggtgtgcaccaccacgcccagcaaatttttaaatttattatagagtgggaggcagggtgcggtggctcatgcctataatcctaacactttaggaggccgaggcgggtggatcatgaggtcaggagatcgagaccatcctggctaacacagtgaaaccctgtctctactaaaaatacaaaaaagtagccgggcgtggtggtgggcgcctgtagtcccaactactcaggaggctgaggcaggagaatggtgtgaacccgggaggtggagcttgcagtgagccgagatcgcaccactgcactccagcctgggagacagagcgagactccgtctcaaaaaaaaaaaaaaaattatagagttggggtcttgctacattgccaagactggtcttgaactcctggggtcaagcatcctcctgtcttggcctcccaaagtgttgggattagaagcatgagccgctgtgcccagcctgacggggccttttagtgggaggagttgccattacactacgtccagtaagctccagactttcggaaaagattggtggacgggaatgctgtcatggatgggatcttgccaagaaccatcacgtgttaatttagttgcttaaacaaaaggtgttctgtttcttaacta

SEQ ID NO: 202919 - DNA, 2486 bp, Homo sapiens
  Payload ID: 20018
  Gene Name: zinc finger protein 554
  ENST ID: ENST00000590116
  CDS Start-End: 154-360
gagttcctgaggggcgcctgcggggggcgtccgctccgagcgccgaggagccgagcggaggaggcgtcccagggacacgcaggggaggccggccggcctgcacggggcgctcccgcctcgggggccctgtctggcgcctcagcgcgcgccccgatggtcacctgcgcccacctgggccggcgcgcgcggctcccggcagctcagccctctgcctgcccaggaacctgcttttcccaagaggagagaatggctgctgggtacctgccccgctggtcccaggctggattgccgtggcacaatctccgctcactgcaacctctgcctcccggttcaagcgattctcctgcctcagcctcctgagtagctgggactacaggaattagtaacctttgaggacgtgtccatggacttctcccaggaggagtgggagttgctggagcctgctcagaagaacctgtacagagaggtgatgctggagaactacaggaacgtggtctccctggaagccttgaagaaccaatgtactgatgtggggattaaagagggtccactttccccagcacaaacctcacaagtcactagtctttcctcatggacggggtatttactttttcaaccagtggcttcttcccacttggagcaaagagaagccctgtggatagaggaaaaaggaactcctcaagcctcctgttcagattggatgactgtactaagaaaccaagactcaacttacaagaaggtggctttgcaggaggaaccagccagtggtataaatatgataaagcttatcagagaagatgggggatggaagcagttagaggacagccatgaagacccccaggggcttttgagccaaaaggcatcccttcacgtagtggccgttcctcaggagaaggctactgcatggcatggatttggggaaaatggtaatctgagcccagcccttgttttatcacagggaagctctaaagggaaccacttgtgtggcagcgagttagatattacaagcttggcatccgattcagtcttaaaccaccatcagctgggatatgcagatcggagaccttgtgaaagtaatgaatgtggaaatgccatccgccagaacagtcactttattcaacacggggggaagatgtttgtgtatttggaaaatgggcagtcattgaaccacggtatggccctgactatccacaacaaaatcaacacggcagagaaaccctttgagtgccaccagtgtgggaaggtgttcaaccggaggcattctttgagcgaacatcaaagaattcacacgggggagaaaccctacgagtgtcaggagtgtgggcgagcctttacgcacagctccaccctcacgcgccatctgagaactcatactggagagaagccctacgggtgcggtgagtgcgggaaagccttcaacaggatctcatcgctgactcagcatcagaggattcacaccggggaaaagccctataaatgtgaagactgtgggaaatccttctgccagagctcttacctgatcttgcacaagaggacacacaccggagagaagccctacgaatgcagtgaatgtggaaaggccttcagtgaccgttcctctctcaaccagcacgagcgaactcacacgggcgagaacccctatgaatgtaagcagtgtgggagagccttcagccagaggtcttcccttgtgaggcacgagagaactcacactggagagaaaccctacaggtgtcaggaatgtgggaaagccttcagccagagctcatcccttgtcacacatcagaaaactcacagcagccagaaaacctataaaatcattgactgtgggaaagcgttctaccagaacagacatcttattggatattagcaattgcacgctgctttgtaagccactttttagtactctgacacatacatgtggttatcttttgccctgttgtgatggataatttgaaaagaagtgggtttatgtcaccttctcaccttcttataagaaagctctgagaatgggcatttttgtattttgttgttgttgttgagatggagtctgccacccaggctggagtccagtggcgtgatcatacctcactgcagcttcaacttcctgggctcaagtaatcctcccaccccagcctcccaggtagctagtactataggtgtgcaccaccacgcccagcaaatttttaaatttattatagagtgggaggcagggtgcggtggctcatgcctataatcctaacactttaggaggccgaggcgggtggatcatgaggtcaggagatcgagaccatcctggctaacacagtgaaaccctgtctctactaaaaatacaaaaaagtagccgggcgtggtggtgggcgcctgtagtcccaactactcaggaggctgaggcaggagaatggtgtgaacccgggaggtggagcttgcagtgagccgagatcgcaccactgcactccagcctgggagacagagcgagactccgtctc

SEQ ID NO: 202920 - DNA, 1148 bp, Homo sapiens
  Payload ID: 20018
  Gene Name: zinc finger protein 554
  ENST ID: ENST00000591265
  CDS Start-End: 123-668
cgctccgagcgccgaggagccgagcggaggaggcgtcccagggacacgcaggggaggccggccggcctgcacggggcgctcccgcctcgggggccctgtctggcgcctcagcgcgcgccccgatggtcacctgcgcccacctgggccggcgcgcgcggctcccggcagctcagccctctgcctgcccaggaacctgcttttcccaagaggagagaatggctgctgggtacctgccccgctggtcccaggaattagtaacctttgaggacgtgtccatggacttctcccaggaggagtgggagttgctggagcctgctcagaagaacctgtacagagaggtgatgctggagaactacaggaacgtggtctccctggaagccttgaagaaccaatgtactgatgtggggattaaagagggtccactttccccagcacaaacctcacaagtcactagtctttcctcatggacggggtatttactttttcaaccagtggcttcttcccacttggagcaaagagaagccctgtggatagaggaaaaaggaactcctcaagcctcctgttcagtctcgctcttgttgcccaggctacagtgcagtggtgtgatctcggctcactgcaacctccacctcccaggttcaagcgattcttctgcctcagcctcttgagtacagattggatgactgtactaagaaaccaagactcaacttacaagaaggtggctttgcaggaggaaccagccagtggtataaatatgataaagcttatcagagaagatgggggatggaagcagttagaggacagccatgaagacccccaggggcttttgagccaaaaggcatcccttcacgtagtggccgttcctcaggagaaggctactgcatggcatggatttggggaaaatggtaatctgagcccagcccttgttttatcacagggaagctctaaagggaaccacttgtgtggcagcgagttagatattacaagcttggcatccgattcagtcttaaaccaccatcagctgggatatgcagatcggagaccttgtgaaagtaatgaatgtggaaatgccatccgccagaacagtcactttattcaacacggggggaagatgtttgtgtatttggaaaatgggcagtcattgaacc

SEQ ID NO: 202921 - DNA, 8557 bp, Homo sapiens
  Payload ID: 20019
  Gene Name: zinc finger protein 555
  Uniprot ID: Q8NEP9
  ENST ID: ENST00000334241
  CDS Start-End: 139-2025
cgagctctgtctaatcaggcccctgggacgggacgcctctgtcctagccgtgagtgccccgcctgcccctagcggtccctggcgtcccggttcctgtcgcgctcacctgcgccggtagcgaagaaatcgccccgggacatggactcagtggtctttgaggatgtggctgtggacttcaccctggaggagtgggctttgctggattctgctcagagggacctctacagagatgtgatgctggagacctttcagaacctggcctcagtagatgatgaaactcaatttaaggccagtgggtcagtttctcagcaggatatttatggagagaaaatacccaaggaatctaaaatagccacgttcaccagaaatgtttcctgggcctctgttttaggaaaaatttgggacagtcttagcatcgaagatcaaaccacaaaccaggggagaaatctcagtagaaatcatgggttggagagactctgtgaaagtaatgatcaatgtggagaagccctcagccagattccacatcttaatctgtacaagaaaattccacctggagtaaaacagtatgaatacaacacgtacggaaaagtcttcatgcatcgccgcacatccctcaagagtcccatcacagttcacactggacacaaaccatatcagtgccaggaatgtgggcaggcctacagttgtcgttcacacctaagaatgcatgtgagaacccacaatggagagagaccctatgtgtgtaaattatgtgggaaaacctttcctcgtacttcctccctcaatcggcatgtaaggattcacactgctgagaaaacctacgaatgtaagcaatgtgggaaagcctttattgacttctcaagtcttactagtcatctcagaagtcacaccggagagaagccatataagtgtaaggaatgtgggaaagctttcagttattcctcaacgtttcgaagacacacaataacacacactggcgagaagccatataaatgtaaggaatgtgcggaagcctttagttattcctcaacttttcgaagacatatgatttcacacactggagagaagccacataaatgtaaagaatgtggggaggccttcagttattcttcggcttttcgaagacacatgataacacacactggagagaaaccctacgaatgcaaacaatgtgggaaaaccttcatttatctccagtcctttcgaagacatgaaaggattcacactggagagaaaccctacgaatgcaaacagtgtgggaagaccttcatttatccccagtcctttcgaagacatgaaaggactcatggtggagagaaaccctatgaatgcaaccagtgcgggaaagcattcagtcacccctcctcctttcgaggacacatgagggtgcacactggagagaaaccctatgagtgcaagcaatgtgggaaaactttcaattggcccatatctttacgaaaacatatgagaacacatactagagagaaaccctatgaatgtaagcagtgtgggaaagccttcagcttgtctgcttgctttcgagaacatgtgagaatgcaccctgaagacaaatcctatgaatgcaagctatgtgggaaagctttctattgccacatatccttacaaaaacatatgagaagacataccgcagagaaactctataaatgcaagcagtgtgggaaagctttcagttggcctgaacttttgcaacaacatgtgagaacgcacactgtagagaagccctatgaatgtaaggaatgtgggaaggtcttcaaatggccatcatctttaccaatacatatgagactgcacactggagagaaaccttatcaatgtaagcattgtgggaaagcattcaattgttcctcatccttaaggcgacatgtgagaatacacactacagaaaaacagtataagtgtaatgtaggacatcctcctgcaaatgaattcatgtgcagtgcttcagaaaagtcacaccaggagagagatctgatcaaagttgtaaatatggtgttgcctttatgagttccttatcctgaaagtggacactcaaggagtgtgtctgtagttcatttgcaaataaacatttagttgaaaaataattctccaaatactctcagctatcctacatgaatttgaacaggtagtttcttacgattcagtaaataaaactttcatcttagagtgttttggactcatggatgatttgaagtgtatttttaatatgcaagtaggttcaagttttatttaatttcttaaattgtaactgacttagtgtgacaggtattggatattacgtatctattatattttccaccttttttactgggagtatttttattgtttggccagaggagccttattccattttttaagaagtagttggcagaattttgtaattatgcaaagttgtttaaggagtatagcctcaaatgaattgtaatttttaatgtttgcccattgctgtttgtctttgcttgtgattgtgaattggacagtaggctttgacttgtgatgtgacggagaaatccagagttgcagatagttcttctgcattgttgtcagtgtgggtagtgttaggaacttcatttgctggaatgcatttcctttatggttccatgtccaaatttaccaatagcaataacttgaatgaaatttagaatgaagaagaagtaagtcatcgctgagcttttggggtcacattaaatggagatggacagatgcataggggctttgtgaacatcaaccttcagcttattttccagattcttattcctgccaatcaagagtaccatcaaaagaaacacttaagtgcttgatttccactgtgtcagaggtgtagtcttcctcagacatctccattaacttgatattagggatattcctgtgtggtcagtcacctagagtctggatttttctcaaaaccctgcatgacctcttgaccactgattcagactgtcttgtttggcagtctctgagcttctgattctcccgttctgtagatcttaacatatttgcatggggtctaatttatatagtgaacaccttgttatcttaatacttccagtggctctgtgatcctgattccaccacgaaagccacagtgttgcagtcaaagaagaaaaacaacacatgggactttgtaccctattgcatttttaagtgtgcctgccgagtcctatgtgagaacaaataccttcctcatatattagatttagggagatttctgttactcagaactaaatgcagtttcttgatataggttaaattattaggtttgattatgtatcattaaaaataatgtggattttgtttcaaggaaaaccttctgtagatatttcttagaaatatcctgtttagctgggcacagtagctcatgcctgtaatccctgcactttgggaggcttgaggtcaggagtttgagaccagcctggttaacatggtgaaaccctgtctctactaaaaacacaaaaattagccaggcatggtggtgagtacctgtaaccccagctacttgggaggctgagacaggagaagtgcttgaacctaggaggcggaggttgcagtgagccaagatcacaccactgcactccagcctgggagacggggaaagactccatcacacaagcaagaaaagaaaaaaaaatcctatttactgtgctttcaaattagttgtttagagactatattaatttcccagggctgccataacaaagtacaaaaactgggtgacataggaaaacaaactttttgtttctcagttctggacccagaaatccagaaacaaggcattggcaggaccatgctttttctgaagatgctagggaaggatctgtttcagaactcacctagcttctggtagttccttagcttgtggcagcataactctaattttcacatggcattctccctgtgtgtgtgtctctccatgtgacaatatttttatacatacacaccactcattgggttaggccccactctacttcagtatgattttaccttaactaattacattggcaacagctctcttttcgcatactgaggcaccgcgaattaagatttcaacgtaaaaattttaggagacccaattcaacccataacactaagaaatgttattttttgtttaccgagagaattacagatttcaaatcaactttgtaattttgataatttaagcatgttacattttgaatcagtattaccaagtatatacaaatacaggtattttttcatataaatgttatttttaattgctgtatacttaacatttgccattaaaatgattttttttttttgagacagagtctcgctctgtcacccaggctggagtgcagtggcacgaccttagctcactgcaaccttcatctcccaggttcagttgattctcctgcctcagcctcccgagtagttgggattacaggcatgcaccaccacacccagctaatttttttatttttggtagagatggggtttcaccatgttggccaggctggtcttgaactcctgacctcaggtgatctgcccaccttggcctcccaaagtgttgggattacaggcatgagccaccacacccggcctaaaatgatttcttatttgtggttaataacaattaaaaagcggaaataatggttttgtcaaggccctctacccagaaaccaccaggatcacactggtagtcaaagaaaatttgctgtgttgagttgaagtttgaacacatgatcaagaaagggctgtggcttgtatcagagggtgtttaaaaggatttactatcagatttggccttgtgttctgtgattttggtgagcgttcaaggaagccaggctttggtctggattggatgttctcaggtcatgaatataattctctgggaactcccaaagttctcatctacaaagcagaagttaattggagctgaaaactaatcagtaaagccacagcagccagtcatatgggggagaagaggggaatgtttgatggtttttgtggtttagaggtgagttccggaaaaaaagaagacatgtttgacatcctcaaacgagaaaatttttcatgtgttttataggccaaggaggcagaagcttttgttttaatgagccagaaagccccaaaagcctatttaagttttctcaggtatcatttcaacctctgaacttccagaattaactagggaagaggaaaaacatgtaacaccttagagttttattaaagagcaaacaatatccagtaatctccattactttccatgttaacataagttttcataacgctctatagatgaatgtgatttggcagtcacttgtatttcttaacacccacttacccatcattccctcttagatgaaaaaagttaagcacggggacaacagagtcttgtatattcatgtagctcatgatgatggaatcaagtttgaaggcttaacctgtgcttaacctatattgggcattgtcaagacttaaatttagaacactggaaagcaagtataattaattttacaaatagggcatcaaattttacaaagactcctaaggctatatggtattccttttataagacatggaaaaggcaaagataagggaaacgaacaaatcgctggttagaagtaggggatttgagtacatatgggcttaagagtgttctgtcatgattgtagtggtgaaaacaagcatttgcaaaaactcataaggctactcttaaaatagcaaattttgttgtatgtatattttaaagttaaacaataaaaatgctttcagtttattaaagaactcaagaccaggtgcagtggctcatgcctataatcccagcactttgggaagctgaggcgggaggattgcttgtggccaggaggttgaggctgcagtgaactatgatcatgcactgcactctacactgggcgacagagcaagaccctgtctcaaaaaaaaaggaatacaaaacattcctgaaacttgacatgtaagttcgcaataagacttttccctagctgggcgcggtgactcatgcctgtaatctcaacattttgggagactgaggcaagaggatcacttgaagtcaggagctagacaccagtctgggcaacatagcgagacctcaactctaccaaaaaattaaaaagtgagccaggcggggtggtgcacgtctgtggtcccagctacttggcaggctgaagcaggaggatcacttgaggccttgaggagccatgatcgtgccactgcactccagcttgggtgacagagcaagactgtctcaaaaaataaaaataaaaaaacaagacttcccccaccatcttggaattctctggaggaaatgtagggctggttgacaaggacttgtgcctcgtcagaccctgtttgaaacccagtctgaagttttgaaacacccacaagggccatacctgactttatctcacgcacataacaggagagaagaaggaggtcttccagaatctgtctttgagtttacaccaggttcttcccatctgatctttgggaatgctgtggttctgaaacataaaacggggaccctacacttcttcccaggaatatcctgcctgggagcatcctgatcctgtcttcagacaaggggcatccgcatcttgttttctagggcctttcctgaggccacttccagctccaaagttctcatctcaagctcagctctgtgtcttcatgctgggaaacgtctttatggatccccaaactcctcttgctgttgggaacacgtggcagccctgcgttgtgaggtgagagaagaggcagtggcagaacccatgccatggagacacgcccatcagccacagcagctcctgctactgcataaatccataggcacaatcacacgcctcacggtgtcaacatctcccatgacatcacaaagatgcccagctgggacccacctacagtgatggggtgatggggtttcacctataagcgggcaaacaggcactcctcctcactgtccagtcacctgacgtgctttttctgcgcactcaggtcgtgacaccccaggaggtgcctatcgcgccccaagctcctcacgtgcctcctccccacagtccaggacgcgtcttactaacgcctcaccagagcgcatgcgccctcctcaggagcagcctcaaagcgcgcagcctcagcccattggcctgcgggaagtggagttcccgaacagaagcccctcagtctccggaagccccgcccggcagactgttcccaggatgcaacacgggctcgcgtctaaaagagctgtgctttgttggggctatctgggagtttccgccttccatgaagtgcgcaggcgcacttaggcgaggcggggcgactctaggaagtggagacatcaagagtggtactggaagtggcggaagctctcctcttgccctcttcagcttccggtgtggtgggtcccggatatcgcgtggctgtggcaggtagacagcccgtgctccagaggccttcatcttgtgatggcagatgtacttgagtagacacgacagacggggaaggaccctgatggtccgagggaccttccacagcaagtagaaggcactgctgtgaatatgatggcgtcagaggtgactgcaaaaaaggacagggcagctgggcgaggaagagataccagtgatgtcctaactgagctccctgggtctggtagtgaggagctcagtcttagaatatgagccgtgtcaggggctacagcatcatcactcttgtcctgtcgcagactcaggctccctgttctcaggttcttatgtagacagtgagggctcagggaggctcccaccaccaccaccaccagcaccaccactccatcaaaacggctgaaggaccttcctttagggttcgggggatctcctccttccacaagggatggatgtgaagacaactcattctttgatgttcagatggttgtggccctctgatgagatgtgtgcacaccttgccaaatgcatatgtctgttgagcctggacattaagtatttcttgatgttcttctgtgtaacaggtgatgtcctaggtgctgcagtgaacagaagagacaaaatatccttgttcccttgaagctaatgtcgtaggggcccaaaacaaagcaaacaaacaaaaaaaaggaatgcaagtcaagtacactttgtatggacagtggtaattcctaagaaggaaaacaaagatggacttaaggggtgcagagggcctggactatgtgtgtctgtgggatagtctgttactacctctgggactctcatctcttgagtgtgcttgggtgtgtccaaccgtttttcctagtgacaaagtctgggtaattctgtggggacatatattggtgtatctgggaggtcccatgtgtctcagtggtggtccctgttttcaggaaagagtgtctgtgaatgtccatgtgtctcactgcacagctgtgatttttctgtgtctctgtgttttccagtctttgtgtgatgaaatataaaggcctagcaggctcagagttattaatgaattgtacttaagcgttgagaggcatatatttattgcactattaaattcttccaaaatatagttaaaaaaaaaa

SEQ ID NO: 202922 - DNA, 475 bp, Homo sapiens
  Payload ID: 20019
  Gene Name: zinc finger protein 555
  ENST ID: ENST00000585966
  CDS Start-End: 141-475
agctctgtctaatcaggcccctgggacgggacgcctctgtcctagccgactcagtggtctttgaggatgtggctgtggacttcaccctggaggagtgggctttgctggattctgctcagagggacctctacagagatgtgatgctggagacctttcagaacctggcctcagtagatgatgaaactcaatttaaggccagtgggtcagtttctcagcaggatatttatggagagaaaatacccaaggaatctaaaatagccacgttcaccagaaatgtttcctgggcctctgttttaggaaaaatttgggacagtcttagcatcgaagatcaaaccacaaaccaggggagaaatctcagtagaaatcatgggttggagagactctgtgaaagtaatgatcaatgtggagaagccctcagccagattccacatcttaatctgtacaagaaaattccacctggagtaaaacagtatga

SEQ ID NO: 202923 - DNA, 2270 bp, Homo sapiens
  Payload ID: 20019
  Gene Name: zinc finger protein 555
  Uniprot ID: Q8NEP9
  ENST ID: ENST00000591539
  CDS Start-End: 130-2013
tctaatcaggcccctgggacgggacgcctctgtcctagccgtgagtgccccgcctgcccctagcggtccctggcgtcccggttcctgtcgcgctcacctgcgccggtagcgaagaaatcgccccgggacatggactcagtggtctttgaggatgtggctgtggacttcaccctggaggagtgggctttgctggattctgctcagagggacctctacagagatgtgatgctggagacctttcagaacctggcctcagtagatgatgaaactcaatttaaggccagtgggtcagtttctcagcaggatatttatggagagaaaatacccaaggaatctaaaatagccacgttcaccagaaatgtttcctgggcctctgttttaggaaaaatttgggacagtcttagcatcgaagatcaaaccacaaaccaggggagaaatctcagaaatcatgggttggagagactctgtgaaagtaatgatcaatgtggagaagccctcagccagattccacatcttaatctgtacaagaaaattccacctggagtaaaacagtatgaatacaacacgtacggaaaagtcttcatgcatcgccgcacatccctcaagagtcccatcacagttcacactggacacaaaccatatcagtgccaggaatgtgggcaggcctacagttgtcgttcacacctaagaatgcatgtgagaacccacaatggagagagaccctatgtgtgtaaattatgtgggaaaacctttcctcgtacttcctccctcaatcggcatgtaaggattcacactgctgagaaaacctacgaatgtaagcaatgtgggaaagcctttattgacttctcaagtcttactagtcatctcagaagtcacaccggagagaagccatataagtgtaaggaatgtgggaaagctttcagttattcctcaacgtttcgaagacacacaataacacacactggcgagaagccatataaatgtaaggaatgtgcggaagcctttagttattcctcaacttttcgaagacatatgatttcacacactggagagaagccacataaatgtaaagaatgtggggaggccttcagttattcttcggcttttcgaagacacatgataacacacactggagagaaaccctacgaatgcaaacaatgtgggaaaaccttcatttatctccagtcctttcgaagacatgaaaggattcacactggagagaaaccctacgaatgcaaacagtgtgggaagaccttcatttatccccagtcctttcgaagacatgaaaggactcatggtggagagaaaccctatgaatgcaaccagtgcgggaaagcattcagtcacccctcctcctttcgaggacacatgagggtgcacactggagagaaaccctatgagtgcaagcaatgtgggaaaactttcaattggcccatatctttacgaaaacatatgagaacacatactagagagaaaccctatgaatgtaagcagtgtgggaaagccttcagcttgtctgcttgctttcgagaacatgtgagaatgcaccctgaagacaaatcctatgaatgcaagctatgtgggaaagctttctattgccacatatccttacaaaaacatatgagaagacataccgcagagaaactctataaatgcaagcagtgtgggaaagctttcagttggcctgaacttttgcaacaacatgtgagaacgcacactgtagagaagccctatgaatgtaaggaatgtgggaaggtcttcaaatggccatcatctttaccaatacatatgagactgcacactggagagaaaccttatcaatgtaagcattgtgggaaagcattcaattgttcctcatccttaaggcgacatgtgagaatacacactacagaaaaacagtataagtgtaatgtaggacatcctcctgcaaatgaattcatgtgcagtgcttcagaaaagtcacaccaggagagagatctgatcaaagttgtaaatatggtgttgcctttatgagttccttatcctgaaagtggacactcaaggagtgtgtctgtagttcatttgcaaataaacatttagttgaaaaataattctccaaatactctcagctatcctacatgaatttgaacaggtagtttcttacgattcagtaaataaaactttcatcttagagtgttttggactcatggatgatttgaagtgtatttttaatatgcaagtaggttcaagttttatttaatttcttaaattgtaactgacttagtgtgaca

SEQ ID NO: 202924 - DNA, 6574 bp, Homo sapiens
  Payload ID: 20020
  Gene Name: zinc finger protein 556
  Uniprot ID: Q9HAH1
  ENST ID: ENST00000307635
  CDS Start-End: 88-1458
gagtgaccacaggtgtccccgtcgtgctcacctgcaccggctgcgaggagcagggagctcctcaaagagctcaggaacggacaggacatggacacagtggtctttgaagacgtggttgtggatttcacgctggaggagtgggccttgctgaatcctgctcagagaaaactctacagagatgtcatgctggagaccttcaagcacctggcctcagtagataatgaggctcagcttaaagccagtgggtctatttctcagcaggatacttctggagaaaaattatccctcaaacagaaaatagaaaagttcacaagaaagaatatatgggcctcccttttaggaaaaaattgggaagaacatagcgttaaagacaagcacaacaccaaggagagacatttgagcagaaatccaagggtggagagaccatgtaaaagcagtaaaggtaataaacgtggaagaaccttcagaaagactcgaaattgtaatcgtcatctgcgcaagaattgttgtactagtgtaagacggtacgaatgcagtcagtgtggaaaactcttcacccattcctcatccctgataaggcacaaaagagctcactctggacaaaaattatataaatgtaaggaatgtgggaaagccttcagtcgcccttcctacctacagacgcatgagaaaactcacagtggagagaaaccctatgcctgtcaatcttgcgggaagacatttcttcgttcccactctctcactgaacatgtaaggactcacactggagagaaaccctacgaatgtgggcagtgtgggaaaggcttcagttgtcccaaatcctttcgcgcacatgtgatgatgcacgccggagggagaccgtatgagtgcaagcactgtgggaaagccttcaggtgtcagaaatcctttcgagtccatatgatcatgcacgccggagggagaccgtatgagtgcaagcagtgtgggaaagcctactgctgggcaacatcctttcaacgacacgtgagaattcacaacggggagaaaccctataagtgtggaaaatgcgggaaagcattcggttggccctcatccttacacaaacacgcgagaacgcatgctaaaaagaaacctgtgagtgggggcagcgtgggaaagtcttccgcgaggcctcgcccctccacagatgtcaaatcacaaactagagagaaagtctataaatgtgaaacgtgtgggaaaacgtatggttggtcctcatctttacacaaacatgagagaaagcacactggggagaaacctgtaaatgcagccagtgtgggaaaaccttcaggcgggctttgctcttccaaaaatgtaagaacgcagattggacagaagcccagtaaatgcgaaaaatgtgggaaagctttcagttgtcccaaagcctttcaaggtcatgtgagaagtcacacaggaaagaaatcctgtacatctaagtaatgggggaaaacctgtgcaaattaattcacatacatggttcagaaaattcacagcaggagggccgggcgcagtggctcacgcctgtaatcccagcactttgggaggccgaggcaggcggatcacgaggtcaggagatcaagaccatcctggctatggtgaaaccccgtctctactaaaaaaaaaaaaaatacaaaaaattagccgggcgtggtggcgggcacctgtagtcccagctgctcaggaggctgaggcaggagaacggcgtgaacccgggaggcggagcttgcagtgagccgagatggcaccactgcactccagcctgggtgacagagcgagactccatctccaaaaaaagaaaattcatggcaggagaagaatctcatgacgtttataaatatggtattgcctttatcaggaccacatcctaaaagtgggcctctagcaaatgaatttgcagttctcttgcaggtaaagttgaggggagaatcctgtaagtcctctctcacctatagtactgaaattttgatacataatggttttttcttataaattactaatgtttctcttttcatttagaagtgtattgcacccatgggtgatctgatgtattttaatatgcattaactttaatttttatatattttttttgttactccgtgtgaggccattagaccaatgaaatatgggtgtttgttgacattttctgactggccctgtgtgttccaagctggatattactaccatgttacttttattccacctttccattttacagggaaaaactatttttaatgttaatactttctacttatacaggcaagtaattcagtggctttatgctattggtcagagaatccttcttcattttgcttgtggactaataggtagttggtagaaatacgtatgcatgcaaattcttggaggagtgtagtctcgtgggaactatttttttcatctgttgctgtttgctctttgacctggcttctgggttggaattggaaaataggtttttttgggttttttttctttttcttttttgagacagagtcctgttatgttgcccaagctggagtgcaacggcacgatctcggctcactgcaacttccgcctcccggtttcaagcgattctcctgcctcagcctcccaagtagctgggactataggcatgcaccaccatgtccagctaatttttgtatttttagtagagacggggtttcaccatgttggccagggtggtctcaaactcctgaaatctgcccgccttggcctcccaaagtgctgggattacaggtgtgagccactatgcctggccatattatcattatcttaatacctcattgtctcagtatttcttgtgcttctgtgttcctgcttccatgacagatacaatggtacaaccataaaaacacaggggattgcggctgggcgcggtgactcacgcctgtaatcccagcactttgggaggctgaggtgggcggatcacgaggtcaggaaatcgagaccatcctggctatcatggtgaaaccccgtctctactaaaaatacaaaaaattagccaggtgtggtggcgggcgcctgtagtcccagctactcgggaggctgaggcaggaggatggcgtgaacctgggaggcgaagcttgcagtgagctggaatcgtgccactgtactccagcctgggcgaaagagcgagactctgtctcaaaaataaataaataaagaataattttttaaaaaagcacaggggattgtttccctactgcatctactgtgacctagtattcttcgtgagataaatcttacctttcatgagaaaatgaaagacaatactggcttatcaggtaaactctggaaatttcctgtcacatagagctgaatacaatctctcagtatgtgttcagttattatgtttgattatgtattattaaaacaaaagtttctgtttctgagaaatatctatttactgtgtttgtgtttttaaagaagttggattctatacaaatggataaaatgtttcttagaaatagcctatttaactgagtttttcaaataagttgtatactaacaaatgtcaatctctgttttttatttactgggagaatgtattaaaatattgaaaattgccaaatcaacatggtgactttaaaaatgatacttctgggccaggcacagtggctcacgcctgtaatcccagcactttggggaggccaaggcgggcagatcatgaggtcaagagatcgagaccatcctggctaacacggtgaaaccccatctctactaaaaatacaaaatattagtggggtgtgctggtaggtgcctgtagtcccagctactcgggaggctgaggaaggagaatggcttgaacctgggaggcggagcttgccaagattgcgacactgcactccagcctgggtgacagagcgagactccgtctcaaaaaaaagaattatacttctgaattaatattaccagatgcattcagatttagacattttctttctagtacatttgtttcctatactgttataattttgtctaagaaattcttttttttttttttgagacagattctcgctctgttacccaggctggagtgcagtgccgtgatcttggctcactgcaacccccccgccaaggttcaagtgattctcctacctcagcctcctgaagagctgggattacaggcacccgccaccacacccggctaatttttgtatttttagtagagacggggtttcactatgctggccaggctggtctcgatctcctgaccttgtgatctgcccacctcggcctcccaaagtgctggggttacaggcgtgagccaccgcgcccagcctaataaattcttgtttattcataatgacaaaaacttacgtaacggttttataaatttaagtattaaataagtctagcaaaagacataaaaagataactaataaaacaagtttaaactttattggagcccagtagcaatggctcacgcctgtaatcccaggacccaccgaggcgggtggatcacctgatgtgaggagttcgagaccacgctggccaacatggtgaacatggtgaaaccttgtctctactaaaaatacaaaaaattggccaggcgtggtggcaggcgcctgtaatcccagctacttgggaggctgaggcaggagaatcgcttgaacccgggaggcagaggttgcagtgagccaagattgcgccactgcactccagcctgggcgacaagagtaagactccatctcaaaaaaaaaaaaattttttttttggataatatcaaggcagaataaagtatagtatcaaacttgacaaggtagataatagggaatgcagaataaaggatcgggcttcagtaagtgacaatctcatcatgaattcatttatagttccaccatgtaatatgtcttaaatactatttctttttttttaatactatttcaagaactgctcatgagttaggaaatagtgagcagtaatacagaaataacggcaggaccaggggcagtggctcacacttgtaattccaaagcttcgggaggctgaggcaggaggatcacttgagcacaggagttcaaggccagtctgggcacatagtgagacacagtctctataaaaagaaatttttaaaagtatctaggcatggtgatgtgcacttgtagagccagctactcaggaggctgagggtggaggatggcttgagaccaagaggtccaggctgcaatgagttatcttgccactgtactccagccagggtgacagaatgagaccgtgtgtcaaattaaaaagaaaaaaagaaacaataattatttccctggccgggcgcggtggctcacgcctgtaatcccagcactttgggaggctgaggcgggtggatcacgaggtcaggagatcaagaccatcctggctaacccggtgaaaccctgtctctagtaaaaaatacaaaaaattagctgggcgtggtggcaggtgcctgtagtcccagctactcgggaggctgaggcaggagaatggcgtgaacccaggaggcggaacttgcagtgagcagagatcgaaccactacactccagcctgggcgactgagtgggactctgtctcaaaaaaaaaaagagacaaaaggtatatttatggttcagcctcatttctgcaaatattaaaaattttagggcatgatgtatacattttatatatatatatatatagtgtgtgtgtgtgtgtgtgtgtgtgtgtgtgtgtgaatgtgtgtgacggagttttgctctgttgccaggctggagtgcagtggtgcgatctcagctcactgcaacctccacctcccaggttcaagcgattctcctgcctcaccctcccaagtggctgggaatacaggcgtgccccgccacgcccagctaattttttgtatttttagtacaggtggggtttcaccttgttggccaggatggtctcgatctcttcacctcgtgatctgcccgccttggcctcccgcagagctgggattacaggcgtgagccaccgcaccaggcccatgtcatatgtttttatgagtttggacattggcatctgggaccaggtacttcatctggatttgaaccacaatgtgggtgtttgtttttaatacctttgtgaaataattttaaattgccttatatatttggcattgtcactttgctgcccctacacactgatggaaaaattgtgttctgcagaaaactagagttcctcacagggtgaggaagagttatggtcatctgcacagttgtagcccgttgcgagtgttttcccatgtgcacagtgatatctaggcaagtgtgccatgatttcctggtgaggataaaatctatggacggtgagagaactagtcaaggaataactgaagtgagctgcagacaggattatcattttgagtaacatcccaatgtatttgtcatcctttaattaatttttatttttttaattaaaaaataatttttaagtgtaaacctttaatgatccacaaagcccaaaatgtccatttgattttcataggtatcgtttccatatgcttagacttccagcagctattagaagagaaaaatatgtaacagctttgtgtttaattaaaggcaaatgaaatcca

SEQ ID NO: 202925 - DNA, 567 bp, Homo sapiens
  Payload ID: 20020
  Gene Name: zinc finger protein 556
  ENST ID: ENST00000586470
  CDS Start-End: 88-297
gagtgaccacaggtgtccccgtcgtgctcacctgcaccggctgcgaggagcagggagctcctcaaagagctcaggaacggacaggacatggacacagtggtctttgaagacgtggttgtggatttcacgctggaggagtgggccttgctgaatcctgctcagagaaaactctacagagatgtcatgctggagaccttcaagcacctggcctcaataatgaggctcagcttaaagccagtgggtctatttctcagcaggatacttctggagaaaaattatccctcaaacagaaaatagaaaagttcacaagaaagaatatatgggcctcccttttaggaaaaaattgggaagaacatagcgttaaagacaagcacaacaccaaggagagacatttgagcagaaatccaagggtggagagaccatgtaaaagcagtaaaggtaataaacgtggaagaaccttcagaaagactcgaaattgtaatcgtcatctgcgcaagaattgttgtactagtgtaagacggtacgaatgcagtcagtgtggaaaactcttcacccattcctcatccc

SEQ ID NO: 202926 - DNA, 1643 bp, Homo sapiens
  Payload ID: 20020
  Gene Name: zinc finger protein 556
  ENST ID: ENST00000586426
  CDS Start-End: 88-1455
gagtgaccacaggtgtccccgtcgtgctcacctgcaccggctgcgaggagcagggagctcctcaaagagctcaggaacggacaggacatggacacagtggtctttgaagacgtggttgtggatttcacgctggaggagtgggccttgctgaatcctgctcagagaaaactctacagagatgtcatgctggagaccttcaagcacctggcctcagtagataatgaggctcagcttaaagccagtgggtctatttctcagcaggatacttctggagaaaaattatccctcaaacagaaaatagaaaagttcacaagaaagaatatatgggcctcccttttaggaaaaaattgggaagaacatagcgttaaagacaagcacaacaccaaggagagacatttgagaaatccaagggtggagagaccatgtaaaagcagtaaaggtaataaacgtggaagaaccttcagaaagactcgaaattgtaatcgtcatctgcgcaagaattgttgtactagtgtaagacggtacgaatgcagtcagtgtggaaaactcttcacccattcctcatccctgataaggcacaaaagagctcactctggacaaaaattatataaatgtaaggaatgtgggaaagccttcagtcgcccttcctacctacagacgcatgagaaaactcacagtggagagaaaccctatgcctgtcaatcttgcgggaagacatttcttcgttcccactctctcactgaacatgtaaggactcacactggagagaaaccctacgaatgtgggcagtgtgggaaaggcttcagttgtcccaaatcctttcgcgcacatgtgatgatgcacgccggagggagaccgtatgagtgcaagcactgtgggaaagccttcaggtgtcagaaatcctttcgagtccatatgatcatgcacgccggagggagaccgtatgagtgcaagcagtgtgggaaagcctactgctgggcaacatcctttcaacgacacgtgagaattcacaacggggagaaaccctataagtgtggaaaatgcgggaaagcattcggttggccctcatccttacacaaacacgcgagaacgcatgctaaaaagaaacctgtgagtgggggcagcgtgggaaagtcttccgcgaggcctcgcccctccacagatgtcaaatcacaaactagagagaaagtctataaatgtgaaacgtgtgggaaaacgtatggttggtcctcatctttacacaaacatgagagaaagcacactggggagaaacctgtaaatgcagccagtgtgggaaaaccttcaggcgggctttgctcttccaaaaatgtaagaacgcagattggacagaagcccagtaaatgcgaaaaatgtgggaaagctttcagttgtcccaaagcctttcaaggtcatgtgagaagtcacacaggaaagaaatcctgtacatctaagtaatgggggaaaacctgtgcaaattaattcacatacatggttcagaaaattcacagcaggagggccgggcgcagtggctcacgcctgtaatcccagcactttgggaggccgaggcaggcggatcacgaggtcaggagatcaagaccatcctggctatggtgaaaccccgtctctactaaaaaaaaaaaaaa

SEQ ID NO: 202927 - DNA, 2268 bp, Homo sapiens
  Payload ID: 20021
  Gene Name: zinc finger protein 557
  Uniprot ID: Q8N988
  ENST ID: ENST00000252840
  CDS Start-End: 502-1794
agttccgcccccaaccctgccacagacccgcgccaggacgaccctgcctccgcggctgtccctagccagggcccaacctggttctattaataactaagcaaactagaacacctcagccggaggctggggtgcgcggctgctgcacctgcagcctgaacccgggggtcctgacacgccgcattttgggctgggaccagctggagccggaagcggaggtgcagtgtggctagccggagaccggaagcggaagcgcgcttgtgtcttgtgagaagagccgcgcttgcagcgtctgggagaatctttcggtctccgcgagaggtgcttcattccacgaaaaaagtataattcaagctcagatttgtgttgaaaccagcctcaagtttcacctatcctcactgatccgtggacttctgtatgatcagggtgctgtcctgagagcgctgcgggataaaggaggagcgtcctgcttcccggctgccctgttgctgtcggagtcacaggatggcggctgtcgtcctgcccccaactgccgctctgtcttccctgttcccagcctctcagcgagaaggacacacagagggcggagagctggttaatgagctcctgaaaagctggctaaagggcttggtgacctttgaggatgtggccgtggagttcacccaggaggagtgggcattgctggaccctgcccaaaggacactgtacagggacgtgatgctggagaactgcaggaacctggcctcactggggaaccaagttgataaacctaggctgatctcccagctggagcaagaagataaagtgatgacagaagagagaggaattctctcaggtacctgtccagatgtggagaatccatttaaagccaaagggttaactcctaagctgcatgtttttcgaaaagaacaatctagaaatatgaaaatggagaggaatcatcttggagcaacactcaacgaatgtaatcagtgttttaaagtcttcagcacaaaatcttcccttacacggcacaggaagattcatactggagaaagaccctatggctgcagtgaatgtgggaaatcctacagcagtagatcttaccttgctgttcataagagaatccacaatggggagaaaccctatgaatgcaatgactgtgggaaaaccttcagcagcagatcttaccttactgttcataagagaatccacaatggggagaaaccctacgaatgcagtgactgtgggaaaaccttcagcaattcctcatacctcagaccgcacttgagaattcacactggagaaaaaccgtacaaatgtaaccagtgttttcgtgagttccgcactcagtcaatcttcacaaggcacaagagagttcatacgggggagggtcattatgtatgtaatcagtgtggaaaggctttcggcacgaggtcatctctttcttcgcactatagcattcatacaggggagtacccttacgaatgccacgattgtgggagaaccttcaggaggaggtcgaatctgacacagcacataagaactcatactggagaaaaaccctacacatgtaatgagtgtgggaaatcctttaccaatagcttttctcttacaattcacaggagaatacataatggagagaaatcctatgagtgcagtgattgtggaaaatcctttaatgttctctcatccgttaagaaacacatgagaactcacactggaaaaaaaccctatgaatgtaattattgcgggaaatccttcacaagtaactcctacctttctgtgcatacgagaatgcataataggcaaatgtgaattcaataactgtgggaaaagcattcattgatctttcatgcctcagataacatgagcaaactctaacaagatgtatgaatcacctgctactgtgtaacaaattaccccccaaaattttgtggcttcaaacaaaaacacttgttatctcaaaatttttgtaggtcaggaattcagaaacaacatagctctatagttcttcaggatatctcaagaggttacagtccagatgtcagcagaactgtaatcatccagaattgttactggtgaagggaccacttccaaatggcttacaagcccgacaagtgcatgctagctgtttccaagggagctgcgcttccaaatcacgtaggcctctcaacagggctgagtttctttatggaagcaacttctccccaaagccagtgatctaaaggagccaacacagaaagcataatgtcttttatgacctagcttcagtgagatatgttttcatgt

SEQ ID NO: 202928 - DNA, 5736 bp, Homo sapiens
  Payload ID: 20021
  Gene Name: zinc finger protein 557
  Uniprot ID: Q8N988
  ENST ID: ENST00000414706
  CDS Start-End: 241-1512
cttgtgagaagagccgcgcttgcagcgtctgggagaatctttcggtctccgcgagaggtgcttcattccacgaaaaaagtataattcaagctcagatttgtgttgaaaccagcctcaagtttcacctatcctcactgatccgtggacttctgtatgatcagggtgctgtcctgagagcgctgcgggataaaggaggagcgtcctgcttcccggctgccctgttgctgtcggagtcacaggatggcggctgtcgtcctgcccccaactgccgcctctcagcgagaaggacacacagagggcggagagctggttaatgagctcctgaaaagctggctaaagggcttggtgacctttgaggatgtggccgtggagttcacccaggaggagtgggcattgctggaccctgcccaaaggacactgtacagggacgtgatgctggagaactgcaggaacctggcctcactggggaaccaagttgataaacctaggctgatctcccagctggagcaagaagataaagtgatgacagaagagagaggaattctctcaggtacctgtccagatgtggagaatccatttaaagccaaagggttaactcctaagctgcatgtttttcgaaaagaacaatctagaaatatgaaaatggagaggaatcatcttggagcaacactcaacgaatgtaatcagtgttttaaagtcttcagcacaaaatcttcccttacacggcacaggaagattcatactggagaaagaccctatggctgcagtgaatgtgggaaatcctacagcagtagatcttaccttgctgttcataagagaatccacaatggggagaaaccctatgaatgcaatgactgtgggaaaaccttcagcagcagatcttaccttactgttcataagagaatccacaatggggagaaaccctacgaatgcagtgactgtgggaaaaccttcagcaattcctcatacctcagaccgcacttgagaattcacactggagaaaaaccgtacaaatgtaaccagtgttttcgtgagttccgcactcagtcaatcttcacaaggcacaagagagttcatacgggggagggtcattatgtatgtaatcagtgtggaaaggctttcggcacgaggtcatctctttcttcgcactatagcattcatacaggggagtacccttacgaatgccacgattgtgggagaaccttcaggaggaggtcgaatctgacacagcacataagaactcatactggagaaaaaccctacacatgtaatgagtgtgggaaatcctttaccaatagcttttctcttacaattcacaggagaatacataatggagagaaatcctatgagtgcagtgattgtggaaaatcctttaatgttctctcatccgttaagaaacacatgagaactcacactggaaaaaaaccctatgaatgtaattattgcgggaaatccttcacaagtaactcctacctttctgtgcatacgagaatgcataataggcaaatgtgaattcaataactgtgggaaaagcattcattgatctttcatgcctcagataacatgagcaaactctaacaagatgtatgaatcacctgctactgtgtaacaaattaccccccaaaattttgtggcttcaaacaaaaacacttgttatctcaaaatttttgtaggtcaggaattcagaaacaacatagctctatagttcttcaggatatctcaagaggttacagtccagatgtcagcagaactgtaatcatccagaattgttactggtgaagggaccacttccaaatggcttacaagcccgacaagtgcatgctagctgtttccaagggagctgcgcttccaaatcacgtaggcctctcaacagggctgagtttctttatggaagcaacttctccccaaagccagtgatctaaaggagccaacacagaaagcataatgtcttttatgacctagcttcagtgagatatgttttcatgtccctgttacattggtcatacacaccaatcctgatacaatgtggaagaacaccacaggaggtatgaacagtagacatttggaaccatctggaaaacttgccatgaaatcagtggaggaaagccttcagctgaccctcatttttttttttttaagacaatgtctcactctgtcacccagtctggagcgcagtggtgtgatcacagctcactgcagcctctacttcctgggatcaagtaattctcctgccccagcctccaatgtagctgggactacaggtgcatgacaccatgtctggctaatttgtttttttttaaactagagggagggttttgccatgttgcccagactagtctcaaactcctaggttcaagcagtcctttcatcttggcctccagaagtactgggattacaggcatgaaccaccatgcccagccaacttctaaactgatcaatatgggagtagcattcaatcacccacaggttaactcactctagagagaaatcttgtgagtgtaatctgtatggtaaaactttgagctcaaactttccccctaccaaaaaaaaagtatctactggggagctgcccaggtaatgcagtagctgtaggaaagccttcagtgatggcttcagggagtcacatgacaactcacaataaggggaaaccctgtgtgtggcatcaaaaatggaaaaccaggggacactcattccttaagtcacatttcggagatcatacaacagaggaatatgttgagtatacacagtgttgaaaagcctgtgacacaaacagtcatattaccaagcacaagacagtatagtttggtatgctataaaagccttgaatattctctccatttttaagaagtgagattcatactagaaaaaccattgaattccatcagtattagaatgtcatttttccacatttttaggaacctaactcagtgtaagataacaatttatacaatttattttttgagacagggtttcatctgtgcccaggctgtagtgcagtggtgcaatcttggcttattgtaacctctgcctcccaggcttaagggatcctcccacctcagcctcccaagtagctgggactgtaggcatgcaccaccatgcctgtctagtttttgtaaagatggggattcaccatgtttcccaggctgctctcaaactcctgggctcaagtgatccacctgcctcagcctcccaaaatgctgggaatacaggaacgagctaccactctcagccagaacttcttaagataaaggatgagggaatgttttcagtgatacctcttatattaggaaaaatatgtaaatgttccttggatgcaatactcacgagtgtattaatttcagaaaaattttcagtgattcctccctttatgcatgagagaattcatttagaggaagccctaggaacgtaatcaatgttaggatgcctcatctcttaactgagtggccacgcagtaacttagaacaaaaggtgtaagtgctatgaatgtggaattaccttcatcaatgtctcatttgtaggttgggccactagctcgttcattttcagtcttttaatataaacatttatggctatagtggtcctgaaaatcttactacctcgttttatatacagtgtatttattataattctaaaacatcaatacaccaaatattcagaaaggtatttccaaacagctcctgagtgatctagtttgttataatagaaattagacatttgccaggtgtggtggctcacacctataaacctagcattttgggaggctgaggcgggcagatcaccggaggtaaggagcttgagaccagcctggccaacatggtgaaaccccgcttctactaaaaaatacaaaaattagccgggtgtggtggcaggcatctataatcccagctactcaagaggctgaggaaggagaatcacttgaacccgggaaatggaggttgcagtgagccaagatcatgccacttcactccagcctgggcaaaagagtgcaactctgtctcaaaaaaaaaaaaatcagacaatatttgatatatttttttctaatttaatagtattttgccagagtacatggactttgtgattttggttgttttctctttgtgtcctaatatagcaaatactgtttctttttttttttttttttttttttgagacggagtcttgctctgttgtccaggctagaatgcagtggcgcgattgtggctcactgcaagctctgcctcccagattcacgccatcctcctgcctcagcctcccgagtagctgggactacaggtgcccatcaccatgcccggctaatttttcatatttttagtagaaatggggtttcactgtgttagccagtatggtctcaatctcctgacctcgtgatccacctgcctcggcctcccaaagcactgggattacaggcgtgagccaccatgcccggcacaaatactgtttcttaatgttcattctccctacttaaagaaaaagataagttgtcaatgagcagtattgaaaatgtacagtggggccaggcgccatggctcatgcctgtaatcccagcactttgggaggccgaggcaggcggaccacctgaggtcaggagttcaagactagcttggccaacgtggtgaaacctcgtctctactaaaaaaaatacaaaaattagctgggcgtgatgacaggtgcctgtaatcccagctacttgggaggctgaggcaggagaatcgcttgagcctgggaagcggaggttgcagtgagccgagattgcacaaccacactccagcttgggcgacagagtgagactccatctcaaaaaaagatgtacagtgtactaggctttcctgaagcttagacaggctttatcccactctgctggctaaaagaagtaggaataacgcactgggtgagacaccgtctggcttattctcatctattttcttttcattcttttggaaagtggacacaaagcatagagttaaaagagcttttttttttttttttttttttttcttcactgtggtgataaaaaccacagtgcaggggctgggcgtggtggctcacgcctgtaatcccaccactttgggaggccaaggcaggcggatcacctgaggtggggagttcgagaccagcctgatcaacatggagaaaacctgtctctcctaaaaatacaaaattaaccgagcatgttggcgcatgcctgtaatctcagctacttggaaggctgaggcaggagaattgcttcaaactgggcagaggttgcagtgagccaaggttgacccactgcactccagcctgggcaacaagagcaaaactccatctcaaaaaaaaaaaaaaagaaagaaacagtgccgaaaaatcacaatgatttgagttcttcaaaaacctttgattggctgcattggctctgttctgcatattactagacttcttacatgatcacaagtaaccactaattggttaaaaccaaagagagagagagagagagtgtgtgtgtgtgtgtgtgtgtttggttggggggtgttgtgttagcttccaggtgaatgcattatctgttaatcctgtttattgatctgtttttataagtgctccatgattctctgaaaacagtatactatgtatctaatttttggatacaggatggacatacgtactcaaactgtgtttttcaatttgtactgtatttgtttctctcgacctgacttagtgatagaggtatattaaagtcttccactagcatggtagattaacaaa

SEQ ID NO: 202929 - DNA, 3014 bp, Homo sapiens
  Payload ID: 20022
  Gene Name: zinc finger protein 558
  Uniprot ID: Q96NG5
  ENST ID: ENST00000301475
  CDS Start-End: 231-1439
caggtggccctgaattcattgcctgctcagcaaaataaaggcccagtgtggaagccggaacttgcatttgaagaaggatgggaaggatgggttgaggagggcccatccccagcagcccgagagggaggaggccacggagacttggagcattcccgtttcttccagagcgctgcgggataaaggaggagcgtcctgcttcccggctgccctgttgctgtcggagtcacaggatggcggctgtcatcctgccctcgactgctgctccgtcttccctgttcccagcctctcagcaaaaaggacacacacagggcggagagctggttaatgagctcctgacaagctggctacggggcttggtaaccttcgaggatgtggccgtggagttcacccaggaggagtgggcgttgctggaccctgcccaaaggacactgtacagggatgtgatgctggagaactgcaggaacctggcctcactagggtgtcgtgttaataaacccagtctgatatcccagttggaacaagacaagaaggtggtgacagaggaaagaggaattctaccaagcacctgtccagatttggagactctacttaaagccaaatggttaactcctaagaagaatgttttcagaaaagaacagtctaaaggtgtaaaaacggaaagaagtcatcgtggagtgaaactcaatgaatgtaatcagtgttttaaagtcttcagcacgaaatctaacctaactcagcacaagagaattcatactggagaaaaaccctatgactgtagtcaatgtgggaagtccttcagtagcagatcttaccttactattcataagagaatccataatggggagaaaccctatgaatgcaatcactgtgggaaagcatttagtgatccctcatcccttagactgcatttgagaattcacactggagaaaaaccctatgaatgtaaccagtgttttcacgttttccgcaccagttgtaacctcaaaagccacaagaggattcacacgggggagaatcaccatgaatgtaatcagtgtggaaaagctttcagcacaaggtcctctctcactgggcacaatagcattcatacaggggagaaaccttatgaatgtcacgattgtgggaaaaccttcaggaagagctcctatctgacacagcacgtaagaactcatactggagaaaaaccctatgaatgtaacgagtgtgggaaatccttcagcagtagcttttctcttactgtgcacaagagaatacataccggagagaaaccctacgagtgcagtgactgtggaaaagcctttaataatctctcagctgtgaagaaacacttaagaactcacactggagaaaaaccctatgaatgtaatcattgtgggaaatccttcacaagtaactcctatctttctgtgcacaagagaatacataatagatggatatgaattactgcaggaacttctggaggaaagcactcattgatctttcatccctaagatagtttgagagagctcacactggatatataagttatttgttgcagcataacaaatgatccccgcaaattttgtggcttcaaacacgaaatgtttattctctaacaatttctacagatcaggaattcaagaacagcttatctctgtagttacactgcaggatctctcatgcctttacttacaatcaagatgtcagccaaagctatagtcatctaacatctttactgatgaacagtccacttccaagatgacttattcacatgcctggaaagttgatgttggttgttgtcaggggaccttcagtcattaccatgtaggcctctttacaaggcccagctccttgacaatttggcaataagttctcgccaaggttagtgatccaagagaggaccaatacagaggccaaaatggcttttatgacctatcctcaggaggactgctaagctttcacttatttcctattgtgttggtctcacaacacaccaatcctgatacaatgtgagagactgcagaaggtatgaataccaggaaacagataactcagaagcatctgggaaatttgccatggaattaatgaagaaaagccctcagcacatcatccttctactctaatcaatatgaaatagcattcagtaactcctattaattcactctgaagagaaaccttttgaggacaatctgtatggtaaagctctcagctcgaattctcaccttcatgggcccagaagattatgtactgagagaatcctgaagaatggaacagctgtagaaagccttcagtgctatcagcagggattcatgtgacagctcacactaagggagaaaacctgtgaaggtctcagaaggcttcagtgacagtcatcccttaagacgcactggaaatcacacaatggaacaacactcagaaatgcggaataccctacagcaaaagtgttcacattactgagcaaactatagtgtggtattctgcagtgactatgggaaagccttgaatgttctatcggtttttaagggacttgagaattaattctggagagaatgccccattgaacatcatcaatattggagagctttctgtttttctacatttgttaggaaacttgtgagcattcacactacagagaaacttgaaatataaagaagaagagaaagccttcagtgatgcctctgtgttagggaaaatatggaacttctccctggatgcaaaacctatgagtatattaatattggaaaatttttcagtgattcttctctttcttgtatatgagagaacttatatggagaaacccctaggaatgtaatcagtgttaggatgcctcagcctgaactcttcactgagtggccacaattttcactgggaacaaaaagtataatcactgttttgagtgtgggatatcctttatcagtgtctcatctgtagattggactgctggctcattaatttttttagtctttttttcttttaatataaacatttgtgtatagctgttccctaaaataaacattaacatatttcataatttt

SEQ ID NO: 202930 - DNA, 7032 bp, Homo sapiens
  Payload ID: 20022
  Gene Name: zinc finger protein 558
  Uniprot ID: Q96NG5
  ENST ID: ENST00000601372
  CDS Start-End: 713-1921
agaccggaagcggaagcgcggggcggtaccgtgggaggggccgcgcgtggggcagcggggagcgagtccctccgtccccgcgagtcggcgcttttggccccgcgggaggggccgggctcgatgagaaaagcatcattcaagctcagattcgtgttgaagcctgccacaaggtccacctgttgttgtgggtttttgggtgaccaggggttacccccagcagtgtgtgagaatgaagagtgtgggccactgtgtctctgttgacctgccagataggaaatagcgccagagttgctgcaatccacgtctccctggaattcaggagcagcttggctggaaggctctggctggaaacttgcagaaggctgtcagctgggtctgcatcatctgaaggctcaacgggtaccgggggccactccatggcctgcgagtcagagctggccgtcggtgggaggcctcagttcctctccacataggcctctccacagggccacttgagcgtcttcccaccatggcaactggtgtcctctagagcaacatccaggagaccaaggcggaagcagctgtagtgccttccaagacctggtcctgaaagtcacccctgcacccacccccgctgtctcctcagccatattctgctggtcacacagagcgctgcgggataaaggaggagcgtcctgcttcccggctgccctgttgctgtcggagtcacaggatggcggctgtcatcctgccctcgactgctgctccgtcttccctgttcccagcctctcagcaaaaaggacacacacagggcggagagctggttaatgagctcctgacaagctggctacggggcttggtaaccttcgaggatgtggccgtggagttcacccaggaggagtgggcgttgctggaccctgcccaaaggacactgtacagggatgtgatgctggagaactgcaggaacctggcctcactagggtgtcgtgttaataaacccagtctgatatcccagttggaacaagacaagaaggtggtgacagaggaaagaggaattctaccaagcacctgtccagatttggagactctacttaaagccaaatggttaactcctaagaagaatgttttcagaaaagaacagtctaaaggtgtaaaaacggaaagaagtcatcgtggagtgaaactcaatgaatgtaatcagtgttttaaagtcttcagcacgaaatctaacctaactcagcacaagagaattcatactggagaaaaaccctatgactgtagtcaatgtgggaagtccttcagtagcagatcttaccttactattcataagagaatccataatggggagaaaccctatgaatgcaatcactgtgggaaagcatttagtgatccctcatcccttagactgcatttgagaattcacactggagaaaaaccctatgaatgtaaccagtgttttcacgttttccgcaccagttgtaacctcaaaagccacaagaggattcacacgggggagaatcaccatgaatgtaatcagtgtggaaaagctttcagcacaaggtcctctctcactgggcacaatagcattcatacaggggagaaaccttatgaatgtcacgattgtgggaaaaccttcaggaagagctcctatctgacacagcacgtaagaactcatactggagaaaaaccctatgaatgtaacgagtgtgggaaatccttcagcagtagcttttctcttactgtgcacaagagaatacataccggagagaaaccctacgagtgcagtgactgtggaaaagcctttaataatctctcagctgtgaagaaacacttaagaactcacactggagaaaaaccctatgaatgtaatcattgtgggaaatccttcacaagtaactcctatctttctgtgcacaagagaatacataatagatggatatgaattactgcaggaacttctggaggaaagcactcattgatctttcatccctaagatagtttgagagagctcacactggatatataagttatttgttgcagcataacaaatgatccccgcaaattttgtggcttcaaacacgaaatgtttattctctaacaatttctacagatcaggaattcaagaacagcttatctctgtagttacactgcaggatctctcatgcctttacttacaatcaagatgtcagccaaagctatagtcatctaacatctttactgatgaacagtccacttccaagatgacttattcacatgcctggaaagttgatgttggttgttgtcaggggaccttcagtcattaccatgtaggcctctttacaaggcccagctccttgacaatttggcaataagttctcgccaaggttagtgatccaagagaggaccaatacagaggccaaaatggcttttatgacctatcctcaggaggactgctaagctttcacttatttcctattgtgttggtctcacaacacaccaatcctgatacaatgtgagagactgcagaaggtatgaataccaggaaacagataactcagaagcatctgggaaatttgccatggaattaatgaagaaaagccctcagcacatcatccttctactctaatcaatatgaaatagcattcagtaactcctattaattcactctgaagagaaaccttttgaggacaatctgtatggtaaagctctcagctcgaattctcaccttcatgggcccagaagattatgtactgagagaatcctgaagaatggaacagctgtagaaagccttcagtgctatcagcagggattcatgtgacagctcacactaagggagaaaacctgtgaaggtctcagaaggcttcagtgacagtcatcccttaagacgcactggaaatcacacaatggaacaacactcagaaatgcggaataccctacagcaaaagtgttcacattactgagcaaactatagtgtggtattctgcagtgactatgggaaagccttgaatgttctatcggtttttaagggacttgagaattaattctggagagaatgccccattgaacatcatcaatattggagagctttctgtttttctacatttgttaggaaacttgtgagcattcacactacagagaaacttgaaatataaagaagaagagaaagccttcagtgatgcctctgtgttagggaaaatatggaacttctccctggatgcaaaacctatgagtatattaatattggaaaatttttcagtgattcttctctttcttgtatatgagagaacttatatggagaaacccctaggaatgtaatcagtgttaggatgcctcagcctgaactcttcactgagtggccacaattttcactgggaacaaaaagtataatcactgttttgagtgtgggatatcctttatcagtgtctcatctgtagattggactgctggctcattaatttttttagtctttttttcttttaatataaacatttgtgtatagctgttccctaaaataaacattaacatatttcataattttaatgcaatgtatttattataattaatttgcttgttaaagacatccacacattgcatattcaaaaagttatttccaaataccttctgagtgattcagtttatcataatggaaattagtatttataaacacatttttctaatgtagtggtatttttggcagagtacatgagctttatgatactgattattttctctctatcttggtatgccaaatactgttggtttctttcccagtgtccgttctcttcagtttattcgtttaaagaaacaaacatgttgttcaagttgtctgtgaacaatatcgaaagttctcaatcttatagtttttcctgaagcccaggcgggttttttcgcactcccctggcaatgagaagtaagtcgaagtcactgtgtggaacatctcctggcttgttctcctcacatattttccattcacctcacccattctgtctcttggaaagtggcctcaaggtctagagtttgaagagcttctttttgaccacaatgacagaaaccaaagtgcagccaaaaatcacaatgctttgggctctccaggagcctccgattggctgcatctgctctggactccttattcttatacttcttatgtgactaaaagaaacccctaggctgggtgtggtggctcacgcctttaatcccagcacttttgagaggctgaggtgggtggatcatgaggtcaacagattgagaccatcctggccaacgtggtgaaaccctatctctactaaaagtataaagattagctgggtgtggtggtgcacacctgtattcccagctactcgggaaactgagacaggagaattgcctgaacctgggaggtagaggttgcagtgagccaagatggcgccagtgcactccagcctggcaacagagcgagactccatctcaaaataaacaaataaatatttttaaaaaaagaaacccctaactgattgaagccaacatgatctgttgtttgtttttgaggtggtgttctgttaacttccagcaggatgcagaatctaactggtaaacctataaattggtcaagttttacccatgttgtttctttgaaaacaatgtatattctctaatatttggatatagggtatatgaacattaatgcaacttaattgtatttccaagtacagtacgtatgttcagatttctttttctaaccttatttagtgatagaggtgtggtaaactcttccattatgtttatgtattaacactgtaattttgtcatttttatatattttgacattatgtaactagatgcatacaggattaggtattctgtattcctttttatgtggagatgatatttttacatagcaaagtattgtaatgcattaataataaatggtcaaacatttatttatttatttatttattttagatggagtttcactcttgtcatcaagggtggagtgcaatggtgcgatctcggctcactgcaaccttggcctcccaggttccagcaattctcctgcctcagcctcctgagtagctgggattacaggcacctgccaccacgcccaggtaatttttttatatttttagtagagatggggtttcaccatgttggccaggctagtctcgaactcctgatggtcagacatttatattgcacttcccatagatcaggcccccttctaaatgacatataagtattaactcagtatgcattataaacttaagtatgtaatgttattatccccagtttacagatgagaaaactggtatgatacacttaagttacttgcctgcattcactgactggtaaatggtagagccaagatctgaacccagacagtccatgcacttaaccactaccctattaacggagtatgttctgtgtgccaggcaaagttttgccattgaaatacttcacctaatggaggaggaacagattatagaaaaatcaagaaaatatggtattatagagttataggaaaaaaaagcattttaggagagttaaggggggttgggaataataattttatataactaggaaaagaaagcctcttggtaaggagcatttgagcggagatctcaacaagttgggacagtgagtcatatgaatttgtcttgcaagagtagtgttggcatgcaaaggcccacaacaaggaggccaatacagctggagtggaacaaaggggtgatgagggagcagtaaaagatgatgtggtcagagacatggtagatcctgatcttgttgggttttctgagacattgttaggacttttccttatttcagtgagttggcacatcagtcagggtcccagcaggaactcaggttgacacccacagactaggacaattcaagtagagttttcataaagggtctactcagtcctgtggacaggatccagggaaaccacaaaaagttgtaaagcacccagcagcttagcagggcagagctctaacacctcacagcctgaagggacgaagggagggagcaactgaatctggagacgagaggagagggctgcattccaggagctgagagaggtcagtcagcgatagcatccagccccaggtcctcctgcaggaaatagccagggtcagacctcactctccttcatccattgagacaggaaaatatccccatttatgaatatataaatcaatagcagatccagagacaatttgggtattggagttagcagacaaagactttaaaataaccaagaataatatgttaagggaaatggaggaaacatggacaaaccatagaaaatgagagacaaactgcaaatctaccaaacaaccaaagaagaaggacacattgctttcaaagcagcatcagtaagactaatgatgacttttcaaaagaaactatggaagcaagaagacaatgaatgacatctgacatataaagggttaaatgggttggaggagggggaaattgtcaatcaaaagttctgtaacctaagaaaatattcttcaaaactgaaggcaacaatgttttccaatgggagggaatatttttttttttttttttgagatggagtctcactctgtcgccatgctggagtgcagtggcatgatctcggctcactgcaacctcctcctcctgggttcaagtgattctcctgcctcagcctcctgagtagctgggactacaggtgtgtgctaccacgcccagctaatttttgtatttttagtggagacagggtttcaccatgttggccaggatggtctcgatcctttgacctcacatgatttgcccacctcggtctcccaaagtgctgggattacaggcgtgagccaccacgcccggcctgggagggatttttttaagctgagagaattaacagcataaccgtattttcagaaacactgaagagatttcttcaggcttcaggaaaatgattccatagagacatacataattccaggaattaagatcaacaggaaacataagatgcaagtaaatataaatcagtactgactgtataaaacaaccctgtatagttttacaacttttatgtatatctaaactttccaaaataaaatgcttttaaaaaca

SEQ ID NO: 202931 - DNA, 2732 bp, Homo sapiens
  Payload ID: 20023
  Gene Name: zinc finger protein 559
  Uniprot ID: Q9BR84
  ENST ID: ENST00000317221
  CDS Start-End: 263-517
atgcgcataacggccgccatcttaacagcgcgttcccgttggcgtctgaggaacagcatctctgccttcctgttcacggtgaccttcgcttggtgtcctcctggcctcagcaacctgacaattctgtcgtgtcccgagagatggctaatgaatggcgcttgatgacagatgagtaatgcctgttgctgaaagattgacggtatgagatcatctttctcaagatgttttctgtcttcatgagtcaaaatttgaagaggaaaggatggtggctgggtggttgacaaattactctcaggactcagtgacctttgaggatgtggctgtggacttcacccaggaggagtggactttgctggatcaaactcagagaaacttatacagagatgtgatgctggagaactataagaatctagttgcagtagattgggagagtcatattaataccaaatggtcagcacctcagcagaattttttgcaggggaaaacatccagtgtggtggaaatgaattcagagtaaaagggagaatctcaatgaaataaatttggaaaacttctatgaaccatcattaattttcaccaacaggagagaaaccattttggagaggaactgtttgactttaaccaatgtgaaaaagccttgagtgaacactcatgccttaagactcacaggagaacttactttagaaagaaaacctgtgagtgtaatcaatgtgaaaaagccttcagaaaaccctctatctttactttacacaagaaaactgatatcggagaggaacttcctaactgtaatcaatgtgaaacagccttcagccaacatctacatcttgtttgcaagaaaactagccaaaatctacatcttgtttgcaagaaaactcacactcaagagaaaccatataaatgcagtgactgtgaaaaaggcttaccttcctcctcacacctcagagaatgtgtaagaatttatggtggagagagaccatatactcataaggagtatgtcgaaaccttttctcattctacagccctttttgtacacatgcaaactcaagatggagaaaaattctatgaatgtaaagcatgtgggaaacccttcactgagtcgtcatatcttactcaacatttaagaactcatagtagagtgttacctatagaacataagaaatttggcaaagcctttgctttttccccagatcttgctaaacatataagacttagaactagaggaaaacactatgtttgtaatgaatgtggcaaagaatttacttgtttctcaaaactcaacattcacataagggttcacactggagaaaaaccgtatgagtgcaacaaatgtgggaaagccttcactgattcatcaggtcttataaaacacaggcgaactcacactggagaaaagccttatgaatgtaaggaatgtgggaaagcttttgctaactcttcacatcttactgtacatatgagaactcacactggtgagaagccttatcaatgtaaggaatgtggaaaagcctttattaattcctcttcctttaaaagtcacatgcagactcatcctggtgtaaaaccctatgactgtcaacagtgtgggaaagccttcattcgatcctcatttcttattcgacatttgagaagtcacagtgcagaaaggccttttgaatgtgaggaatgtgggaaagcctttagatactcctcgcaccttagtcaacataaaagaatacatacaggggagaggccatataaatgtcaaaagtgtgggcaagccttcagtatctcatcaggccttacagtacacatgagaactcacactggtgaacggccctttgaatgtcaggaatgtgggaaagcctttactcggtccacatatcttattcgacatctaagaagtcatagtgtggagaaaccatataaggaatgtgggcaaacctttagtaattcctcatgccttactgaatgtgtgtgaattggggctgatacttggaaagaatgtggtaaagccactacttcctcacacttactgaacatgtactcattcatagtggcaatgtacacagtcataaggaatgtgggaagccttccttggtgtctcagatcttaacaattccaatagaagagaagacatatgaatgtaaggaatgtgggaaaatcttggctccttccataggccttactattcatgtgtctgtgcatcctaggaaacaaactgaacgtaggaaacctgtcgatgcttacatcttactgagtctgtttgaactcatgctggagagaaatgctatgaatgtgaggaaggtggaaaagctttcattattttcctcgggccttactgagcttgtgagcacattggatataaatgcacgtcctctggctgtaaggaatgtgttgaaacctttcactctgccttataccttaatattcagctgtgatctcacaagtgtgaaaaatcttatgaatgtaaaatgtgtggagattcttctttgtttttagcttccactttgggaacatgtcaaagcacacattgagaagtcccatgagtgaaagagatgttggaaagcccttgaacttggtcgttaggaaacatccacactgaagaggaacctgactgtatggaaggtcaaaaaggctgtattaatttacatgcaaaaagtcacactagaggaatgccatatcagaatgcttttggtaaatatacatgttttaaagaggttatatatcattaataaaaatatctagctggtctg

SEQ ID NO: 202932 - DNA, 5095 bp, Homo sapiens
  Payload ID: 20023
  Gene Name: zinc finger protein 559
  Uniprot ID: Q9BR84
  ENST ID: ENST00000393883
  CDS Start-End: 649-2265
gttcggtggtgtcccggtgcagccacgcgagagtagaagggtggaaaggggaggtgcccagtgaaatggagcctgtcccgtgcactttcgggcatttcgagcatcttgtgggctctcccaagtcgcggcccctcctctgagagccacagtcaggtctgtcctcaggggtcgaggcggctgcgctggggcctcggcccgggaggaggcggggggcacggcctttccattttccctgctcccctctgcagaagcctcatagggcccggcgcggcggctcacgcctgtcattcccagcgctttgggcggattgggtaggaggattacttgaggccaggagttcaagaccaggcagggcaacatagggagacccccccccccaaccatctctaatggaaaaaaaaaaaaaagtctccacatccagcgttgtgccttttctctataaggaacagcatctctgccttcctgttcacggtgaccttcgcttggtgtcctcctggcctcagcaacctgacaattctgtcgtgtcccgagagatggctaatgaatggcgcttgatgacagatgagtaatgcctgttgctgaaagattgacgatcatctttctcaagatgttttctgtcttcatgagtcaaaatttgaagaggaaaggatggtggctgggtggttgacaaattactctcaggactcagtgacctttgaggatgtggctgtggacttcacccaggaggagtggactttgctggatcaaactcagagaaacttatacagagatgtgatgctggagaactataagaatctagttgcagtagattgggagagtcatattaataccaaatggtcagcacctcagcagaattttttgcaggggaaaacatccagtgtggtggaaatggagagaaaccattttggagaggaactgtttgactttaaccaatgtgaaaaagccttgagtgaacactcatgccttaagactcacaggagaacttactttagaaagaaaacctgtgagtgtaatcaatgtgaaaaagccttcagaaaaccctctatctttactttacacaagaaaactgatatcggagaggaacttcctaactgtaatcaatgtgaaacagccttcagccaacatctacatcttgtttgcaagaaaactagccaaaatctacatcttgtttgcaagaaaactcacactcaagagaaaccatataaatgcagtgactgtgaaaaaggcttaccttcctcctcacacctcagagaatgtgtaagaatttatggtggagagagaccatatactcataaggagtatgtcgaaaccttttctcattctacagccctttttgtacacatgcaaactcaagatggagaaaaattctatgaatgtaaagcatgtgggaaacccttcactgagtcgtcatatcttactcaacatttaagaactcatagtagagtgttacctatagaacataagaaatttggcaaagcctttgctttttccccagatcttgctaaacatataagacttagaactagaggaaaacactatgtttgtaatgaatgtggcaaagaatttacttgtttctcaaaactcaacattcacataagggttcacactggagaaaaaccgtatgagtgcaacaaatgtgggaaagccttcactgattcatcaggtcttataaaacacaggcgaactcacactggagaaaagccttatgaatgtaaggaatgtgggaaagcttttgctaactcttcacatcttactgtacatatgagaactcacactggtgagaagccttatcaatgtaaggaatgtggaaaagcctttattaattcctcttcctttaaaagtcacatgcagactcatcctggtgtaaaaccctatgactgtcaacagtgtgggaaagccttcattcgatcctcatttcttattcgacatttgagaagtcacagtgcagaaaggccttttgaatgtgaggaatgtgggaaagcctttagatactcctcgcaccttagtcaacataaaagaatacatacaggggagaggccatataaatgtcaaaagtgtgggcaagccttcagtatctcatcaggccttacagtacacatgagaactcacactggtgaacggccctttgaatgtcaggaatgtgggaaagcctttactcggtccacatatcttattcgacatctaagaagtcatagtgtggagaaaccatataaggaatgtgggcaaacctttagtaattcctcatgccttactgaatgtgtgtgaattggggctgatacttggaaagaatgtggtaaagccactacttcctcacacttactgaacatgtactcattcatagtggcaatgtacacagtcataaggaatgtgggaagccttccttggtgtctcagatcttaacaattccaatagaagagaagacatatgaatgtaaggaatgtgggaaaatcttggctccttccataggccttactattcatgtgtctgtgcatcctaggaaacaaactgaacgtaggaaacctgtcgatgcttacatcttactgagtctgtttgaactcatgctggagagaaatgctatgaatgtgaggaaggtggaaaagctttcattattttcctcgggccttactgagcttgtgagcacattggatataaatgcacgtcctctggctgtaaggaatgtgttgaaacctttcactctgccttataccttaatattcagctgtgatctcacaagtgtgaaaaatcttatgaatgtaaaatgtgtggagattcttctttgtttttagcttccactttgggaacatgtcaaagcacacattgagaagtcccatgagtgaaagagatgttggaaagcccttgaacttggtcgttaggaaacatccacactgaagaggaacctgactgtatggaaggtcaaaaaggctgtattaatttacatgcaaaaagtcacactagaggaatgccatatcagaatgcttttggtaaatatacatgttttaaagaggttatatatcattaataaaaatatctagctggtctgaagatcctgagttatctcaattgttcacggttacagatggaactctttattattgaggagttccactctttcccccatttgtcactactacacttccctagtctttaaaacaattttaggctgggtgcagtggctcattcctgtaatcccagcactttgaaaggccgaagcgagtggatcatttgaggtcaggagttcgagaccagcctggccaacgtggtgaaaccccatctctactaaaaatacaaaaattagccaggcatggtggtacgtgcctgtaatcccagctactcgagaggttgaggcagaattgcttgaacccgggaggcggaagctgcagtgagctcagatcacgccactgcactccagcctggatgatatggtaagaccatctcaaaaaaagaaaaaaaaattaaaatatcctcagagggttttttaatgaaaaacttagttatagggaattgaggaacatttaggggtacaaattttcacttattgcacacaagaaaattggtactggccaggcatgctggctcacaccttaattccagcaatttgggaggccaaggcagaaggatcacttgagcccaggagttcaagaccagcctgggcaatatagtgaaacctcatcttgacaaagaataaataagattaactgggtgtactggtttgtgcctatagtcccagctatttaggaggctggggcaagaggattgcttgagcctggtcagggaggcagaggttgcagtgagccctgatcgtgccactacactctagcctgggcaacaggatgagaccctgtctcaaaaaaaaaagaaaattgacgccagcaaagaaaaccaaataaattatttaagtttgcctttctatatgtctttaaagactaatgatattgaacatcactttcatatgcttatgagtctttggtgaagtgtacatttaatgatcttttttcactgttgctgagaatctttggtttgaattattgaggcaggttctttcagtaagtttgagatataattgccatgtaataaactgcacatgtttttagcatacactttaagtttggacacatacacatatgtgtacatacacaccatcaagataatgaacatacctatcaaaccagatggtttcctcatgcccttttataatttcttcttctcctcacccttccctgcctgtcactctcctgatccactgatttgctttctcttagaatagacgactttatattatgtacagtttttatataaatggaatcatatagtctggcatctttcaggataattttttcagatccatttatgttgtagggtccatttcactgctgaatagtattccattgcaaggcataccacaagctatttatccatgtgttatttctaccttttggctattgcaattaaaactgccttgaatacccatatgcagattattctttaaacatgtgcttctgtttctttaaatagttaagagtggaatgatcagatcatatgttagtgtacgtttaagtttttaagagactgctaaacctttctcaagtagttatgccatttgacatttccatgagcagtatataagagttgcaattcttctgcatccttgccaattattggtatggtcagtcttttttattttgaccattttaataggtgtgtagtagtatctcatggttttaatttgcatttccctagtgactaatgatgtcttacatggtttcacgtgcttactggccttctttaagcctttggggaagagtctgttcaaatcttttgcctgtttatattggctttattttttatttatttttatttttttttatatagagacagggttttactctgtctcccaggctgaagtgcgtggcacgatcatgtggttttgcaatatttattgaattttgagagtttaaaatttgtaatatatttaatattaaacctattagtgtatttgatattaatactttatatttaatataatgtacatttaaatatataataaaacatttcattttaacagaggtaacataaatacacttcccaatttatggag

SEQ ID NO: 202933 - DNA, 571 bp, Homo sapiens
  Payload ID: 20023
  Gene Name: zinc finger protein 559
  ENST ID: ENST00000585377
  CDS Start-End: 455-571
aagtttttgtttctgggcggcgttcggtggtgtcccggtgcagccacgcgagagtagaagggtggaaaggggaggtgcccagtgaaatggagcctgtcccgtgcactttcgggcatttcgagcatcttgtgggctctcccaagtcgcggcccctcctctgagagccacagtcaggaacagcatctctgccttcctgttcacggtgaccttcgcttggtgtcctcctggcctcagcaacctgacaattctgtcgtgtcccgagagatggctaatgaatggcgcttgatgacagatgagtaatgcctgttgctgaaagattgacggtatgaggcaagactcccactactacttaatcaagaggaattgagattgacttacccataagttcagacagtgtctcgaagagactttgggaacaagatattcaggcacatttcactgttagactcacaggatgctggccattggtctttccctttgtgatcatctttctcaagatgttttctgtcttcatgagtcaaaatttgaagaggaaaggatggtggctgggtggttgacaaattactctcag

SEQ ID NO: 202934 - DNA, 1016 bp, Homo sapiens
  Payload ID: 20023
  Gene Name: zinc finger protein 559
  ENST ID: ENST00000586255
  CDS Start-End: 331-780
atgcgcataacggccgccatcttaacagcgcgttcccgttggcgtctgaggaacagcatctctgccttcctgttcacggtgaccttcgcttggtgtcctcctggcctcagcaacctgacaattctgtcgtgtcccgagagatggctaatgaatggcgcttgatgacagatgagtaatgcctgttgctgaaagattgacggtatgaggcaagactcccactactacttaatcaagaggaattgagattgacttacccataagttcagacagtgtctcgaagagactttgggaacaagatattcaggcacatttcactgttagactcacaggatgctggccattggtctttccctttgtgatcatctttctcaagatgttttctgtcttcatgagtcaaaatttgaagaggaaaggatggtggctgggtggttgacaaattactctcaggactcagtgacctttgaggatgtggctgtggacttcacccaggaggagtggactttgctggatcaaactcagagaaacttatacagagatgtgatgctggagaactataagaatctagttgcagtagattgggagagtcatattaataccaaatggtcagcacctcagcagaattttttgcaggggaaaacatccagtgtggtggaaatgagtctcactgtatcacccagactggagtgcagtggtaccatctcagctcacggcagcttccacctcccaggttcaagcaattcttgtgcctcagcctcccgagtagctgggacttgtgcctgagcctcccaagtagctgagactataggtgcgtgccaccacagctggctaacttgtgtttgtagtagagacagggtttcaccatgttggccaggttggtttcaacctcttggcctcaagtgatccacccacctcagcctcccaaagtgctgggattacaggcgcgagccaccgcatctggcctgcggatactatacatttttgattatggtagctgtctagtaaatcttgaaagcaag

SEQ ID NO: 202935 - DNA, 801 bp, Homo sapiens
  Payload ID: 20023
  Gene Name: zinc finger protein 559
  ENST ID: ENST00000588124
  CDS Start-End: 559-801
gcccagtgaaatggagcctgtcccgtgcactttcgggcatttcgagcatcttgtgggctctcccaagtcgcggcccctcctctgagagccacagtcaggaacagcatctctgccttcctgttcacggtgaccttcgcttggtgtcctcctggcctcagcaacctgacaattctgtcgtgtcccggcaggagtacagtggtgagatcacggttcactgcagcattgacctccctaggctcaggtgttgctcccacctcagtcttctgaatagcttggagtataggtaaacgggatttgttattatttatgtccacgtggcataatactctagtggcactcacatgaacaacttcatcttctgcagagagatggctaatgaatggcgcttgatgacagatgagtaatgcctgttgctgaaagattgacggtatgaggcaagactcccactactacttaatcaagaggaattgagattgacttacccataagttcagacagtgtctcgaagagactttgggaacaagatattcaggcacatttcactgttagactcacaggatgctggccattggtctttccctttgtgatcatctttctcaagatgttttctgtcttcatgagtcaaaatttgaagaggaaaggatggtggctgggtggttgacaaattactctcaggactcagtgacctttgaggatgtggctgtggacttcacccaggaggagtggactttgctggatcaaactcagagaaacttatacagagatgtgatgctggagaactataagaatctagttgcagta

SEQ ID NO: 202936 - DNA, 1488 bp, Homo sapiens
  Payload ID: 20023
  Gene Name: zinc finger protein 559
  ENST ID: ENST00000592896
  CDS Start-End: 313-651
atcttaacagcgcgttcccgttggcgtctgaggaacagcatctctgccttcctgttcacggtgaccttcgcttggtgtcctcctggcctcagcaacctgacaattctgtcgtgtcccgagagatggctaatgaatggcgcttgatgacagatgagtaatgcctgttgctgaaagattgacggtatgaggcaagactcccactactacttaatcaagaggaattgagattgacttacccataagttcagacagtgtctcgaagagactttgggaacaagatattcaggcacatttcactgttagactcacaggatgctggccattggtctttccctttgtgatcatctttctcaagatgttttctgtcttcatgagtcaaaatttgaagaggaaaggatggtggctgggtggttgacaaattactctcaggactcagtgacctttgaggatgtggctgtggacttcacccaggaggagtggactttgctggatcaaactcagagaaacttatacagagatgtgatgctggagaactataagaatctagttgcagtagattgggagagtcatattaataccaaatggtcagcacctcagcagaattttttgcaggggaaaacatccagtgtggtggaaatgaattcagagtaaaagggagaatctcaatgaaataaatttggaaaacttctatgaaccatcattaattttcaccaacaggagagaaaccattttggagaggaactgtttgactttaaccaatgtgaaaaagccttgagtgaacactcatgccttaagactcacaggagaacttactttagaaagaaaacctgtgagtgtaatcaatgtgaaaaagccttcagaaaaccctctatctttactttacacaagaaaactgatatcggagaggaacttcctaactgtaatcaatgtgaaacagccttcagccaacatctacatcttgtttgcaagaaaactagccaaaatctacatcttgtttgcaagaaaactcacactcaagagaaaccatataaatgcagtgactgtgaaaaaggcttaccttcctcctcacacctcagagaatgtgtaagaatttatggtggagagagaccatatactcataaggagtatgtcgaaaccttttctcattctacagccctttttgtacacatgcaaactcaagatggagaaaaattctatgaatgtaaagcatgtgggaaacccttcactgagtcgtcatatcttactcaacatttaagaactcatagtagagtgttacctatagaacataagaaatttggcaaagcctttgctttttccccagatcttgctaaacatataagacttagaactagaggaaaacactatgtttgtaatgaatgtggcaaagaatttacttgtttctcaaaactcaacattcacataagggttcacactggagaaaaaccgtatgagtgcaacaaatgtgggaaagccttcactgattcatca

SEQ ID NO: 202937 - DNA, 692 bp, Homo sapiens
  Payload ID: 20023
  Gene Name: zinc finger protein 559
  ENST ID: ENST00000591652
  CDS Start-End: 1-159
caaactcagagaaacttatacagagatgtgatgctggagaactataagaatctagttgcagtagattgggagagtcatattaataccaaatggtcagcacctcagcagaattttttgcaggggaaaacatccagtgtggtggaaatggaaacaaactgaacgtaggaaacctgtcgatgcttacatcttactgagtctgtttgaactcatgctggagagaaatgctatgaatgtgaggaaggtggaaaagctttcattattttcctcgggccttactgagcttgtgagcacattggatataaatgcacgtcctctggctgtaaggaatgtgttgaaacctttcactctgccttataccttaatattcagctgtgatctcacaagtgtgaaaaatcttatgaatgtaaaatgtgtggagattcttctttgtttttagcttccactttgggaacatgtcaaagcacacattgagaagtcccatgagtgaaagagatgttggaaagcccttgaacttggtcgttaggaaacatccacactgaagaggaacctgactgtatggaaggtcaaaaaggctgtattaatttacatgcaaaaagtcacactagaggaatgccatatcagaatgcttttggtaaatatacatgttttaaagaggttatatatcattaataaaaatatctagctggtctgaa

SEQ ID NO: 202938 - DNA, 967 bp, Homo sapiens
  Payload ID: 20023
  Gene Name: zinc finger protein 559
  Uniprot ID: Q9BR84
  ENST ID: ENST00000585352
  CDS Start-End: 193-447
atgcgcataacggccgccatcttaacagcgcgttcccgttggcgtctgaggaacagcatctctgccttcctgttcacggtgaccttcgcttggtgtcctcctggcctcagcaacctgacaattctgtcgtgtcccgatcatctttctcaagatgttttctgtcttcatgagtcaaaatttgaagaggaaaggatggtggctgggtggttgacaaattactctcaggactcagtgacctttgaggatgtggctgtggacttcacccaggaggagtggactttgctggatcaaactcagagaaacttatacagagatgtgatgctggagaactataagaatctagttgcagtagattgggagagtcatattaataccaaatggtcagcacctcagcagaattttttgcaggggaaaacatccagtgtggtggaaatgaattcagagtaaaagggagaatctcaatgaaataaatttggaaaacttctatgaaccatcattaattttcaccaacaggagagaaaccattttggagaggaactgtttgactttaaccaatgtgaaaaagccttgagtgaacactcatgccttaagactcacaggagaacttactttagaaagaaaacctgtgagtgtaatcaatgtgaaaaagccttcagaaaaccctctatctttactttacacaagaaaactgatatcggagaggaacttcctaactgtaatcaatgtgaaacagccttcagccaacatctacatcttgtttgcaagaaaactagccaaaatctacatcttgtttgcaagaaaactcacactcaagagaaaccatataaatgcagtgactgtgaaaaaggcttaccttcctcctcacacctcagagaatgtgtaagaatttatggtggagagagaccatatactcataaggagtatgtcgaaaccttttctcattctacagccctttttgtacacatgc

SEQ ID NO: 202939 - DNA, 1398 bp, Homo sapiens
  Payload ID: 20023
  Gene Name: zinc finger protein 559
  ENST ID: ENST00000592504
  CDS Start-End: 256-783
atgcgcataacggccgccatcttaacagcgcgttcccgttggcgtctgaggaacagcatctctgccttcctgttcacggtgaccttcgcttggtgtcctcctggcctcagcaacctgacaattctgtcgtgtcccgagagatggctaatgaatggcgcttgatgacagatgagtaatgcctgttgctgaaagattgacgatcatctttctcaagatgttttctgtcttcatgagtcaaaatttgaagaggaaaggatggtggctgggtggttgacaaattactctcaggactcagtgacctttgaggatgtggctgtggacttcacccaggaggagtggactttgctggatcaaactcagagaaacttatacagagatgtgatgctggagaactataagaatctagttgcagtagattgggagagtcatattaataccaaatggtcagcacctcagcagaattttttgcaggggaaaacatccagtgtggtggaaatggtaagattcagaaggtataatttattgtcttccatgttagaggaagattggaaattccttaaaatggaaaagcagcacaataaccttgagacatttgagactagtgtttttcacccaaaaataatctgtctcttggagagactatggatcatgagtttgacaaacactctaaacatccctcagaatatatttgtttacatatttccttcaacattcccatatgtatctcagatgtttttgataaataattcactcttgggccgttatcagctaagctctatttagaagccctctgaaagtaaagaatataacagaacttcctgcagtcactttgttccacttgaaaacactcaggtctgaaccatgccttgcaatgaaaatggcaggaacaaacagtttcaattatactaacttattttccatgtgtaacagaattcagagtaaaagggagaatctcaatgaaataaatttggaaaacttctatgaaccatcattaattttcaccaacaggagagaaaccattttggagaggaactgtttgactttaaccaatgtgaaaaagccttgagtgaacactcatgccttaagactcacaggagaacttactttagaaagaaaacctgtgagtgtaatcaatgtgaaaaagccttcagaaaaccctctatctttactttacacaagaaaactgatatcggagaggaacttcctaactgtaatcaatgtgaaacagccttcagccaacatctacatcttgtttgcaagaaaactagccaaaatctacatcttgtttgcaagaaaactcacactcaagagaaaccatataaatgcagtgactgtgaaaaaggcttaccttcctcctcacacctcagagaatgtgtaagaatttatggtggagagaga

SEQ ID NO: 202940 - DNA, 2991 bp, Homo sapiens
  Payload ID: 20023
  Gene Name: zinc finger protein 559
  ENST ID: ENST00000587557
  CDS Start-End: 408-2216
catttacaggaggtgagcatgaagtggccaatgggaaaattctaggaggtattgggactcatgaaggttctgtttcggagcccttgagctgccgcttggccagttcccacactgtggagtatgctttcgttttcaacaaatcccagctcttgttcttttgttgcttcattctttctttgctttgctgggcgttttgtctaattctttgttcaaaacgccagtaacctggacagcttgcagtcaagaccccctaccggtgacacttgcgctcttcggggaggtaaacagcatttcctctcagctctgggttggaaaaagccgcagcagctgatgggcccgggaacccgaggccccgccccctaggtggtcctagcctttgcgcgtgcgcggcgtgtctgcgtgggcgcatgcgcataacggccgccatcttaacagcgcgttcccgttggcgtctgaggaacagcatctctgccttcctgttcacggtgaccttcgcttggtgtcctcctggcctcagcaacctgacaattctgtcgtgtcccgatcatctttctcaagatgttttctgtcttcatgagtcaaaatttgaagaggaaaggatggtggctgggtggttgacaaattactctcaggactcagtgacctttgaggatgtggctgtggacttcacccaggaggagtggactttgctggatcaaactcagagaaacttatacagagatgtgatgctggagaactataagaatctagttgcagtagattgggagagtcatattaataccaaatggtcagcacctcagcagaattttttgcaggggaaaacatccagtgtggtggaaatggagagaaaccattttggagaggaactgtttgactttaaccaatgtgaaaaagccttgagtgaacactcatgccttaagactcacaggagaacttactttagaaagaaaacctgtgagtgtaatcaatgtgaaaaagccttcagaaaaccctctatctttactttacacaagaaaactgatatcggagaggaacttcctaactgtaatcaatgtgaaacagccttcagccaacatctacatcttgtttgcaagaaaactagccaaaatctacatcttgtttgcaagaaaactcacactcaagagaaaccatataaatgcagtgactgtgaaaaaggcttaccttcctcctcacacctcagagaatgtgtaagaatttatggtggagagagaccatatactcataaggagtatgtcgaaaccttttctcattctacagccctttttgtacacatgcaaactcaagatggagaaaaattctatgaatgtaaagcatgtgggaaacccttcactgagtcgtcatatcttactcaacatttaagaactcatagtagagtgttacctatagaacataagaaatttggcaaagcctttgctttttccccagatcttgctaaacatataagacttagaactagaggaaaacactatgtttgtaatgaatgtggcaaagaatttacttgtttctcaaaactcaacattcacataagggttcacactggagaaaaaccgtatgagtgcaacaaatgtgggaaagccttcactgattcatcaggtcttataaaacacaggcgaactcacactggagaaaagccttatgaatgtaaggaatgtgggaaagcttttgctaactcttcacatcttactgtacatatgagaactcacactggtgagaagccttatcaatgtaaggaatgtggaaaagcctttattaattcctcttcctttaaaagtcacatgcagactcatcctggtgtaaaaccctatgactgtcaacagtgtgggaaagccttcattcgatcctcatttcttattcgacatttgagaagtcacagtgcagaaaggccttttgaatgtgaggaatgtgggaaagcctttagatactcctcgcaccttagtcaacataaaagaatacatacaggggagaggccatataaatgtcaaaagtgtgggcaagccttcagtatctcatcaggccttacagtacacatgagaactcacactggtgaacggccctttgaatgtcaggaatgtgggaaagcctttactcggtccacatatcttattcgacatctaagaagtcatagtgtggagaaaccatataaggaatgtgggcaaacctttagtaattcctcatgccttactgaatgtgtgtgaattggggctgatacttggaaagaatgtggtaaagccactacttcctcacacttactgaacatgtactcattcatagtggcaatgtacacagtcataaggaatgtgggaagccttccttggtgtctcagatcttaacaattccaatagaagagaagacatatgaatgtaaggaatgtgggaaaatcttggctccttccataggccttactattcatgtgtctgtgcatcctaggaaacaaactgaacgtaggaaacctgtcgatgcttacatcttactgagtctgtttgaactcatgctggagagaaatgctatgaatgtgaggaaggtggaaaagctttcattattttcctcgggccttactgagcttgtgagcacattggatataaatgcacgtcctctggctgtaaggaatgtgttgaaacctttcactctgccttataccttaatattcagctgtgatctcacaagtgtgaaaaatcttatgaatgtaaaatgtgtggagattcttctttgtttttagcttccactttgggaacatgtcaaagcacacattgagaagtcccatgagtgaaagagatgttggaaagcccttgaacttggtcgttaggaaacatccacactgaagaggaacctgactgtatggaaggtcaaaaaggctgtattaatttacatgcaaaaagtcacactagaggaatgccatatcagaatgcttttggtaaatatacatgttttaaagaggttatatatcattaataaaaatatctagctggtctg

SEQ ID NO: 202941 - DNA, 588 bp, Homo sapiens
  Payload ID: 20023
  Gene Name: zinc finger protein 559
  ENST ID: ENST00000592298
  CDS Start-End: 385-588
gaggtaagtttttgtttctgggcggcgttcggtggtgtcccggtgcagccacgcgagagtagaagggtggaaaggggaggtgcccagtgaaatggagcctgtcccgtgcactttcgggcatttcgagcatcttgtgggctctcccaagtcgcggcccctcctctgagagccacagtcaggaacagcatctctgccttcctgttcacggtgaccttcgcttggtgtcctcctggcctcagcaacctgacaattctgtcgtgtcccgagagatggctaatgaatggcgcttgatgacagatgagtaatgcctgttgctgaaagattgacgatcatctttctcaagatgttttctgtcttcatgagtcaaaatttgaagaggaaaggatggtggctgggtggttgacaaattactctcaggactcagtgacctttgaggatgtggctgtggacttcacccaggaggagtggactttgctggatcaaactcagagaaacttatacagagatgtgatgctggagaactataagaatctagttgcagtagattgggagagtcatattaataccaaatggtcagcacctcagcag

SEQ ID NO: 202942 - DNA, 569 bp, Homo sapiens
  Payload ID: 20023
  Gene Name: zinc finger protein 559
  ENST ID: ENST00000589208
  CDS Start-End: 127-569
gtctgaggtaagtttttgtttctgggcggcgttcggtggtgtcccgattgggagagtcatattaataccaaatggtcagcacctcagcagaattttttgcaggggaaaacatccagtgtggtggaaatggagagaaaccattttggagaggaactgtttgactttaaccaatgtgaaaaagccttgagtgaacactcatgccttaagactcacaggagaacttactttagaaagaaaacctgtgagtgtaatcaatgtgaaaaagccttcagaaaaccctctatctttactttacacaagaaaactgatatcggagaggaacttcctaactgtaatcaatgtgaaacagccttcagccaacatctacatcttgtttgcaagaaaactagccaaaatctacatcttgtttgcaagaaaactcacactcaagagaaaccatataaatgcagtgactgtgaaaaaggcttaccttcctcctcacacctcagagaatgtgtaagaatttatggtggagagagaccatatactcataaggagtatgtcgaaaccttttctcattctacagccct

SEQ ID NO: 202943 - DNA, 2117 bp, Homo sapiens
  Payload ID: 20023
  Gene Name: zinc finger protein 559
  ENST ID: ENST00000605750
  CDS Start-End: 1-1575
atcttaacagcgcgttcccgttggcgtctgaggaacagcatctctgccttcctgttcacggtgaccttcgcttggtgtcctcctggcctcagcaacctgacaattctgtcgtgtcccgattgggagagtcatattaataccaaatggtcagcacctcagcagaattttttgcaggggaaaacatccagtgtggtggaaatggagagaaaccattttggagaggaactgtttgactttaaccaatgtgaaaaagccttgagtgaacactcatgccttaagactcacaggagaacttactttagaaagaaaacctgtgagtgtaatcaatgtgaaaaagccttcagaaaaccctctatctttactttacacaagaaaactgatatcggagaggaacttcctaactgtaatcaatgtgaaacagccttcagccaacatctacatcttgtttgcaagaaaactagccaaaatctacatcttgtttgcaagaaaactcacactcaagagaaaccatataaatgcagtgactgtgaaaaaggcttaccttcctcctcacacctcagagaatgtgtaagaatttatggtggagagagaccatatactcataaggagtatgtcgaaaccttttctcattctacagccctttttgtacacatgcaaactcaagatggagaaaaattctatgaatgtaaagcatgtgggaaacccttcactgagtcgtcatatcttactcaacatttaagaactcatagtagagtgttacctatagaacataagaaatttggcaaagcctttgctttttccccagatcttgctaaacatataagacttagaactagaggaaaacactatgtttgtaatgaatgtggcaaagaatttacttgtttctcaaaactcaacattcacataagggttcacactggagaaaaaccgtatgagtgcaacaaatgtgggaaagccttcactgattcatcaggtcttataaaacacaggcgaactcacactggagaaaagccttatgaatgtaaggaatgtgggaaagcttttgctaactcttcacatcttactgtacatatgagaactcacactggtgagaagccttatcaatgtaaggaatgtggaaaagcctttattaattcctcttcctttaaaagtcacatgcagactcatcctggtgtaaaaccctatgactgtcaacagtgtgggaaagccttcattcgatcctcatttcttattcgacatttgagaagtcacagtgcagaaaggccttttgaatgtgaggaatgtgggaaagcctttagatactcctcgcaccttagtcaacataaaagaatacatacaggggagaggccatataaatgtcaaaagtgtgggcaagccttcagtatctcatcaggccttacagtacacatgagaactcacactggtgaacggccctttgaatgtcaggaatgtgggaaagcctttactcggtccacatatcttattcgacatctaagaagtcatagtgtggagaaaccatataaggaatgtgggcaaacctttagtaattcctcatgccttactgaatgtgtgtgaattggggctgatacttggaaagaatgtggtaaagccactacttcctcacacttactgaacatgtactcattcatagtggcaatgtacacagtcataaggaatgtgggaagccttccttggtgtctcagatcttaacaattccaatagaagagaagacatatgaatgtaaggaatgtgggaaaatcttggctccttccataggccttactattcatgtgtctgtgcatcctaggaaacaaactgaacgtaggaaacctgtcgatgcttacatcttactgagtctgtttgaactcatgctggagagaaatgctatgaatgtgaggaaggtggaaaagctttcattattttcctcgggccttactgagcttgtgagcacattggatataaatgcacgtcctctggctgtaaggaatgtgttgaaacctttcactctgccttataccttaatattcagctgtgatctcacaagtgtgaaaaatcttatgaatgtaaaatgtgtggagattcttctttgtttttagcttccactttgggaacatgtc

SEQ ID NO: 202944 - DNA, 3054 bp, Homo sapiens
  Payload ID: 20023
  Gene Name: zinc finger protein 559
  Uniprot ID: Q9BR84
  ENST ID: ENST00000603380
  CDS Start-End: 663-2279
catttacaggaggtgagcatgaagtggccaatgggaaaattctaggaggtattgggactcatgaaggttctgtttcggagcccttgagctgccgcttggccagttcccacactgtggagtatgctttcgttttcaacaaatcccagctcttgttcttttgttgcttcattctttctttgctttgctgggcgttttgtctaattctttgttcaaaacgccagtaacctggacagcttgcagtcaagaccccctaccggtgacacttgcgctcttcggggaggtaaacagcatttcctctcagctctgggttggaaaaagccgcagcagctgatgggcccgggaacccgaggccccgccccctaggtggtcctagcctttgcgcgtgcgcggcgtgtctgcgtgggcgcatgcgcataacggccgccatcttaacagcgcgttcccgttggcgtctgaggaacagcatctctgccttcctgttcacggtgaccttcgcttggtgtcctcctggcctcagcaacctgacaattctgtcgtgtcccgagagatggctaatgaatggcgcttgatgacagatgagtaatgcctgttgctgaaagattgacgatcatctttctcaagatgttttctgtcttcatgagtcaaaatttgaagaggaaaggatggtggctgggtggttgacaaattactctcaggactcagtgacctttgaggatgtggctgtggacttcacccaggaggagtggactttgctggatcaaactcagagaaacttatacagagatgtgatgctggagaactataagaatctagttgcagtagattgggagagtcatattaataccaaatggtcagcacctcagcagaattttttgcaggggaaaacatccagtgtggtggaaatggagagaaaccattttggagaggaactgtttgactttaaccaatgtgaaaaagccttgagtgaacactcatgccttaagactcacaggagaacttactttagaaagaaaacctgtgagtgtaatcaatgtgaaaaagccttcagaaaaccctctatctttactttacacaagaaaactgatatcggagaggaacttcctaactgtaatcaatgtgaaacagccttcagccaacatctacatcttgtttgcaagaaaactagccaaaatctacatcttgtttgcaagaaaactcacactcaagagaaaccatataaatgcagtgactgtgaaaaaggcttaccttcctcctcacacctcagagaatgtgtaagaatttatggtggagagagaccatatactcataaggagtatgtcgaaaccttttctcattctacagccctttttgtacacatgcaaactcaagatggagaaaaattctatgaatgtaaagcatgtgggaaacccttcactgagtcgtcatatcttactcaacatttaagaactcatagtagagtgttacctatagaacataagaaatttggcaaagcctttgctttttccccagatcttgctaaacatataagacttagaactagaggaaaacactatgtttgtaatgaatgtggcaaagaatttacttgtttctcaaaactcaacattcacataagggttcacactggagaaaaaccgtatgagtgcaacaaatgtgggaaagccttcactgattcatcaggtcttataaaacacaggcgaactcacactggagaaaagccttatgaatgtaaggaatgtgggaaagcttttgctaactcttcacatcttactgtacatatgagaactcacactggtgagaagccttatcaatgtaaggaatgtggaaaagcctttattaattcctcttcctttaaaagtcacatgcagactcatcctggtgtaaaaccctatgactgtcaacagtgtgggaaagccttcattcgatcctcatttcttattcgacatttgagaagtcacagtgcagaaaggccttttgaatgtgaggaatgtgggaaagcctttagatactcctcgcaccttagtcaacataaaagaatacatacaggggagaggccatataaatgtcaaaagtgtgggcaagccttcagtatctcatcaggccttacagtacacatgagaactcacactggtgaacggccctttgaatgtcaggaatgtgggaaagcctttactcggtccacatatcttattcgacatctaagaagtcatagtgtggagaaaccatataaggaatgtgggcaaacctttagtaattcctcatgccttactgaatgtgtgtgaattggggctgatacttggaaagaatgtggtaaagccactacttcctcacacttactgaacatgtactcattcatagtggcaatgtacacagtcataaggaatgtgggaagccttccttggtgtctcagatcttaacaattccaatagaagagaagacatatgaatgtaaggaatgtgggaaaatcttggctccttccataggccttactattcatgtgtctgtgcatcctaggaaacaaactgaacgtaggaaacctgtcgatgcttacatcttactgagtctgtttgaactcatgctggagagaaatgctatgaatgtgaggaaggtggaaaagctttcattattttcctcgggccttactgagcttgtgagcacattggatataaatgcacgtcctctggctgtaaggaatgtgttgaaacctttcactctgccttataccttaatattcagctgtgatctcacaagtgtgaaaaatcttatgaatgtaaaatgtgtggagattcttctttgtttttagcttccactttgggaacatgtcaaagcacacattgagaagtcccatgagtgaaagagatgttggaaagcccttgaacttggtcgttaggaaacatccacactgaagaggaacctgactgtatggaaggtcaaaaaggctgtattaatttacatgcaaaaagtcacactagaggaatgccatatcagaatgcttttggtaaatatacatgttttaaagaggttatatatcattaataaaaatatctagctggtctg

SEQ ID NO: 202945 - DNA, 2654 bp, Homo sapiens
  Payload ID: 20024
  Gene Name: zinc finger protein 560
  Uniprot ID: Q96MR9
  ENST ID: ENST00000301480
  CDS Start-End: 215-2587
ttttggtcgctggcgcctgtttcctcagagccactttttcctttgtgttgtctggtcgttcactactttgagggaaaagaattttgccgttcgcgttcgattgactccgtccccaagatcctgtagccccacggacctggcgactccaccgtgttcgggtctttctaggaacccaatctgccttcatgaagaaaagacagaggcagaaaggaagatggcttactgcctgacaaattgttatcagtactccgtgacctttgaggatacagctgtggacttcacccaggaggagtggattttactggacccagttcagagaaacttatacagagatgtgatgctggagaattatgagaacgtggccaaagtaggatttcagctctttaaacccagtgtcatctcttggttggaagaagaagagttgagaaccttgcagcaaggagttctccaagactgggcaataaaacatcaaaccagtgtttcagcactgcagcaggagttttggaaaatacaaacttctaatgggatacaaatggacctggtaacctttgacagtgtggctgtggagttcacccaggaagagtggactttactggacccagctcagagaaacctgtacagtgatgtgatgctggagaactacaagaacctgtcctcagtaggttaccagctcttcaaacccagtctgatctcttggctggaggaagaggaagagttgagcacactgccaagagttctccaagaatggaaaatgtgcctgaaaaccaaagggccagccctttggcaagataatttttgtttaaaaacattaaatgggatacagttggcaagaaaccaaaatggagaggaactctatgactgtaagcaatgtgaagatgtcttctgtaaacatccatgccttaagaccaacatgagtactcaaaatagaggcaacacgtctgaatgtattcagtatgcaaaagacctcctttctctatacaataaaacctctaccataaggaaagtttctgtgttcagtaagcatggaaaatctttccgcctgattttaaatgttcaggtccagagaaagtgtacacaagataaatcctttgaaggcactgactatgggaaagccttcatttatcagtcataccttgaagcacacaggaaaactcagagtggagaaaaactcaatgaatggaagcaatgtggggaagcatttactcactccacaagccatgctgtaaatgttgaaacacacattattaaaaacccctatgaatgtaaggaatgtggaaaagattttagataccctacccaccttaataatcacatgcaaacccacattgggataaaaccttataaatgtaagcactgtggcaaaaccttcactgtgccgtcaggctttcttgaacatgtacgaactcacactggagagaagccctatgggtgtaaggaatgtggtaaagcctttggtacatctgcaggccttattgaacatataagatgtcacgccagagagaaaacctttaaatgtgaccactgtgggaaagcctttatttcttacccatctctttttggacatttgagagttcataatggagagaagccatatgagcataaggaatatgggaaggcctttggtacatcctcaggtgttattgaagatagaagaagtaacacaggacagaaacgctttgattgtgaccagtgtgggaaagtctttgtttctttctcatctctttttgctcatttgagaactcacactggtgagaagccctttaagtgttacaaatgtgggaaaccatttacctcttctgcctgtcttcgtattcacatgcgaactcacacagaagagagactctatcaatgtaagaaatgtggtaaagctttcactaagtgctcatatcttaccaaacatttacgaacacacgctggagagaaaccctatgaatgtatgaaatgtgggaaagccttcactgagcgctcataccttactaaacatttacgaagacacagtggagagaagccatatgaatgtaagaaatgtggaaaagccttcacagaacgctcagatcttactaaacatttacgaagacacactggagataagccctatgaatataaggactgtgggaaagcctttgttgtctcctccagtctagttgatcatttaagaactcacactggatataaaccctataaatgtaatgcatgtgaaaaagcttacagtaggtcttgtgtactaactcaacacttaaaaactcatgcagcagagaagacctctgaatgtaacgcatgtggaaattcctttcgaaattccatgtgctttcatgatcgcttaaaaactctcaccaaaataaaaccctataaatgtaaggactgtgggaaagccttcacttgtcattcagatcttactaatcatgtgcgaattcacactggagagaagccctataaatgtaaggaatgtgggaaggccttccgtacatcctcaggacgtattcaacatttaagaactcatatgggagagaaaccctttgaatgtgaccagtgtgggaaagcctttgcttctttctcagctcgtattgcacatttgaaaacacactagagagaagccctgtggatgtgaagaatgtggaaaaacctttgctgtttcctcaagcctaactgaacat

SEQ ID NO: 202946 - DNA, 4693 bp, Homo sapiens
  Payload ID: 20025
  Gene Name: zinc finger protein 561
  Uniprot ID: Q8N587
  ENST ID: ENST00000302851
  CDS Start-End: 365-1825
gttctgcatccccctccctgagccaaccccaggccctttctgcacccacccgagaggaaactagaatttctgtgttctacccggtcctacgtggctgaaactggagcccacgagcctcgcccggccagagtgttgaagcggaagtgacgtcagcgcaccaccgccatcttttccggcgctggctcctctccgtcagtgcggtttcgcctttatggtggtggagtctgcccaggctgtggaccgcaaataaccctgtacaaagaggaatggagattgcctctatccacctagattcataagctggcctgaggtgatcttggcatcaaggaagggatgcacatcatcacaccatcagcttcagagaatggcagccatttatttgtcccgtgggtttttttccagggaaccaatctgcccttttgaagaaaagacaaaggtagaaaggatggtggaggactacctggcaagtggttatcaggattcagtgacgtttgatgatgtggctgtggacttcaccccagaggagtgggctttactggacacaactgagaaatacctctacagagatgtgatgctggagaactacatgaacctggcctctgtggaatgggaaatacaacctagaaccaaacggtcatcacttcagcagggttttttgaagaatcaaatattcagtgggatacaaatgacaagaggctacagtggatggaaactctgtgactgtaagaattgtggagaggtcttcagggaacagttttgccttaagacacacatgagagttcagaatggagggaatacttctgagggtaattgttatggaaaagacaccctcagtgtgcacaaggaagcctctactggacaggaactttccaaatttaatccatgtggaaaagtctttactctaactccaggtcttgctgtacatcttgaagttctcaatgcaagacaaccctacaaatgtaaggaatgtggaaaaggctttaagtattttgcaagccttgataatcatatgggaatccacactgatgagaaactctgtgaatttcaggaatatgggagagctgtcacagcttcttcacacctaaagcagtgtgtagcagttcatacaggaaagaaatccaaaaagactaagaaatgtgggaaatccttcactaatttttctcaactttatgcacctgtgaaaactcataaaggagagaagtcctttgaatgtaaagaatgtggaagatcctttagaaattcctcatgccttaatgatcacattcaaattcacactggaataaaaccacacaagtgtacttactgtgggaaagccttcactagatcaactcaacttactgaacatgtaagaactcacactggaataaaaccctatgaatgtaaggaatgtggccaagcctttgctcagtactcgggcctttctatacacatacgaagtcacagtggaaagaaaccctatcagtgtaaggaatgtgggaaagccttcactacatccacaagtcttattcagcatacaagaattcacacaggagagaagccttatgaatgtgttgaatgtgggaagaccttcattacttcttcccgtcgtagtaaacatttgaaaactcatagtggagaaaagccctttgtatgcaagatatgtgggaaagcatttctatattcctcacgccttaatgttcacctgcgaactcataccggagagaaacccttcgtatgtaaagaatgtgggaaagcatttgctgtttcctcacgcctaagtagacatgaaagaattcacactggggagaaaccctatgaatgcaaggatatgagtgttaccatttagcccatcggttgccatctttaattattggcaatgacaccaaagattatcagatttgtcctaaatgccttttggaggttgtaatgactcatggattggccttagataccatcctgagggtctgaaattaaacctacaggttctgaatacaacatcatggttgcctgagtctgggcatctgtgaagaagggtcatggatggtgaggtcagtactgcaggctgcctcaccttggtgattagattcctaagatcatagcattaacaagttgtgtatgagataaatcatgcagattgaccccagcccctgttggttagtggctgccagtgtggcacatttatgtcaaaatttaccagaagccaagatgatgtaggaccccaaaggtgggttgttaagagatgctcctccaagggtctcttctgatcccacggatcctgcagagcgtgtcaggaatgaaaccatccataactgccagtgccctttcacagctgattatttctgtgtccccttgtaaaatctaagaagtgtgacagccttgcctgttctgccttgtatgtctattttagatggcacaatgtaagtggcaatgtctcttctagtataatccagtctctcttctcacttctgtcaaggtggctgatatagtccatgaatcccactcatgatctctttatcagatgatcgttcagccacactttgaggattctcttcagtacaagttttctaatttttgcattatggataggctgagaattttccaaatctccaagttctggttcctttttccttaacaattttttctgcaattcaggtctccttttgcatttttgctgagaccagctgggtcatggagaccctgacccagcagctctagaggaattaagacaaagacacagaaatagagtgcagagtgggaatcggggctcacagccttcagagctgagagccttgaacagagtttgacccacatatttattgacagtaagcctgtgataaacattatttctatagattatagattagctaaaagtattccttacaagaaagaaagggacaggctctggcttgttatctgcaacaggaacatgtccttaaggcacaaatcactcatggtattgtttgtggtttaggaatgcctgagcagttttccagttttccaccgtgggtgggccaggtgttccttgccctcattcgggtaaaccagcaacctccagcatgggtgtcatagccatcacgagcatgtcacagtgccgcagagattttgtttatgggcagtttctcatggcctgtttatgtccaaatttggggggcctgttctgagcacattttcctgtaagcactcaggaagaatgaagcttcctgtgtcctttaacactttaagtacagatcttagtgatacataaccagttttatctctctcaagctctaccttccgcaaagtgctagaatacagttctgccaagttcttcactacttcgtatcaagggttgtattttctttatttcccaatagcatgttcctcattccccaatgacacctcaccaggatcacccttaccaaccttacttccagcttgcacatcagaatttttccagcctcatttgtcagtttcaaatctgcttcacatttttagtttttttgtttgtttgtttttaatctgccttaatgagctcaggccactatcacaaaataccacagaccaaatggcttacaaatttgttaattttaaataaatgaggttaaaaacaaatttatattctcacatttctcgaggctggaagtctgagatcagagtgccagcatggtcaacttctggcgagagctctcttcctggtatgtaaatgcccacttcctcatgtcttcacaggaaggaaaccaacaaataggtctctctctcctctctcctttctcctctctcctctctcctctttctctctctctccccaccatctctctccttcccctccctccccctccctccccctacccatctcttgacatcatttcacgatacttctaaagagcctattttcaggccgggcgcggtggctcacacctgtaatcccagcactttgggaggccgaggtgggcggatcacgaggtcaggagatcgagactgtcctagttaacacggtgaaaccctgtctctactacaaatacaaaaaattagcctggcgtggtggcgggtacctgcagtcccagctactcgggaggctgaggcaggagaatggcatgaacctgggaggcacaggttgcagtgagccgagatcgcagccactgcattccagcctggacaacagagcgagactctgtctcaaaaacaaaactaaaaaaccctattttcacatacagtcacattgggatttggagcttcaacatatgaattttcagggttatcattcagtccaaagtacttaatatgattcttttccgtttccacatagacaatcacataatctgtaaataatgactcttacttttccactttagtcgttaggttatacctatatatatattttcttgctttactggactaatttcaacctccagcacaccaccaatgaatagcagtaataccagcataattgtctgcagttctgctgagatacgtgctctattttattggcttggctgtaggtttttattttattttttgaagaggctaatctcttacaggaaaggtttctttttatatccagtttttacatgatgaatgatttcccagtatttcataattcatgaggctgaattcctcttgaatttattaaatgcttcctgtgcatcctctgtgatgatcatgtttatttactgctagaactcaagtacctagaactgttcctggccaatgatggtatgtaataaatacttcaatg

SEQ ID NO: 202947 - DNA, 2017 bp, Homo sapiens
  Payload ID: 20025
  Gene Name: zinc finger protein 561
  ENST ID: ENST00000326044
  CDS Start-End: 196-468
tttccggcgctggctcctctccgtcagtgcggtttcgcctttatggtggtggagtctgcccaggctgtggaccgcaaataaccctgtacaaagaggaatggagattgcctctatccacctagattcataagctggcctgaggtgatcttggcatcaaggaagggatgcacatcatcacaccatcagcttcagagaatggcagccatttatttgtcccgtgggtttttttccagggaaccaatctgcccttttgaagaaaagacaaaggtagaaaggatggtggaggactacctggcaagtggttatcaggattcagtgacgtttgatgatgtggctgtggacttcaccccagaggagtgggctttactggacacaactgagaaatacctctacagagatgtgatgctggagaactacatgaacctggcctctgtggacaagaggctacagtggatggaaactctgtgactgtaagaattgtggagaggtcttcagggaacagttttgccttaagacacacatgagagttcagaatggagggaatacttctgagggtaattgttatggaaaagacaccctcagtgtgcacaaggaagcctctactggacaggaactttccaaatttaatccatgtggaaaagtctttactctaactccaggtcttgctgtacatcttgaagttctcaatgcaagacaaccctacaaatgtaaggaatgtggaaaaggctttaagtattttgcaagccttgataatcatatgggaatccacactgatgagaaactctgtgaatttcaggaatatgggagagctgtcacagcttcttcacacctaaagcagtgtgtagcagttcatacaggaaagaaatccaaaaagactaagaaatgtgggaaatccttcactaatttttctcaactttatgcacctgtgaaaactcataaaggagagaagtcctttgaatgtaaagaatgtggaagatcctttagaaattcctcatgccttaatgatcacattcaaattcacactggaataaaaccacacaagtgtacttactgtgggaaagccttcactagatcaactcaacttactgaacatgtaagaactcacactggaataaaaccctatgaatgtaaggaatgtggccaagcctttgctcagtactcgggcctttctatacacatacgaagtcacagtggaaagaaaccctatcagtgtaaggaatgtgggaaagccttcactacatccacaagtcttattcagcatacaagaattcacacaggagagaagccttatgaatgtgttgaatgtgggaagaccttcattacttcttcccgtcgtagtaaacatttgaaaactcatagtggagaaaagccctttgtatgcaagatatgtgggaaagcatttctatattcctcacgccttaatgttcacctgcgaactcataccggagagaaacccttcgtatgtaaagaatgtgggaaagcatttgctgtttcctcacgcctaagtagacatgaaagaattcacactggggagaaaccctatgaatgcaaggatatgagtgttaccatttagcccatcggttgccatctttaattattggcaatgacaccaaagattatcagatttgtcctaaatgccttttggaggttgtaatgactcatggattggccttagataccatcctgagggtctgaaattaaacctacaggttctgaatacaacatcatggttgcctgagtctgggcatctgtgaagaagggtcatggatggtgaggtcagtactgcaggctgcctcaccttggtgattagattcctaagatcatagcattaacaagttgtgtatgagataaatcatgcagattgaccccagcccctgttggttagtggctgccagtgtggcacatttatgtcaaaatttaccagaagccaagatgatgtaggaccccaaaggtgggttgttaagagatgctcctccaagggtctcttctgatcccacggatcctgcagagcgtgtca

SEQ ID NO: 202948 - DNA, 578 bp, Homo sapiens
  Payload ID: 20025
  Gene Name: zinc finger protein 561
  ENST ID: ENST00000444519
  CDS Start-End: 197-382
ttttccggcgctggctcctctccgtcagtgcggtttcgcctttatggtggtggagtctgcccaggctgtggaccgcaaataaccctgtacaaagaggaatggagattgcctctatccacctagattcataagctggcctgaggtgatcttggcatcaaggaagggatgcacatcatcacaccatcagcttcagagaatggcagccatttatttgtcccgtgggtttttttccagggaaccaatctgcccttttgaagaaaagacaaaggtagaaaggatggtggaggactacctggcaagtggttatcagcatttatcaggtatctgcagtgtgctgaggagtgtgctgcatagacaccaatgggacaggaagagctcctagcctggttgtgctgagatcaagcgtaagcagtgtgcagtggctcatgcctgtaattccagctactcaggagacagaggattcagtgacgtttgatgatgtggctgtggacttcaccccagaggagtgggctttactggacacaactgagaaatacctctacagagatgtgatgctggagaactacatgaacctggcc

SEQ ID NO: 202949 - DNA, 1031 bp, Homo sapiens
  Payload ID: 20025
  Gene Name: zinc finger protein 561
  ENST ID: ENST00000444611
  CDS Start-End: 169-1031
atcttttccggcgctggctcctctccgtcagtgcggtttcgcctttatggtggtggagtctgcccaggctgtggaccgcaaataaccctgtacaaagaggaatggagattgcctctatccacctagattcataagctggcctgaggtgatcttggcatcaaggaagggatgcacatcatcacaccatcagcttcagagaatggcagccatttatttgtcccgtgggaaccaatctgcccttttgaagaaaagacaaaggtagaaaggatggtggaggactacctggcaagtggttatcaggattcagtgacgtttgatgatgtggctgtggacttcaccccagaggagtgggctttactggacacaactgagaaatacctctacagagatgtgatgctggagaactacatgaacctggcctctgtggaatgggaaatacaacctagaaccaaacggtcatcacttcagcagggttttttgaagaatcaaatattcagtgggatacaaatgacaagaggctacagtggatggaaactctgtgactgtaagaattgtggagaggtcttcagggaacagttttgccttaagacacacatgagagttcagaatggagggaatacttctgagggtaattgttatggaaaagacaccctcagtgtgcacaaggaagcctctactggacaggaactttccaaatttaatccatgtggaaaagtctttactctaactccaggtcttgctgtacatcttgaagttctcaatgcaagacaaccctacaaatgtaaggaatgtggaaaaggctttaagtattttgcaagccttgataatcatatgggaatccacactgatgagaaactctgtgaatttcaggaatatgggagagctgtcacagcttcttcacacctaaagcagtgtgtagcagttcatacaggaaagaaatccaaaaagactaagaaatgtgggaaatccttcactaatttttctcaactttatgcacctgtgaaaactcataaaggagagaagtcctttga

SEQ ID NO: 202950 - DNA, 4419 bp, Homo sapiens
  Payload ID: 20025
  Gene Name: zinc finger protein 561
  ENST ID: ENST00000424629
  CDS Start-End: 292-1545
gtcagtgcggtttcgcctttatggtggtggagtctgcccaggctgtggaccgcaaataaccctgtacaaagaggaatggagattgcctctatccacctagattcataagctggcctgaggtgatcttggcatcaaggaagggatgcacatcatcacaccatcagcttcagagaatggcagccatttatttgtcccgtggattcagtgacgtttgatgatgtggctgtggacttcaccccagaggagtgggctttactggacacaactgagaaatacctctacagagatgtgatgctggagaactacatgaacctggcctctgtggaatgggaaatacaacctagaaccaaacggtcatcacttcagcagggttttttgaagaatcaaatattcagtgggatacaaatgacaagaggctacagtggatggaaactctgtgactgtaagaattgtggagaggtcttcagggaacagttttgccttaagacacacatgagagttcagaatggagggaatacttctgagggtaattgttatggaaaagacaccctcagtgtgcacaaggaagcctctactggacaggaactttccaaatttaatccatgtggaaaagtctttactctaactccaggtcttgctgtacatcttgaagttctcaatgcaagacaaccctacaaatgtaaggaatgtggaaaaggctttaagtattttgcaagccttgataatcatatgggaatccacactgatgagaaactctgtgaatttcaggaatatgggagagctgtcacagcttcttcacacctaaagcagtgtgtagcagttcatacaggaaagaaatccaaaaagactaagaaatgtgggaaatccttcactaatttttctcaactttatgcacctgtgaaaactcataaaggagagaagtcctttgaatgtaaagaatgtggaagatcctttagaaattcctcatgccttaatgatcacattcaaattcacactggaataaaaccacacaagtgtacttactgtgggaaagccttcactagatcaactcaacttactgaacatgtaagaactcacactggaataaaaccctatgaatgtaaggaatgtggccaagcctttgctcagtactcgggcctttctatacacatacgaagtcacagtggaaagaaaccctatcagtgtaaggaatgtgggaaagccttcactacatccacaagtcttattcagcatacaagaattcacacaggagagaagccttatgaatgtgttgaatgtgggaagaccttcattacttcttcccgtcgtagtaaacatttgaaaactcatagtggagaaaagccctttgtatgcaagatatgtgggaaagcatttctatattcctcacgccttaatgttcacctgcgaactcataccggagagaaacccttcgtatgtaaagaatgtgggaaagcatttgctgtttcctcacgcctaagtagacatgaaagaattcacactggggagaaaccctatgaatgcaaggatatgagtgttaccatttagcccatcggttgccatctttaattattggcaatgacaccaaagattatcagatttgtcctaaatgccttttggaggttgtaatgactcatggattggccttagataccatcctgagggtctgaaattaaacctacaggttctgaatacaacatcatggttgcctgagtctgggcatctgtgaagaagggtcatggatggtgaggtcagtactgcaggctgcctcaccttggtgattagattcctaagatcatagcattaacaagttgtgtatgagataaatcatgcagattgaccccagcccctgttggttagtggctgccagtgtggcacatttatgtcaaaatttaccagaagccaagatgatgtaggaccccaaaggtgggttgttaagagatgctcctccaagggtctcttctgatcccacggatcctgcagagcgtgtcaggaatgaaaccatccataactgccagtgccctttcacagctgattatttctgtgtccccttgtaaaatctaagaagtgtgacagccttgcctgttctgccttgtatgtctattttagatggcacaatgtaagtggcaatgtctcttctagtataatccagtctctcttctcacttctgtcaaggtggctgatatagtccatgaatcccactcatgatctctttatcagatgatcgttcagccacactttgaggattctcttcagtacaagttttctaatttttgcattatggataggctgagaattttccaaatctccaagttctggttcctttttccttaacaattttttctgcaattcaggtctccttttgcatttttgctgagaccagctgggtcatggagaccctgacccagcagctctagaggaattaagacaaagacacagaaatagagtgcagagtgggaatcggggctcacagccttcagagctgagagccttgaacagagtttgacccacatatttattgacagtaagcctgtgataaacattatttctatagattatagattagctaaaagtattccttacaagaaagaaagggacaggctctggcttgttatctgcaacaggaacatgtccttaaggcacaaatcactcatggtattgtttgtggtttaggaatgcctgagcagttttccagttttccaccgtgggtgggccaggtgttccttgccctcattcgggtaaaccagcaacctccagcatgggtgtcatagccatcacgagcatgtcacagtgccgcagagattttgtttatgggcagtttctcatggcctgtttatgtccaaatttggggggcctgttctgagcacattttcctgtaagcactcaggaagaatgaagcttcctgtgtcctttaacactttaagtacagatcttagtgatacataaccagttttatctctctcaagctctaccttccgcaaagtgctagaatacagttctgccaagttcttcactacttcgtatcaagggttgtattttctttatttcccaatagcatgttcctcattccccaatgacacctcaccaggatcacccttaccaaccttacttccagcttgcacatcagaatttttccagcctcatttgtcagtttcaaatctgcttcacatttttagtttttttgtttgtttgtttttaatctgccttaatgagctcaggccactatcacaaaataccacagaccaaatggcttacaaatttgttaattttaaataaatgaggttaaaaacaaatttatattctcacatttctcgaggctggaagtctgagatcagagtgccagcatggtcaacttctggcgagagctctcttcctggtatgtaaatgcccacttcctcatgtcttcacaggaaggaaaccaacaaataggtctctctctcctctctcctttctcctctctcctctctcctctttctctctctctccccaccatctctctccttcccctccctccccctccctccccctacccatctcttgacatcatttcacgatacttctaaagagcctattttcaggccgggcgcggtggctcacacctgtaatcccagcactttgggaggccgaggtgggcggatcacgaggtcaggagatcgagactgtcctagttaacacggtgaaaccctgtctctactacaaatacaaaaaattagcctggcgtggtggcgggtacctgcagtcccagctactcgggaggctgaggcaggagaatggcatgaacctgggaggcacaggttgcagtgagccgagatcgcagccactgcattccagcctggacaacagagcgagactctgtctcaaaaacaaaactaaaaaaccctattttcacatacagtcacattgggatttggagcttcaacatatgaattttcagggttatcattcagtccaaagtacttaatatgattcttttccgtttccacatagacaatcacataatctgtaaataatgactcttacttttccactttagtcgttaggttatacctatatatatattttcttgctttactggactaatttcaacctccagcacaccaccaatgaatagcagtaataccagcataattgtctgcagttctgctgagatacgtgctctattttattggcttggctgtaggtttttattttattttttgaagaggctaatctcttacaggaaaggtttctttttatatccagtttttacatgatgaatgatttcccagtatttcataattcatgaggctgaattcctcttgaatttattaaatgcttcctgtgcatcctctgtgatgatcatgtttatttactgctagaactcaagtacctagaactgttcctggccaatgatggtatgtaataaatacttcaatgaaatga

SEQ ID NO: 202951 - DNA, 561 bp, Homo sapiens
  Payload ID: 20025
  Gene Name: zinc finger protein 561
  ENST ID: ENST00000421525
  CDS Start-End: 334-561
atcttttccggcgctggctcctctccgtcagtgcggtttcgcctttatggtggtggagtctgcccaggctgtgggactatcagtcctccctgtgcgtccagttcggagaggctgcgcgctctctcggctcactgcaacctctgcaacctctgcctccagggtcaagcagttctcctgcctcagccttccgagtacctgggattacaggaccgcaaataaccctgtacaaagaggaatggagattgcctctatccacctagattcataagctggcctgaggtgatcttggcatcaaggaagggatgcacatcatcacaccatcagcttcagagaatggcagccatttatttgtcccgtgggtttttttccagggaaccaatctgcccttttgaagaaaagacaaaggtagaaaggatggtggaggactacctggcaagtggttatcaggattcagtgacgtttgatgatgtggctgtggacttcaccccagaggagtgggctttactggacacaactgagaaatacctctacagagatgtgatgctggagaactacatgaac

SEQ ID NO: 202952 - DNA, 912 bp, Homo sapiens
  Payload ID: 20025
  Gene Name: zinc finger protein 561
  ENST ID: ENST00000444802
  CDS Start-End: 198-329
cttttccggcgctggctcctctccgtcagtgcggtttcgcctttatggtggtggagtctgcccaggctgtggaccgcaaataaccctgtacaaagaggaatggagattgcctctatccacctagattcataagctggcctgaggtgatcttggcatcaaggaagggatgcacatcatcacaccatcagcttcagagaatggcagccatttatttgtcccgtgggtttttttccagggaaccaatctgcccttttgaagaaaagacaaaggtagaaaggatggtggaggactacctggcaagtggttatcaggtatctgcagtgtgctgaggagtgtgctgcatagacaccaatgggacaggaagagctcctagcctggttgtgctgagatcaagcgtaagcagtgtgcagtggctcatgcctgtaattccagctactcaggagacagaggattcagtgacgtttgatgatgtggctgtggacttcaccccagaggagtgggctttactggacacaactgagaaatacctctacagagatgtgatgctggagaactacatgaacctggcctctgtggaatgggaaatacaacctagaaccaaacggtcatcacttcagcagggttttttgaagaatcaaatattcagtgggatacaaatgatttcttccattggctcctgaacctggttggatggactgacagaagagtgttcttgaagcccccagagtgactctccccacctgaaagtagggactcagccctatccagagttgcagagggccagagaattgactgctgtctggcgaggctgccgtctatcccccactgcattctctagtccgtcagagcagagggtttcatctgtcctccactgaggctgcagttttacccctgagaacaggtgaatgttcc

SEQ ID NO: 202953 - DNA, 956 bp, Homo sapiens
  Payload ID: 20025
  Gene Name: zinc finger protein 561
  ENST ID: ENST00000443819
  CDS Start-End: 197-313
ttttccggcgctggctcctctccgtcagtgcggtttcgcctttatggtggtggagtctgcccaggctgtggaccgcaaataaccctgtacaaagaggaatggagattgcctctatccacctagattcataagctggcctgaggtgatcttggcatcaaggaagggatgcacatcatcacaccatcagcttcagagaatggcagccatttatttgtcccgtgggtttttttccagggaaccaatctgcccttttgaagaaaagacaaaggtagaaaggatggtggaggactacctggcaagtggttatcagtgaatattggtggaagtgttcattggctcaaaccagcatgtgtatgatgacataggattcagtgacgtttgatgatgtggctgtggacttcaccccagaggagtgggctttactggacacaactgagaaatacctctacagagatgtgatgctggagaactacatgaacctggcctctgtggaatgggaaatacaacctagaaccaaacggtcatcacttcagcagggttttttgaagaatcaaatattcagtgggatacaaatgacaagaggctacagtggatggaaactctgtgactgtaagaattgtggagaggtcttcagggaacagttttgccttaagacacacatgagagttcagaatggagggaatacttctgagggtaattgttatggaaaagacaccctcagtgtgcacaaggaagcctctactggacaggaactttccaaatttaatccatgtggaaaagtctttactctaactccaggtcttgctgtacatcttgaagttctcaatgcaagacaaccctacaaatgtaaggaatgtggaaaaggctttaagtattttgcaagccttgataatcatatgggaatccacactgatgagaaactctgtgaatttcaggaatatgggagagctgtcaca

SEQ ID NO: 202954 - DNA, 659 bp, Homo sapiens
  Payload ID: 20025
  Gene Name: zinc finger protein 561
  ENST ID: ENST00000457965
  CDS Start-End: 236-367
gctggctcctctccgtcagtgcggtttcgcctttatggtggtggagtctgcccaggctgtgggtcaagcagttctcctgcctcagccttccgagtacctgggattacaggaccgcaaataaccctgtacaaagaggaatggagattgcctctatccacctagattcataagctggcctgaggtgatcttggcatcaaggaagggatgcacatcatcacaccatcagcttcagagaatggcagccatttatttgtcccgtgggtttttttccagggaaccaatctgcccttttgaagaaaagacaaaggtagaaaggatggtggaggactacctggcaagtggttatcaggtatctgcagtgtgctgaggagtgtgctgcatagacaccaatgggacaggaagagctcctagcctggttgtgctgagatcaagcgtaagcagtgtgcagtggctcatgcctgtaattccagctactcaggagacagaggattcagtgacgtttgatgatgtggctgtggacttcaccccagaggagtgggctttactggacacaactgagaaatacctctacagagatgtgatgctggagaactacatgaacctggcctctgtggaatgggaaatacaacctagaaccaaacggtcatcacttcagcagg

SEQ ID NO: 202955 - DNA, 566 bp, Homo sapiens
  Payload ID: 20025
  Gene Name: zinc finger protein 561
  ENST ID: ENST00000435550
  CDS Start-End: 443-566
ttttccggcgctggctcctctccgtcagtgcggtttcgcctttatggtggtggagtctgcccaggctgtggtgagttccacctccttggcggtcccggggatagcagggggcggcaaaggaatgattgcgcgctgtcgcctaggagcctctcagatccgcttcacttcactcgcttctccagggactatcagtcctccctgtgcgtccagttcggagaggctgcgcgctctctcggctcactgcaacctctgcaacctctgcctccagggtcaagcagttctcctgcctcagccttccgagtacctgggattacaggaccgcaaataaccctgtacaaagaggaatggagattgcctctatccacctagattcataagctggcctgaggtgatcttggcatcaaggaagggatgcacatcatcacaccatcagcttcagagaatggcagccatttatttgtcccgtgggtttttttccagggaaccaatctgcccttttgaagaaaagacaaaggtagaaaggatggtggaggactacctggcaagtggttatcaggattcagtga

SEQ ID NO: 202956 - DNA, 12380 bp, Homo sapiens
  Payload ID: 20026
  Gene Name: zinc finger protein 562
  Uniprot ID: Q6V9R5
  ENST ID: ENST00000293648
  CDS Start-End: 175-1239
cagtgccgtttaacctttattgtggtggagtccaccccgctgtgggcctcagataaccctgtacaaaggggaatggagattgcctgtatccacctagattcataagctgccctgaggcgatcttggcatcaagaaagacagcattgaggcacatctcaccatcagcttcagaggatgtcagcctttgatatgtcccatgatttctttttctgcttaacttcagaatgggaaatacaacctagaaccaaacggtcatcacttcagcagggttttttgaagaatcaaatattcactgggatacaaatgcagacaagaagctacagtggatggaaactctgtgagaattgtggagaggtcttcagtgaacagttttgccttaagacacacatgagagctcagaatggagggaacacttttgagggtaattgttatggaaaagacagcatcagtgtgcacaaggaagcctctattggacaagaactttccaaatttaatccatgtggaaaagtcttcaccttaactccaggccttgctgtgcatcttgaaattctcaatggaagacaaccctacaaatgtaaggaatgtggaaaaggctttaagtattttgcaagccttgataatcacatgggaatccacattggagagaaactctgtgaatttcaggaatgtgagagagccatcacaacttcctcacacttaaagcagtgtgtagcagttcatactggaaagaaatccgaaaagactaagaactgtgggaaatccttcactaatttttctcaactttctgcacatgcaaaaactcataaaggagagaagtcctttgaatgtaaagaatgtggaagatcctttagaaattcctcatcctttaatgttcacattcaaattcacactggaataaaaccacacaaatgtacggaatgtgggaaagccttcactagatcaactcaccttactcaacatgtaagaactcacactggaataaaaccctatgaatgtaaggaatgtggccaagccttcactcagtacacgggccttgctatacacatacgaaatcacactggagagaaaccctatcagtgtaaggaatgtgggaaagccttcaatagatcttcaacgcttactcaacatagaagaattcacacaggagagaagccttatgaatgtgttgaatgtgggaagaccttcattacttcttcccatcgtagtaaacatttgaaaactcacagtggagaaaggtaaatgcaagatatgtgggaaagaatttctgtattcctcaccccacctgtgaactcctaccagagagaaaccttttgtatgtaaagaatttgggaaagcatttgctctttcctcatgcctaagtatgcatgaaagaattcacactggggagaaatactatgaatgtaaggatatgagtgttgttaccatttagcccattggttgccatctttaattattggcagtgcaaagatcatcagattagtcctaaatgccttttggaggttgtaatggctcacagattggccttagatgcatcccgagggtctgaaattaaacctacaggttctgaatacaacatcatggttacctgagtctgggcatctgtgaagaagggtcatggatggtgaggtcagtactgcaggctgcctcaccttggtgattagattcctaagatcatagcattaacaagttctgtacgagataaatcatgcagattgatcccagcccctgttggttagtggctgccagtgtggcacattcatgtcaaaatttaccagaagccaagatgatgtaggccccagaggtggattgttaaaaagatgctcctccaaggttctcttctgttcccatggatcctgcagagcatgtcaggagtgaaaccatccataactgccagtgccctttcacagctgattatttctatgtccccttcttgtaaaataagaagtgtgacaaccttgactgttctgttctgtcttctctgtccattttaggtggcacaatgtaagtggcagtgtctcttatagtataatccagtctctcttctcacttctgttaagatggctgatatagtccatgaatcccactcatgatctctttatcaaatgattgttcagccacactttgaggattctcttcagtacaagttttctaatttttgcagtatggataggctgagaattttccaaatctccaagttctggttcctttttccttaacaatttcttctgcaattcaggtctccttttgcatttttgccgagaccagctgggtcgtggagaccctaacccagtggctctagaggaattaagacaaagacacagaaatatagtgcagagtgggaatcggggctcacagccttcagagctgagcttgaacagagtttgacccacatatttattgacagtaagcctgtgataaacattattcctatagattgtagatcagctataagtattccttatgagaaagaaagggacaggctctggcttgttatctgcaacaggaatatgtccttaaggcacaaatcactcatgctattgtttgtggtttaggaatgccttgagcagttttccagttttctgccctgggtgggccaggtgttgcttgccctcattctggtaaaccagcagcctccagcatgggcgtcatagccatcacgagcatgtcacagtgctgcagagattttgtttatggccagtttctcattgcctgtttatggccagatttggggggcctgttcccagcacattttcctgtaagcactcaggaataatgaagcttcctgtgtcctttaacactttaattacagatcttagtgatacataccattttatctgtctcaagctctaccttccgtaaaatgctagaatacagttctgccaagttcttcaccactttatatcaagggttgtcttttcttcatttcccaatagcatgttcctcattccccaatgacacctcaccagaataacccttaccaaccttatttccagcttgcacatcagaatttttccagcctctactcatttgtcagtttcaaagctgcttcacatttttagtttttttgtttgtttttaattgcagtacctcacttctcagtaccaatatctgccttagtcagctcagacaaccataagagaataccgcagaccaaatggcttagaaattaatttaattttaaatcaatgaggttaaaaacacaggattttttttttttttttttttttttttttgagatggagttttgctcttgttgcccaggctggagtgcaatggtatgatcttggctcaccgcaacctccacctcctgagttccagtgattctcctgcctcaccctcagtagctgggattattggcatgcaccacaaaccttagctaagtttgtatttttagtagagacagggtttctccatgttggttaggctgatctccatgttggtcagatctgacctttggtgatccacctgccttggcctcccaaagtgctgggattacaggcctgagccaccgtatctggcccaaaacacaaatttatattctcacatatctggaggctggaagtctgagatcagagtgccagcatggtcaacctctagtgagagctctcttcctggcatgtaagtgcccacttcctcatgttttcacacgatggagaccaacaaataggtcggtcggtctcccccctccccgcccccttctcttttcacatacagtcacattgaggtttggaacttcatatgaaatttggggggtcactgtgtgtgtgtgtgtgtgtgtgtgtatgtgtatatatatatacatatatatacacatatgtatgtatacctaactcctaaagtggaacagtaagagtcattatttatagattatctgattctctatgtggaaagagaaaagaatcatattaagtactttggactgaacaatgacccccaaaattcgtatgatgatgaagctctctctaaatattttcttgctttactggactgattttaacccgctgcacaacaccaactaaaagtagtaataccagcatacttgtctttgcagttctggtgagatatgcactctattttgttggtttggctgtaggcttttatttcttttttattttttgaagaggttatgtcctgtcagggaaccagccccgatattcacataggttcttttctattttccctaagtgtcagccaacttgagaaataaagggacagagtacaaaagagagaaattttaaagctgggtgtccggggcagacatcacatgtcggtaggttccgtgatgccccacaagccgcaaaaaccagcaagtttttattagggattttcaaaaggggagggagtgtgcaaataggtgtgggtcacagacatcaagtactttacaaggtaatagaatatcacaaggcaagtggaggcagggcgagatcacaggaccaaggtgaaattaaaattgctaatgaagttttgggcaccattgtcattgataacatcttatcaggagacggttttgagatcaactggtctgactaaaatttattaggtgggaatttcctcttcctaataagcctgggagtgctatgggagactggggtctatttcacccctgcagtctcgaccataagagatggctacacccaggggggccagttcagagacccactcccaggtgtgcattctctttctcaaggatgttccttgctgagaaaaagaattcagtgatatttctcccatttgcttgtgaaagaagagaaatgtggctttgttccacctggctcaccggcggtcagaatttaaggttatctctcttgtttcctaaacattgctgttatcctgttcttttttcaaggtgcccagatttcatattgctcaaacacacatgctgtataatttgtgcagttaatgcaattattacagggtcctgaggtaatatacatcctcctcagctgacaggattgagagattaaagtaaagacaggcataggaaatcacaagggtattgactggggaagtgataagtgtccatgaaatctttacaatttatgtttagagattgcagtaaagacaggcataagaaattataaaagtattaatttggggaactaataaatgtccatgaaaccttcacaatccatgtttttctgccatggcttcagccagtccccccgtttggggtccctgacttcctgcaacaatgtcctgcaggaaaagttttttctttatatccagtttttacatgatgaattatttcccaatatttcatagtttatgaggctgaattcctcttgaatttattaaatgcttccttcacatcctctgtgatgatcatgtttatttactgataaaactcaatacctagaactgcacctagctcatgatggtacctaataaatacttcaatgaaatgatgtggtgatgcatgcctatagttttagctacttgggagggtggcctgagcccaggggttctagaccagcttaggcaacatagcaagaccccatctcaaaaaaaaaaacaaaaacaaaacaaaaaaaaaacttgaagaagtgaatgcatggaaaggcgcttttctaaaacaaatgtggtcaggctgggtgtgggggcttatgcctgtaatcccagcaatttgggaggtgggggtgggcagatcatttgaggtcaagagttcgagaccagcccagccaacatggtgaaaccccatctctactaacaatacaaaaattagctgggtgtggtgatgtgcacctgtaatcccagctacttgggaggctgaagcaggagaatcacttgaacctgggaggtggaggttgcattgagccaagattgcaccactgcactccatgctgggtgacagggtgcgactctgtcaaaaataaataaattaaattaaataaatgtggtatttgtatttattgcttttccaatgttacatcaaccttgtattcctggataagctcgactgtgacataatggatcacttaaaaatacttcatgacctttactaatatgttatggagctatgtttgaataacattgtgatttttaaaaaattgtcccttaatgatatttgtatataatgactgtcatatactgtagtggggcatgttcctactatttctaaattcttaatctataagagtcatctaggttgggaatagtggctcaggcctgtaatcccagcacttttggaggctgaggcaaaaagatcccttgagccaaggagttcaaaccagcctgggcaacatagcgaaaccacatctctatttaaaaatactacaagatattttcatttttttggtttgtttctttgtttttgagttggtgtttgtttctttgtttttgagttagtgtttcactcgttgcccaggctggagtgcaatggtgtgatctcaacttactgcaaattccacctcctgggttccagtggttctcctgcctcagcctcccgagtagctgagattacagacagcctccaccttgcctggctgatttttgtatttttagtagagacggtttcatcaagttggccaggctggtctcaaactcctgacctcaggtgatctgcatgcctcatactcccaaagtactgggattacaggcacaagccactgtgcccggccaatactgcaaaatattttaaaaagttaaaattatctcttctggctggtcatagtggctcacacttttaatcccagcacactgggaagctcagtcagaaggattccttgaggccaggagttcaagatcagtctgggcaacacagaccccatatctccaaaaaaataaaaataaataaataaaacagttatcaggctgggagtggtggctcatgcctgtaatcccaccactttgggaggctgaggcaggcagatcatgaggtcaagagatcaagaccatcctggccaacatgttgaaaccccgtctttactaaaaatacaaaaattagctgggcacggtattgtgcccctgtaatcccagctactcaggaggctgaggcaggagaatctcttgaacccctgaagtggaggtttcaatgagcctagatcacaccactgcactccagcctgacgacagagcgagaatccgtctcaaaaaaaaaaaaaaagacaactaggttgggcacggtgcttcacggctttaatcacagcactttgggaggtcaaggcagggggtcacctgaggtcaggagttcgagaccagcctggccaatgcggtgaaacttttgtctctactaaaaattcaaaaaataaaattagccaggtgagttggcgggcgcctgtaatcccagccgcttgggaggctgaggcaggagaattgcttgaatctgggaggcgaaggttgcagtgagttgagttcttgccactgcactccagcctgggtgacaagagcaaaactccatctcataaaaaaaaaaaaaaaaagacaactaaggcttgcataagtattttgagaatattcttctaggcatgtttttatttccaaatgtgtagcaaaaatttatactttttatatttttcatttttgctggttgtataacttcagtctccttttgcattctggaataacttattaattgtgcattctttccctttgcttgtgttaatcttggtagagagtacccaggtttatgaattctttcagatatttcgcttgaaaaatctacactatttcttgcatgttttctgttccactaattctgttagatatttatatagttacatcagcttgattttcctctacttcttagtctttctgtatgctttttaaaaaaatgtgtctttttatacatactttagctggagttttaaaaaatctgtataccgctgggcatagtggctgatgtctgtaatcacagcactttgggaggccaaggcaggtgatcacctgaggtcgggagttcgagaccagcctgaccaacactgagaaaccccatctctactaaaaatacaaaattagctgtgcctagtggtgcatgcctgtaatgccagctacttgggaggctgaggcaggagaatcatttgaacccgggaggcagaggttgcagtgagccgagatcacgccattgcactgcagcctgggcaacaagagtgaaactctgtcacaaaaaaaaaaaaaaaaagaaaaaatacttgaataataccaattaacaatccttttatgttgcacatttagtgcctgacatttaattagtaataatttggattaatttctagcatctaattttttttgtttgtttcattgtgttcccctctttgtactgatgtgtattgatcatacctttaatttattttattcttgatgtttgaaatttgtatgttacttttcgttgttaccataaataacaattttaaatataagtcttccttaataccttttctttctaactaagtgcactacactgtttgaataaagtgattcccatatacacttactacacttggagagagacccagaaggaagtgcattgtcacacaagctattagacagatctggtggcagaaagaataggctccttgacagaggcccagtgacaccctgtggtagattacagatgtcttgagattactctctgaaggtgcaatctctctcctttttatgtgagccagtccttgctttgaccagtagaaaccagcacaactttggtttgcaagtccatcctcaagaggcttctgctaattaagtagctgctgttttcagctagtaatttttgtggctgtttattacacagtaaaggccaactgatacacatacccctttgcccacaagccaataaactgtggttcttcaggacccactgggaaatcctccagaaccaggcccactcgtgttagcagtaaagaattctgggccaggcacagtggctcatgcctttaaacccagcactttgggaggctgagatggttggatcacgaggccaagagattgagaccattttgggcaacatggtgaacccccatctctactaaaaatacaaaaattagctgggtgtggtggcactcacctgtagtcccagctacttgggggctgagatgggagaatcacttcaacctgggaggtggaggttacagtgagctgatattgcgccacggcactccagcctggtgacagtgtgagactctgtctcaaaaaaaaaaaaaaaattctgtcaatgttcacagagagactgggcatctcccactatgagctgcaatgagaaaatcaagatttgaattcgtattcctctgcttagggactcaggaggccggaagtcagcaggactgaaggcccaaagaaacagttgatgttatgagctgcaagcaagttgccagctgatatggtttggctgtgtccccacccaaatgtcatcttgaattgtagctcccataatccccatggtgtcgagggagagaccaggtgggaggtaatagaatcatgggggggggtttccccatgctgttcaagtaattctcatgcctcagtcagccaagtagctgggataataggcgtgtgctgtttttgtcacagtgagtaaatctcatgaggtctgtcagttttataagcagctgttcccctggacaggctctcttgccttctgccatataagatgtgcctttgctcctccttcaccttctgtcatgattttgaggcctccccagccatgtggaactgtgagtccattaaacctctttttcttcataacttacccagtctcggccaggcacggtggctcacactgtaacaacaacaaggaacacagcacctaaactcacacttttttattttggtagagaaggtatctcactccattgcccaggctgtcctcaaactcctgagctagagtaatcctctcttctgggcctcccaaagtgctgggattacaagcatgagccaccatgcccagccagacatctttacatgacattttcaaggtccaattggtcctaattctccataaatcctttcagagtattaacaatgaagcaaatcttgctaaatctttttatgatgcagtacaagatgtatatatgtatcgtttttatcactgataaaaacagtacagtcattaaaaactacagaattatattggtaatgaatattggtacaaattcactaagtaagccaggtacggtggctcacatgcctgtaatcccagcactttgggaggctgaggcaggtggatcacaaggtcagattgagatgatcctggctaaaacggtgaaaccttgtatctactaaaactaaaaaaatatagctgggcgtggtggcatgtgcatgtattcctagctactcgggaggctgaggcaggaggttacagtgaaccgagatcacaccactgcactccagcctgggatacagagtaagactgtctcaaaaaacaaacaaacaaaaaaatgcgctaagtataatagtagcaactgggcaaagtggcttatgcctggagtctcaacactttgaaaggaggcaaaaggattacttgagctcaggagttcgagacctgcctggacagcatagcaagccccccatctacaaaaaacttaaaaattaaaaaatgcagtgagccaagatcatgccactgcattccagcctgggcaacagagcaagactccatttaaaaaaaaaaaaaaaagaaggaaaaaaggaagctaggaaggaacggattagcaaataaattccaactgcttgataagaaaatagtaaacccagtggcatttactgcaggaatataaggttggctctggctcattcgtatctttgtatttgtgcattcatcattatggatgatgcctggaatttgcccagagggatgctcaagaccctttcagacacattttttttttctaaacttatttatttatgaatgacagagtctcgctctgtcacccaggctggagtgcagtggcgtgatctcagctcactgcaacctccaattcctgggttcaagtgattctcctgcctcagcctcccaagtacctgggattacaggtgtgcaccaccacacccagctaatttttgtattttcagtagaggcggggttttgccatgttggccaggatggtcttgaactcctgagacccccctgattcagcctgattcaacctcccaaagtgctgggattacaggaatgagccacagtggccggtggtgttctttttttttttttttttttccagagacagtgtcttgccatgtcacctaggctggagtgcagtggtgcaatcatagctcactgcagcctcgacctcctgggctcaagcaatcctctcacctcagccttctgagtagctgggaatgcaggcatgtaccaccaggcccggctaatttttttatttttaaatttttttttttttggtcgagactgtgtctcactatattgcccaggctggtcttgaaatcctgttcaagttatccttctgcatcagcctcccaaaatgctaggatgacagggttgagccactgtgcctggcctctatttctaatgtctaggcagcaactgttgttgtgttgttcctgttacatagtcttattacccatttgatacaaagttcagattgattgttcctgttcgtattccattttgggttttccctctatctttgttgattttttaaaaaattaaatatgtaaaagaataaagggccaagcagagtggctcacagttgtaatgccaacaatgtgggaggccaaggaaggatgatcgcttgagctcaggagtttgagggcagcctaggcaacatagagagatctcttctctacaaaatatatttttaaaaattagctggatgtggtggtgcacgtatgtagtccctggtactcaggcaaaggactgcttgagcccaggaagtaaaggctgcagtgagccatgataatgccactatacttcagcctgtgtgacagagtgaaaccctgtttttttttttttttttaaagaaaaaaaagaatgtaattttaaacatcagaactgtaaggtactctgagctggccataccatggtcaagccattgtgacatccccccgcccttgtgataatgtactttgtgatattcccctgcccttgtgaatgtactttataagatacatcctcccccacctagtgaatgtaccctgccattggcccttgtgacagtacacctttcctctccttgtaaatgtactttgtaaccttcctccccacccttgtgatgatacaccctccccgcccttgtgaatgtactttgtaacatcctccccgcccttgagaatgtactttgtaacgtccaccccactgcctacaaaaaaaattgctcctaactccaccgcttatcccaaacctatgagaactaatgataatcccaccaccctttgctgactgttttgttggacagcccatccacatccggatgtaatacacagccattgttgctcgc

SEQ ID NO: 202957 - DNA, 2111 bp, Homo sapiens
  Payload ID: 20026
  Gene Name: zinc finger protein 562
  Uniprot ID: Q6V9R5
  ENST ID: ENST00000453372
  CDS Start-End: 161-1441
ctttattgtggtggagtccaccccgctgtgggcctcagataaccctgtacaaaggggaatggagattgcctgtatccacctagattcataagctgccctgaggcgatcttggcatcaagaaagacagcattgaggcacatctcaccatcagcttcagaggatgtcagcctttgatatgtcccatgggttttttcccagggaaccaatctgtccttttgaagaaaagacaaagataggaacgatggtagaggaccaccggtcaaattcttaccaggattcagtgacgtttgatgatgtggctgtggagttcaccccagaggagtgggctttactggacacaactcagaaatacctctacagagatgtgatgctggagaactacatgaacctggcctctgtggatttctttttctgcttaacttcagaatgggaaatacaacctagaaccaaacggtcatcacttcagcagggttttttgaagaatcaaatattcactgggatacaaatgcagacaagaagctacagtggatggaaactctgtgagaattgtggagaggtcttcagtgaacagttttgccttaagacacacatgagagctcagaatggagggaacacttttgagggtaattgttatggaaaagacagcatcagtgtgcacaaggaagcctctattggacaagaactttccaaatttaatccatgtggaaaagtcttcaccttaactccaggccttgctgtgcatcttgaaattctcaatggaagacaaccctacaaatgtaaggaatgtggaaaaggctttaagtattttgcaagccttgataatcacatgggaatccacattggagagaaactctgtgaatttcaggaatgtgagagagccatcacaacttcctcacacttaaagcagtgtgtagcagttcatactggaaagaaatccgaaaagactaagaactgtgggaaatccttcactaatttttctcaactttctgcacatgcaaaaactcataaaggagagaagtcctttgaatgtaaagaatgtggaagatcctttagaaattcctcatcctttaatgttcacattcaaattcacactggaataaaaccacacaaatgtacggaatgtgggaaagccttcactagatcaactcaccttactcaacatgtaagaactcacactggaataaaaccctatgaatgtaaggaatgtggccaagccttcactcagtacacgggccttgctatacacatacgaaatcacactggagagaaaccctatcagtgtaaggaatgtgggaaagccttcaatagatcttcaacgcttactcaacatagaagaattcacacaggagagaagccttatgaatgtgttgaatgtgggaagaccttcattacttcttcccatcgtagtaaacatttgaaaactcacagtggagaaaggtaaatgcaagatatgtgggaaagaatttctgtattcctcaccccacctgtgaactcctaccagagagaaaccttttgtatgtaaagaatttgggaaagcatttgctctttcctcatgcctaagtatgcatgaaagaattcacactggggagaaatactatgaatgtaaggatatgagtgttgttaccatttagcccattggttgccatctttaattattggcagtgcaaagatcatcagattagtcctaaatgccttttggaggttgtaatggctcacagattggccttagatgcatcccgagggtctgaaattaaacctacaggttctgaatacaacatcatggttacctgagtctgggcatctgtgaagaagggtcatggatggtgaggtcagtactgcaggctgcctcaccttggtgattagattcctaagatcatagcattaacaagttctgtacgagataaatcatgcagattgatcccagcccctgttggttagtggctgccagtgtggcacattcatgtcaaaatttaccagaagccaagatgatgtaggccccagaggtggattgttaaaaagatgctcctccaaggttctcttctgttcccatggatcctgcagagcatgtcaggagtgaaaccatccataactgccagtgccctttcacagct

SEQ ID NO: 202958 - DNA, 1712 bp, Homo sapiens
  Payload ID: 20026
  Gene Name: zinc finger protein 562
  ENST ID: ENST00000590155
  CDS Start-End: 199-1476
ttaccggctgtggctcagcatggtcagtgccgtttaacctttattgtggtggagtccaccccgctgtgggcctcagataaccctgtacaaaggggaatggagattgcctgtatccacctagattcataagctgccctgaggcgatcttggcatcaagaaagacagcattgaggcacatctcaccatcagcttcagaggatgtcagcctttgatatgtcccatgggttttttcccagggaaccaatctgtccttttgaagaaaagacaaagataggaacgatggtagaggaccaccggtcaaattcttaccaggattcagtgacgtttgatgatgtggctgtggagttcaccccagaggagtgggctttactggacacaactcagaaatacctctacagagatgtgatgctggagaactacatgaacctggcctctgtggatttctttttctgcttaacttcagaatgggaaatacaacctagaaccaaacggtcatcacttcagcagggttttttgaagaatcaaatattcactgggatacaaatgacaagaagctacagtggatggaaactctgtgagaattgtggagaggtcttcagtgaacagttttgccttaagacacacatgagagctcagaatggagggaacacttttgagggtaattgttatggaaaagacagcatcagtgtgcacaaggaagcctctattggacaagaactttccaaatttaatccatgtggaaaagtcttcaccttaactccaggccttgctgtgcatcttgaaattctcaatggaagacaaccctacaaatgtaaggaatgtggaaaaggctttaagtattttgcaagccttgataatcacatgggaatccacattggagagaaactctgtgaatttcaggaatgtgagagagccatcacaacttcctcacacttaaagcagtgtgtagcagttcatactggaaagaaatccgaaaagactaagaactgtgggaaatccttcactaatttttctcaactttctgcacatgcaaaaactcataaaggagagaagtcctttgaatgtaaagaatgtggaagatcctttagaaattcctcatcctttaatgttcacattcaaattcacactggaataaaaccacacaaatgtacggaatgtgggaaagccttcactagatcaactcaccttactcaacatgtaagaactcacactggaataaaaccctatgaatgtaaggaatgtggccaagccttcactcagtacacgggccttgctatacacatacgaaatcacactggagagaaaccctatcagtgtaaggaatgtgggaaagccttcaatagatcttcaacgcttactcaacatagaagaattcacacaggagagaagccttatgaatgtgttgaatgtgggaagaccttcattacttcttcccatcgtagtaaacatttgaaaactcacagtggagaaaggtaaatgcaagatatgtgggaaagaatttctgtattcctcaccccacctgtgaactcctaccagagagaaaccttttgtatgtaaagaatttgggaaagcatttgctctttcctcatgcctaagtatgcatgaaagaattcacactggggagaaatactatgaatgtaaggatatgagtgttgttaccatttagcccattggttgccatctttaattattggcagtgcaaagatcatcag

SEQ ID NO: 202959 - DNA, 491 bp, Homo sapiens
  Payload ID: 20026
  Gene Name: zinc finger protein 562
  ENST ID: ENST00000589542
  CDS Start-End: 144-491
accggctgtggctcagcatggtcagtgccgtttaacctttattgtggtggagtccaccccgctgtgattcataagctgccctgaggcgatcttggcatcaagaaagacagcattgaggcacatctcaccatcagcttcagaggatgtcagcctttgatatgtcccatgggttttttcccagggaaccaatctgtccttttgaagaaaagacaaagataggaacgatggtagaggaccaccggtcaaattcttaccaggattcagtgacgtttgatgatgtggctgtggagttcaccccagaggagtgggctttactggacacaactcagaaatacctctacagagatgtgatgctggagaactacatgaacctggcctctgtggatttctttttctgcttaacttcagaatgggaaatacaacctagaaccaaacggtcatcacttcagcagggttttttgaagaatcaaatattcactgggatacaaatg

SEQ ID NO: 202960 - DNA, 1475 bp, Homo sapiens
  Payload ID: 20026
  Gene Name: zinc finger protein 562
  ENST ID: ENST00000585688
  CDS Start-End: 197-328
accggctgtggctcagcatggtcagtgccgtttaacctttattgtggtggagtccaccccgctgtgggcctcagataaccctgtacaaaggggaatggagattgcctgtatccacctagattcataagctgccctgaggcgatcttggcatcaagaaagacagcattgaggcacatctcaccatcagcttcagaggatgtcagcctttgatatgtcccatgggttttttcccagggaaccaatctgtccttttgaagaaaagacaaagataggaacgatggtagaggaccaccggtcaaattcttaccagatttctttttctgcttaacttcagaatgggaaatacaacctagaaccaaacggtcatcacttcagcagggttttttgaagaatcaaatattcactgggatacaaatgacaagaagctacagtggatggaaactctgtgagaattgtggagaggtcttcagtgaacagttttgccttaagacacacatgagagctcagaatggagggaacacttttgagggtaattgttatggaaaagacagcatcagtgtgcacaaggaagcctctattggacaagaactttccaaatttaatccatgtggaaaagtcttcaccttaactccaggccttgctgtgcatcttgaaattctcaatggaagacaaccctacaaatgtaaggaatgtggaaaaggctttaagtattttgcaagccttgataatcacatgggaatccacattggagagaaactctgtgaatttcaggaatgtgagagagccatcacaacttcctcacacttaaagcagtgtgtagcagttcatactggaaagaaatccgaaaagactaagaactgtgggaaatccttcactaatttttctcaactttctgcacatgcaaaaactcataaaggagagaagtcctttgaatgtaaagaatgtggaagatcctttagaaattcctcatcctttaatgttcacattcaaattcacactggaataaaaccacacaaatgtacggaatgtgggaaagccttcactagatcaactcaccttactcaacatgtaagaactcacactggaataaaaccctatgaatgtaaggaatgtggccaagccttcactcagtacacgggccttgctatacacatacgaaatcacactggagagaaaccctatcagtgtaaggaatgtgggaaagccttcaatagatcttcaacgcttactcaacatagaagaattcacacaggagagaagccttatgaatgtgttgaatgtgggaagaccttcattacttcttcccatcgtagtaaacatttgaaaactcacagtggagaaaggtaaatgcaagatatgtgggaaagaatttctgtattcctcaccccacctgtgaactcctaccagagagaaaccttttgtatgtaaagaatttgggaaagcatttgctctttcctcatgcctaagtatgcatg

SEQ ID NO: 202961 - DNA, 585 bp, Homo sapiens
  Payload ID: 20026
  Gene Name: zinc finger protein 562
  ENST ID: ENST00000588653
  CDS Start-End: 225-585
atctttaccggctgtggctcagcatggtcagtgccgtttaacctttattgtggtggagtccaccccgctgtgggcctcagataaccctgtacaaaggggaatggagattgcctgtatccacctagattcataagctgccctgaggcgatcttggcatcaagaaagacagcattgaggcacatctcaccatcagcttcagaggatgtcagcctttgatatgtcccatggattcagtgacgtttgatgatgtggctgtggagttcaccccagaggagtgggctttactggacacaactcagaaatacctctacagagatgtgatgctggagaactacatgaacctggcctctgtggatttctttttctgcttaacttcagaatgggaaatacaacctagaaccaaacggtcatcacttcagcagggttttttgaagaatcaaatattcactgggatacaaatgcagacaagaagctacagtggatggaaactctgtgagaattgtggagaggtcttcagtgaacagttttgccttaagacacacatgagagctcagaatggagggaacacttttgagggtaattgtt

SEQ ID NO: 202962 - DNA, 583 bp, Homo sapiens
  Payload ID: 20026
  Gene Name: zinc finger protein 562
  ENST ID: ENST00000587392
  CDS Start-End: 169-444
cgtttaacctttattgtggtggagtccaccccgctgtgggcctcagataaccctgtacaaaggggaatggagattgcctgtatccacctagattcataagctgccctgaggcgatcttggcatcaagaaagacagcattgaggcacatctcaccatcagcttcagaggatgtcagcctttgatatgtcccatgggttttttcccagggaaccaatctgtccttttgaagaaaagacaaagataggaacgatggtagaggaccaccggtcaaattcttaccaggattcagtgacgtttgatgatgtggctgtggagttcaccccagaggagtgggctttactggacacaactcagaaatacctctacagagatgtgatgctggagaactacatgaacctggcctctgtggcagacaagaagctacagtggatggaaactctgtgagaattgtggagaggtcttcagtgaacagttttgccttaagacacacatgagagctcagaatggagggaacacttttgagggtaattgttatggaaaagacagcatcagtgtgcacaaggaagcctctattggacaagaa

SEQ ID NO: 202963 - DNA, 577 bp, Homo sapiens
  Payload ID: 20026
  Gene Name: zinc finger protein 562
  ENST ID: ENST00000585350
  CDS Start-End: 548-577
taacctttattgtggtggagtccaccccgctgtggtgagttctacctgcttgggggtccgggacataccagcggggcggcaaaggaaggattgggcgtggtcgcccaggagcctctcagatccgcctagtttcactcgcttttctaggggctgtcagtcctcctggtgcggcctctggccagttccgagaggccgcacagtccgtctggctgcgtcgggaagtgtgtttgttccgcctccgccgggtgttttcttgagtactttcatccgctgtgctcctctcttgaaaagcttggaaagcaacctttgggagtttttttctttccgaaaggaaaaggatttctgcccttctggtgaggttggctctggccccgcattctcccgcgtctggaacctatctcttccggcatgttcctgggcctcagataaccctgtacaaaggggaatggagattgcctgtatccacctagattcataagctgccctgaggcgatcttggcatcaagaaagacagcattgaggcacatctcaccatcagcttcagaggatgtcagcctttgatatgtcccatgggttt

SEQ ID NO: 202964 - DNA, 2754 bp, Homo sapiens
  Payload ID: 20027
  Gene Name: zinc finger protein 563
  Uniprot ID: Q8TA94
  ENST ID: ENST00000293725
  CDS Start-End: 207-1637
gccaggttcaaagagcccgcggcgtcttcacgcccctgcgctcagctctagactcagtcgctcgctgagagacgccctggaacgtctgtgtagcctcagtcgctgagagacgccctggaacgtctgtggcagcctctgtcacagtgggacccgcactggcagcgggaggcagagggaggaccctggaacatcccggaagccgggaaatggacgcagtggcctttgaggatgtggctgtgaacttcacccaggaggaatgggctttgctgggtccatcacagaagaatttatacagatatgtgatgcaagaaaccatcaggaacctggactgtataagaatgatatgggaagaacagaatactgaagatcagtacaaaaatcctaggagaaatctaagatgtcatatggtagagagattcagtgaaagtaaagacagtagtcagtgtggagaaacatttagcctcattcgagatagtattgtgaacaacagcatttgtcctggagaagatccatgtcaaagcgctgagtgtgaagaagtcataatgggtcatttatcccttaatagccacatcagagttgattctggacacaaaccacatgagtatcaggaatatggagagaagccacatacacataaacaacgtgggaaagccttcagttaccatcactcctttcagtcgcgtggaaggcctcacactggaaagaaacgctatgagtgtaaggaatgtggaaaaaccttcagttctcgtagaaaccttcgaagacacatggtagtgcaaggtggaaatagaccttataaatgtaagttgtgtgggaaagcttttttttggcccagtttattacgtatgcatgaaagaactcacactggagagaaaccgtatgaatgtaagcagtgttctaaagcctttcctttttacagttcctatcgaagacatgagagaatgcacactggggagaaaccgtatgaatgtaagcagtgttctaaagccttgcctgattccagttcctatataagacatgaaagaactcacactggagagaaaccatatacatgtaaacagtgtgggaaagccttcagtgtttccagttcccttcgaagacatgaaaccactcacagtgcagagaaaccctatgagtgtaagcaatgcgggaaaacatttcatcatcttggaagctttcagatacacatgaaaaggcacactggagatcgacctcataaatgtaagatatgtgggaaaggctttgatcgtcccagtttagttcgatatcatgaacgaattcacactggagagaaaccctatgaatgcaagcagtgtgggaaaacgttatctcatagctcaagctttcgaagacacatgataatgcacactggaggtggacctcataaatgcaagatatgtgggaaagcttttgtttatcctagtgtatgtcaaagacacgaaaagtctcacagtggagagaaaccctatgaatgcaagcagtgtgggaaagcgttatctcatagctcaagctttcgaagacatatggtaatgcatacgggagatgggccgaataaatgcaaggtatgtgggaaagcctttgtttatcccagtgtatgtcaaagacatgaaaagactcactggagagaaacaatatgaatgtaaactattataaagccttctatatttccagttccctttgatatcatgaataaacttacactggacagaaaccctataaatgtaaatgtgggaaagcctttcataatttttattcctttcaaaatcatgaaatatctcacactggagagatgctgtatgatataaggaatgtgggaaagtgatcgatttttttttaacaccattgtcaacataaaacaactcacagagcagaaaaactctgtgagtgtaaaatatgtagggaagccttcagtcattttggtaacttaaaagtacatgaggctgggcacagtggctcacgcctgtaatcccagcacttagggtgggcaaattgcttgacctcaggaatttgaggcctgcctgggcaaaatggtgaaaccatgtctctacaaaaaatagaaaaagtagcaggtgtggtggtatgcccctgtagtcccagctacttgggaggctgaggtgggaagatctcttgagcccaaggggtgggggttgcagtgagccaagatgcactgcaccccagcctgggcgacagagccagaccctgtctcaaaaaaaaaaaaaaagtacatgaaaggattcactctggagagaagtcatatgaatgtaagaaatgtagaaaagcattgagttctctcaggtccttgcatagacataaaaggactcactggagagatactctataaatgtgtgaaatgtagggaagtattctttaatgttatttcatttcagatagaaataattctcattggagataaaccctatgaatgtaaacacatagtaaagccttaattttaagcctcagtttctttcaaatacagttatcccctaatatttgcaggagcgtggttctaccaccccctgggcatacataaatcgacacatgccaagtccttttttaaaaatgacatatttggtacaaaattacccggatgtgatggcacatgcctgtaatcccagctactcaggaggctgaggcaggataatcacttgaatccgggaggcggaggttgcggtgagccaagatcgcgccactgcactccagcctgggcagcaagagcaaaacaacctctgtcacacacacaaaaaaaaaaaaaaa

SEQ ID NO: 202965 - DNA, 958 bp, Homo sapiens
  Payload ID: 20027
  Gene Name: zinc finger protein 563
  ENST ID: ENST00000595977
  CDS Start-End: 239-928
ctgtcaatcaggcgcacggctggcagtagggtgccaggttcaaagagcccgcggcgtcttcacgcccctgcgctcagctctagactcagtcgctcgctgagagacgccctggaacgtctgtgtagcctcagtcgctgagagacgccctggaacgtctgtggcagcctctgtcacagtgggacccgcactggcagcgggaggcagagggaggaccctggaacatcccggaagccgggaaatggacgcagtggcctttgaggatgtggctgtgaacttcacccaggaggaatgggctttgctgggtccatcacagaagaatttatacagatatgtgatgcaagaaaccatcaggaacctggactgtataagaatgatatgggaagaacagaatactgaagatcagtacaaaaatcctaggagaaatctaagatgtcatatggtagagagattcagtgaaagtaaagacagtagtcagtgtggagaaacatttagcctcattcgagatagtattgtgaacaacagcatttgtcctggagaagatccatgtcaaagcgctgagtgtgaagaagtcataatgggtcatttatcccttaatagccacatcagagttgattctggacacaaaccacatgagtatcaggaatatggagagaagccacatacacataaacaacgtgggaaagccttcagttaccatcactcctttcagtcgcgtggaaggcctcacactggaaagaaacgctatgagtgtaaggaatgtggaaaaaccttcagttctcgtagaaaccttcgaagacacatggtagtgcaaggtggaaatagaccttataaatttcctatcgaagacatgagagaatgcacactggggagaaaccgtatgaatgtaagcagtgttctaaagccttgcctgattccagttcctatataagacatgaaagaactcacactggagagaaac

SEQ ID NO: 202966 - DNA, 749 bp, Homo sapiens
  Payload ID: 20027
  Gene Name: zinc finger protein 563
  ENST ID: ENST00000594577
  CDS Start-End: 168-749
aagccgggaaatgaattagtgaccagagttcctcactgggatctcaggctgctgtcttcaagactggcgcagaggacgcagtggcctttgaggatgtggctgtgaacttcacccaggaggaatgggctttgctgggtccatcacagaagaatttatacagatatgtgatgcaagaaaccatcaggaacctggactgtataagaatgatatgggaagaacagaatactgaagatcagtacaaaaatcctaggagaaatctaagccacatcagagttgattctggacacaaaccacatgagtatcaggaatatggagagaagccacatacacataaacaacgtgggaaagccttcagttaccatcactcctttcagtcgcgtggaaggcctcacactggaaagaaacgctatgagtgtaaggaatgtggaaaaaccttcagttctcgtagaaaccttcgaagacacatggtagtgcaaggtggaaatagaccttataaatgtaagttgtgtgggaaagcttttttttggcccagtttattacgtatgcatgaaagaactcacactggagagaaaccgtatgaatgtaagcagtgttctaaagcctttcctttttacagttcctatcgaagacatgagagaatgcacactggggagaaaccgtatgaatgtaagcagtgttctaaagccttgcctgattccagttcctatataagacatgaaagaactcacactggagagaaaccatataca

SEQ ID NO: 202967 - DNA, 564 bp, Homo sapiens
  Payload ID: 20027
  Gene Name: zinc finger protein 563
  ENST ID: ENST00000601858
  CDS Start-End: 178-564
aacatcccggaagccgggaaatgaattagtgaccagagttcctcactgggatctcaggctgctgtcttcaagactggcgcagaggacgcagtggcctttgaggatgtggctgtgaacttcacccaggaggaatgggctttgctgggtccatcacagaagaatttatacagatatgtgatgcaagaaaccatcaggaacctggactgtataagaatgatatgggaagaacagaatactgaagatcagtacaaaaatcctaggagaaatctaagatgtcatatggtagagagattcagtgaaagtaaagacagtagtcagtgtggagaaacatttagcctcattcgagatagtattgtgaacaacagcatttgtcctggagaagatccatgtcaaagcgctgagtgtgaagaagtcataatgggtcatttatcccttaatagccacatcagagttgattctggacacaaaccacatgagtatcaggaatatggagagaagccacatacacataaacaacgtgggaaagccttcagttaccatcactcctttcagtcgcgtggaagg

SEQ ID NO: 202968 - DNA, 2935 bp, Homo sapiens
  Payload ID: 20028
  Gene Name: zinc finger protein 564
  Uniprot ID: Q8TBZ8
  ENST ID: ENST00000339282
  CDS Start-End: 198-1859
aggaactctgcaagggggacaggggcaatgttcaacaactccgcggggtcttcctgtttcgtgtccgctgcgtttgggttccggtctccgcttctccagtggccccggtggctccaccgcagcgtctggcgcgctgggacctgcacaggccggagagagccgtaggcaggaccccgggacaccctggaagccaggaaatggactcagtggcctctgaggatgtggctgtgaacttcacacttgaggagtgggctttgctggatccttcccagaagaaactctacagagatgtgatgcgggaaacctttagaaacctggcctgtgtaggaaaaaaatgggaagaccagagcattgaagattggtacaaaaatcaggggagaattttaagaaatcatatggaagagggactcagtgaaagtaaagaatatgatcaatgtggagaagccttcagtcagattctcaatcttaatctgaacaagaaaattcctactatagtaagaccatgtgaatgtagtttgtgtgggaaagtcttcatgcatcattcatcccttagtaggcacatcagatctcaccttggacacaaaccatatgactatcaggaatatggagagaaaccatataaatgtaagcagtgtgggaaagccttcagttcttgtcaatcctttcgaagacatgaaagaactcacactggtgagaaaccctatgcatgtccggaatgtgggaaagccttcatttctctcccaagtgttcgaagacacatgattaagcacactggagatggaccatataaatgtcaggaatgtgggaaagcctttgatcgcccaagtttatttcagatacatgaaagaactcacactggagagaaaccctatgaatgtcaggaatgtgcaaaagctttcatttctcttccaagttttcaaagacacatgattaggcacactggagatggaccttataaatgtcaggaatgtggaaaagcctttgaccgccccagtttatttcgaatacatgaaagaactcatactggagagaaaccccatgaatgtaaacagtgtgggaaggccttcatttctttcacaaattttcaaagtcatatgattaggcacactggggatggaccttataaatgtaaagtatgtgggagagcctttatttttcccagttatgttcgaaagcatgaaagaactcatactggggagaaaccctatgaatgtaataaatgtggtaaaaccttcagttcttccagtaatgttcgaacacatgaaaggactcacactggagagaagccctatgaatgtaaggaatgcgggaaagccttcatttctctcccaagtgtccgaagacacatgataaagcacactggagatggaccttataaatgtcaggtatgtggtagagcctttgactgtcccagttcatttcaaatacacgaaagaactcacactggagagaaaccctatgaatgtcaggtatgtgggaaagccttcatttctcttaaaaggattagaaaacatatgatactgcacactggagatggaccttataaatgtcaggtatgtggtaaagcctttgactgtcctagttctgtccgaacacatgaaagaactcatactggagaaaaaccctatgaatgtaaagaatgtgggaaagcattcaattatgccagttccattagaatacatgaaagaactcataccggagaaaaaccctatgaatgtaagcaatgtggaaaaacgttcagttattccagttcctttcaaagacatgaaagagctcataatggagataaaccttacgtaaagaatgtgggaaagctttcatttatcacacaaccttcgaatacctgtgaaaatgaatagtggaggacaggtctacaagtatctacatatctaaagaatatggaaagtcttcagtttgctttctgggtttcagacttgtttgggagctcacccctttctcctgtttctcacttttggaataggaatctctatcctgtgcctgtctcatattttggaaatacatgactagtttggttttcaccggttcggagctgaagaagaattttgcctcagcatgaattgagtctcatccatatctgagtgatgtgatattgagatgacactttggagtttgagtttaaacattaggcttcatgctggaattaactgagacttttgaggcctttgggatgagatgaatatattttacatgtgatgacatggattttgggggccagaggtgtaatgttttggctgagtgtatgccacctcagattcatatgttgaaaccttacccccgtgccccccctctcccccacaatgtgatggtatttggaggccctgtctctggtggtttttaggattggaggacatcatgaagatggaggccttgtaattgggattagtttcctgataggaatccctagagagctagctttgcccttcaccatgagagggtgcagtgagaagatagctatctttgaaccgggaagcaggcccttaccagacatggactatgccagtgccttgatattggacttcccagcctcccaaaccatgagaaataaatgtttgttgattaattaagctttccaatttatggtattttgttttagcaacccaagctaagacacaatccaattttaaaatggaggaaaggacttgaatagacatttctccaaagaagatacccagatggccaataagcacgtaacaatgctcgacatctttagtcattagggaaatacaaatcaaactcaagacatacatagcatctcattaggattagtagtatcaaagatggaaaacaagaaatactgtcaaggatgtggaatgttggagaacattgtgcactatcactgggaatgtacagtggtataagcctgctgaaaacagtatggcagatccccagattaaaatatagaaataacatatga

SEQ ID NO: 202969 - DNA, 255 bp, Homo sapiens
  Payload ID: 20028
  Gene Name: zinc finger protein 564
  ENST ID: ENST00000416136
  CDS Start-End: 103-168
ccagtggccccggtggctccaccgcagcgtctggcgcgctgggacctgcacaggccggagagagccgtaggcaggaccccgggacaccctggaagccaggaaatgggtagagattttgtcgtaatggataactgttctgtatcctttcatctggactttggtgattaatgctaaatcctatcagatgggactttgaaatattaaatattagtgaattaaatattagtaaagaagttgtcatggaagtaacaataa

SEQ ID NO: 202970 - DNA, 575 bp, Homo sapiens
  Payload ID: 20028
  Gene Name: zinc finger protein 564
  ENST ID: ENST00000427105
  CDS Start-End: 136-345
gtccgctgcgtttgggttccggtctccgcttctccagtggccccggtggctccaccgcagcgtctggcgcgctgggacctgcacaggccggagagagccgtaggcaggaccccgggacaccctggaagccaggaaatgacagagtttcgctctgtcgcccaggctggagtgcagtgggaagatctcagctcactgcaaccttcgccttccgggttcaagcaattctcctgcctcagcctcctgagtaactgggattacaggcatgcgccgccacgaccggctactttttgtatttttggtagaaactgggtttctccatgttggccaggactcagtggcctctgaggatgtggctgtgaacttcacacttgaggagtgggctttgctggatccttcccagaagaaactctacagagatgtgatgcgggaaacctttagaaacctggcctgtgtaggaaaaaaatgggaagaccagagcattgaagattggtacaaaaatcaggggagaattttaagaaatcatatggaagagggactcagtgaaagtaaagaatatgatcaatgtggagaagcct

SEQ ID NO: 202971 - DNA, 524 bp, Homo sapiens
  Payload ID: 20028
  Gene Name: zinc finger protein 564
  ENST ID: ENST00000596193
  CDS Start-End: 420-524
aaaccatccaatcaggaactctgcaagggggacaggggcaatgttcaacaactccgcggggtcttcctgtttcgtgtccgctgcgtttgggttccggtctccgcttctccagtggccccggtggctccaccgcagcgtctggcgcgctgggacctgcacaggccggagagagccgtaggcaggaccccgggacaccctggaagccaggaaatgagtctccatccccaggctggagtctagtggcgcgattttggctcactgtaacttccgcctcttgggttcaagcaattctcctgcctcagcctcccaagtagttgggattacaggactcagtggcctctgaggatgtggctgtgaacttcacacttgaggagtgggctttgctggatccttcccagaagaaactctacagagatgtgatgcgggaaacctttagaaacctggcctgtgtaggaaaaaaatgggaagaccagagcattgaagattggtacaaaaatcaggggagaattttaagaaatcatatg

SEQ ID NO: 202972 - DNA, 2023 bp, Homo sapiens
  Payload ID: 20029
  Gene Name: zinc finger protein 565
  Uniprot ID: Q8N9K5
  ENST ID: ENST00000304116
  CDS Start-End: 118-1617
ggcgagctagttagctccgcaaggacccggacgcgaccaggggaggcagaaggactctgcacttgtccaagagaagaatccagagaaatcagagcaggtcaaatagttctaaaagccatggcccagggactggtgacattcagggacgtggccatagagttctctctggaagaatggaagtgcctggaacctgctcagagggacttgtacagggaggtgactctggagaactttggtcacttggcctcactaggactctccatttctaagcctgatgtcgtctccttattggagcaagggaaagagccctggatgattgcaaatgatgtgacaggaccatggtgcccagacttggagtccaggtgtgagaaatttctacaaaaagacatttttgaaatcggggcattcaactgggagataatggaaagccttaaatgcagtgacctggagggctccgattttagagctgactgggaatgcgaaggccagtttgagagacaagtcaatgaagagtgctattttaagcaagtgaacgtcacctatggacatatgcccgtgttccagcatcacacgtctcacactgtacgtcagagcagggagactggtgagaaactgatggaatgtcatgaatgtgggaaagcatttagccgtggctcacaccttattcaacatcagaaaattcacactggtgaaaaaccctttggatgtaaggaatgtgggaaggccttcagccgtgcctcacaccttgttcagcatcagagaattcacacgggtgagaaaccttatgactgtaaggactgtgggaaggcctttggtcgtacatcagaacttattctacatcagagacttcatactggtgtcaaaccttatgaatgtaaagaatgtgggaagacctttaggcagcattcacagctgattctgcatcaaagaactcacacaggcgagaaaccctacgtatgtaaagactgtggcaaggctttcattcgtggctcccaactcactgtgcatcggagaatccacacaggggccagaccctatgagtgtaaagaatgcgggaaagcctttagacagcactcacagctgactgtacaccagcgaatccacactggtgagaaaccctacgagtgtaaggaatgcggaaagggctttattcacagctcagaagttactcgacatcaaagaattcattctggggagaaaccctatgagtgtaaggaatgtgggaaggccttcagacagcacgcacagctcacacgacatcagagagtccatactggcgacagaccctatgaatgtaaggactgcgggaaggcatttagtcgtagctcatacctcattcaacatcaaagaattcatacaggtgacaaaccctacgaatgtaaggaatgtgggaaggcctttattcgtgtttcacaactgactcatcatcagcgaattcacacttgtgagaaaccctatgaatgcagggagtgtggaatggcctttattcgtagttcacaacttaccgaacatcagagaattcatcctggtatcaaaccttacgaatgtagagagtgtgggcaggcatttattcttggctcacaactcattgaacactacagaattcatactggttagaaagccttgagtgtaagggataaagataagcctttatgtggagttcacatctggctcagtactaggtaatttttaatgtagtgtaattaatgtcagaaaacacctgtcacttccatcatagaacatcagaaaactcacacccaaagaaaattaaataaatgtgggaattctttttgcctcactcactgtttcctaagcatcagataatctatgctaaaaaaaaatgaatatagaaaagctgcttcttgccattcaaaatatgttaaatttctgacaattcctaatacaaaaatgacccgattaaaagattctgtggccaggcgtggtggctcatgcctgtaatcccagcactttgggaggccaaggccggcagatcatttgaggtcaggagtttgagaccagcctg

SEQ ID NO: 202973 - DNA, 2519 bp, Homo sapiens
  Payload ID: 20029
  Gene Name: zinc finger protein 565
  Uniprot ID: Q8N9K5
  ENST ID: ENST00000355114
  CDS Start-End: 728-2347
acacacggagacgtgcgcgcacacccacttgtgcagagacacgcgcacgcagacacgtgcgcacagagacgcacacagacacacgtgtgcacacaggcaaacaggcacgcgcagagacgcacacagacacgcgtgtgcaccacaggcaaacagacacgtgcagagacgcacacacaggcacacgtgtgcacacacagagatgcaaacacagacacacgcgtgcacacactgacgcgcgcacagagagacacacgcgcgcacacacacgtctcccccgcgccagctccggctccagcagccttggggtccccgcccagacccgggctcctgactccctcaacgactgcatctcgcggggcgatcccggtcgggttccgcctgagccaaggccccgcacccaaaccgagacagcggatccagtagcccgaggcccgcagctgggcgaaggaaccgggactcaagagtagcctccggcaccgagccctccaagaaaagcagcccgggaccccgacaaccgtggacggagccagggtgggtcatagctcgaggcatcgtcaacggagggtccttaagagaccctgaacccattcacccgggcaccagagactctgccaaagcaccaattcgggcaggtggtagcctcgaagctgggaggctgcatctcaagcctcctcctagatccgcggtggaccctgggaaatgtagtccagagcaagccaccacctaaatgcgccgtggaccctgggaaaggtggtccctcgcaagtcaccgcctggacgcaggactctgcacttgtccaagagaagaatccagagaaatcagagcaggtcaaatagttctaaaagccatggcccagggactggtgacattcagggacgtggccatagagttctctctggaagaatggaagtgcctggaacctgctcagagggacttgtacagggaggtgactctggagaactttggtcacttggcctcactaggactctccatttctaagcctgatgtcgtctccttattggagcaagggaaagagccctggatgattgcaaatgatgtgacaggaccatggtgcccagacttggagtccaggtgtgagaaatttctacaaaaagacatttttgaaatcggggcattcaactgggagataatggaaagccttaaatgcagtgacctggagggctccgattttagagctgactgggaatgcgaaggccagtttgagagacaagtcaatgaagagtgctattttaagcaagtgaacgtcacctatggacatatgcccgtgttccagcatcacacgtctcacactgtacgtcagagcagggagactggtgagaaactgatggaatgtcatgaatgtgggaaagcatttagccgtggctcacaccttattcaacatcagaaaattcacactggtgaaaaaccctttggatgtaaggaatgtgggaaggccttcagccgtgcctcacaccttgttcagcatcagagaattcacacgggtgagaaaccttatgactgtaaggactgtgggaaggcctttggtcgtacatcagaacttattctacatcagagacttcatactggtgtcaaaccttatgaatgtaaagaatgtgggaagacctttaggcagcattcacagctgattctgcatcaaagaactcacacaggcgagaaaccctacgtatgtaaagactgtggcaaggctttcattcgtggctcccaactcactgtgcatcggagaatccacacaggggccagaccctatgagtgtaaagaatgcgggaaagcctttagacagcactcacagctgactgtacaccagcgaatccacactggtgagaaaccctacgagtgtaaggaatgcggaaagggctttattcacagctcagaagttactcgacatcaaagaattcattctggggagaaaccctatgagtgtaaggaatgtgggaaggccttcagacagcacgcacagctcacacgacatcagagagtccatactggcgacagaccctatgaatgtaaggactgcgggaaggcatttagtcgtagctcatacctcattcaacatcaaagaattcatacaggtgacaaaccctacgaatgtaaggaatgtgggaaggcctttattcgtgtttcacaactgactcatcatcagcgaattcacacttgtgagaaaccctatgaatgcagggagtgtggaatggcctttattcgtagttcacaacttaccgaacatcagagaattcatcctggtatcaaaccttacgaatgtagagagtgtgggcaggcatttattcttggctcacaactcattgaacactacagaattcatactggttagaaagccttgagtgtaagggataaagataagcctttatgtggagttcacatctggctcagtactaggtaatttttaatgtagtgtaattaatgtcagaaaacacctgtcacttccatcatagaacatcagaaaactcacacccaaagaaaattaaataaatgtgggaattctt

SEQ ID NO: 202974 - DNA, 1931 bp, Homo sapiens
  Payload ID: 20029
  Gene Name: zinc finger protein 565
  Uniprot ID: Q8N9K5
  ENST ID: ENST00000392173
  CDS Start-End: 260-1759
agtctccgcgacgcggcccgcctcggtcaccgcggccaggcccaggctggtactgaattaccttctattaccagcaacgtcgcttctcaggccttggactacatttcccttgaggctttactggtcgactctctgtctcctcccctccccccgcgaacttggccgcctccttctgtgacgatggagctcttgaggactctgcacttgtccaagagaagaatccagagaaatcagagcaggtcaaatagttctaaaagccatggcccagggactggtgacattcagggacgtggccatagagttctctctggaagaatggaagtgcctggaacctgctcagagggacttgtacagggaggtgactctggagaactttggtcacttggcctcactaggactctccatttctaagcctgatgtcgtctccttattggagcaagggaaagagccctggatgattgcaaatgatgtgacaggaccatggtgcccagacttggagtccaggtgtgagaaatttctacaaaaagacatttttgaaatcggggcattcaactgggagataatggaaagccttaaatgcagtgacctggagggctccgattttagagctgactgggaatgcgaaggccagtttgagagacaagtcaatgaagagtgctattttaagcaagtgaacgtcacctatggacatatgcccgtgttccagcatcacacgtctcacactgtacgtcagagcagggagactggtgagaaactgatggaatgtcatgaatgtgggaaagcatttagccgtggctcacaccttattcaacatcagaaaattcacactggtgaaaaaccctttggatgtaaggaatgtgggaaggccttcagccgtgcctcacaccttgttcagcatcagagaattcacacgggtgagaaaccttatgactgtaaggactgtgggaaggcctttggtcgtacatcagaacttattctacatcagagacttcatactggtgtcaaaccttatgaatgtaaagaatgtgggaagacctttaggcagcattcacagctgattctgcatcaaagaactcacacaggcgagaaaccctacgtatgtaaagactgtggcaaggctttcattcgtggctcccaactcactgtgcatcggagaatccacacaggggccagaccctatgagtgtaaagaatgcgggaaagcctttagacagcactcacagctgactgtacaccagcgaatccacactggtgagaaaccctacgagtgtaaggaatgcggaaagggctttattcacagctcagaagttactcgacatcaaagaattcattctggggagaaaccctatgagtgtaaggaatgtgggaaggccttcagacagcacgcacagctcacacgacatcagagagtccatactggcgacagaccctatgaatgtaaggactgcgggaaggcatttagtcgtagctcatacctcattcaacatcaaagaattcatacaggtgacaaaccctacgaatgtaaggaatgtgggaaggcctttattcgtgtttcacaactgactcatcatcagcgaattcacacttgtgagaaaccctatgaatgcagggagtgtggaatggcctttattcgtagttcacaacttaccgaacatcagagaattcatcctggtatcaaaccttacgaatgtagagagtgtgggcaggcatttattcttggctcacaactcattgaacactacagaattcatactggttagaaagccttgagtgtaagggataaagataagcctttatgtggagttcacatctggctcagtactaggtaatttttaatgtagtgtaattaatgtcagaaaacacctgtcacttccatcatagaacatcagaaaactcacacccaaagaaaattaaataaatgtgggaattctt

SEQ ID NO: 202975 - DNA, 1217 bp, Homo sapiens
  Payload ID: 20029
  Gene Name: zinc finger protein 565
  ENST ID: ENST00000591473
  CDS Start-End: 439-1217
agcgtcagatgacttcaagcttgctggaaggtctggagtggcgacgccctctccgaagactcgtgggcgcaaaaatgtcaaaacgagccaggccccgactcagagataagagaacgccattctgtccgtggccgatctagctctggactacaattcccagagcccacagcggcctgacgttacgtcgttcttgacgtcgtggcgagctagttagctccgcaaggacccggacgcgaccaggggaggcagaagggactggtgacattcagggacgtggccatagagttctctctggaagaatggaagtgcctggaacctgctcagagggacttgtacagggaggtgactctggagaactttggtcacttggcctcactaggactctccatttctaagcctgatgtcgtctccttattggagcaagggaaagagccctggatgattgcaaatgatgtgacaggaccatggtgcccagacttggagtccaggtgtgagaaatttctacaaaaagacatttttgaaatcggggcattcaactgggagataatggaaagccttaaatgcagtgacctggagggctccgattttagagctgactgggaatgcgaaggccagtttgagagacaagtcaatgaagagtgctattttaagcaagtgaacgtcacctatggacatatgcccgtgttccagcatcacacgtctcacactgtacgtcagagcagggagactggtgagaaactgatggaatgtcatgaatgtgggaaagcatttagccgtggctcacaccttattcaacatcagaaaattcacactggtgaaaaaccctttggatgtaaggaatgtgggaaggccttcagccgtgcctcacaccttgttcagcatcagagaattcacacgggtgagaaaccttatgactgtaaggactgtgggaaggcctttggtcgtacatcagaacttattctacatcagagacttcatactggtgtcaaaccttatgaatgtaaagaatgtgggaagacctttaggcagcattcacagctgattctgcatcaaagaactcacacaggcgagaaaccctacgtatgtaaagactgtggcaaggctttcattcgtggctcccaactcactgtgcatcggagaatccacacaggggccagaccctatgagtgtaaagaatgcgggaaagcctttagacagcactcacagctgactgtaca

SEQ ID NO: 202976 - DNA, 583 bp, Homo sapiens
  Payload ID: 20029
  Gene Name: zinc finger protein 565
  ENST ID: ENST00000585994
  CDS Start-End: 415-583
aaacaaaaaattaaaaattatctgagtgtggtggcccacacctgtggtcccagctacccgggaagctgaggtgggaggatctcgagcttgagaggtcaaggctgcagtgagccgtgtttgaaccactgcattccagtctagaacctttgaagttaggacagattctggccctggacaggagtgacctcagccttctgagtgacactggatttaggcagatgcctggtgttctgtgaccacacttccctatatgatgtatgccattcacaggacttcggactcagcaactgccagcctcacagtcaatggggaagtgatgttctgcagaaaagcagtagatggtcggaaggactctgcacttgtccaagagaagaatccagagaaatcagagcaggtcaaatagttctaaaagccatggcccagggactggtgacattcagggacgtggccatagagttctctctggaagaatggaagtgcctggaacctgctcagagggacttgtacagggaggtgactctggagaactttggtcacttggcctcactaggactctccatttctaagcctgatgtcgtctcct

SEQ ID NO: 202977 - DNA, 2755 bp, Homo sapiens
  Payload ID: 20030
  Gene Name: zinc finger protein 566
  Uniprot ID: Q969W8
  ENST ID: ENST00000392170
  CDS Start-End: 148-1407
acgcgctggcgggaccctcagggctttaccagcaactaccccagtgccggggagggttctgctgcttcgaaagctggtaaggcctgagctctacccttctccaaaagaagagccaagagaaggtccttttctacaaatatcagagccatggctcaggagtcagtgatgttcagtgatgtgtccgtagacttctctcaggaggagtgggaatgcctgaatgatgatcagagagatttatacagagatgtgatgttggagaattacagcaacctggtttcaatggcagggcattctatttctaaaccaaatgtgatctcctacttggagcaagggaaggagccctggttggctgacagagagctaacaagaggccagtggccagtcctggaatcaagatgtgagaccaagaaattatttctgaagaaagaaatttatgaaatagaatcaacccagtgggaaataatggaaaaactcacaagacgtgattttcagtgctccagtttcagagatgattgggaatgtaatcggcagtttaagaaagaactcggctctcaggggggacatttcaatcaattggtattcactcatgaagatctgcccactttgagtcaccatccatccttcacattacagcaaatcattaacagtaaaaagaaattctgtgcatctaaagaatataggaaaacctttagacatggctcacagtttgctacacatgagataattcataccattgagaagccttatgaatgtaaggaatgtggaaagtcctttagacatccctcaagactcactcatcatcagaaaattcatactggcaagaaaccctttgaatgtaaggaatgtggaaaaacctttatttgtggctcagaccttactcgacatcacagaattcacactggtgagaaaccctatgaatgtaaggaatgtgggaaagcctttagtagtggttcaaacttcactcgacatcagagaattcacacaggtgagaagccttatgaatgcaaagaatgcgggaaggcctttagtagtggctcaaactttactcaacatcagagaattcatactggggaaaaaccctatgaatgtaaggaatgtggcaatgcctttagtcagagctcacaacttattaaacatcaaagaatccatacaggtgagaaaccttacgaatgtaaggaatgtgaaaaggcttttcgttctggctcagaccttactagacatcagagaattcatactggggagaaaccctatgaatgtaagatatgtgggaaggcttattctcagagttcacagcttattagtcatcatagaattcatactagtgagaaaccctatgaatatagggaatgtggaaagaactttaattatgacccacaacttattcagcatcaaaatttgtactggtgatgaaacagaatatatgaaatgtgtagggaggcttttaattatggctcaaaacagaatttatcttgttaataattcctctagatagaataatgtagaaacattttatttgtggactacagcttattcagcctgggaaaaataatgttggagaaatactctatgaatagaatatactttggaagcccttaactaaacgcttacttctcttgacatcagataattcagtctagcaatatgatagataattcagtctgtcatactgaaaatgacagcacttttaacacctttctaaccttcttaacgtcagagaatttttgtagaaatgtagtcctgtgattgtcattttttcccctaatttctctaattgttacattcttagtattttaatccatattaaatttatatggctataaatttcatctgtttacatcctgatttgtatactattttaaaaatacctttagtacctgggagaagtgacctctttatttttgaagatggcttattctttttgttctttataacattaaggctttcttattgtaaaaatgttcatgaacgacattttactcaatagagattcttcattatcttcatggtgttttgttgtgttactgtaatatcacttatgaaatcctattggtggatatcgtagtctcctctagatattttgccataatacatgccaaaatacaagtccctgctggacattctccctaagcacatctttgtatcatatcttttaattgcagaagtaatgtgtgaatatattttccttataaaagatgcaaacattacaaaaaggcaaatgtaccctttgaccatatcccaaaggatagtctttatcagttcattatttattgctgatcatttttctgttcatatatacatgcgtgtctcagtaaaaattataaaatgggggataattataatacctacctcataatgctttgtgaggattaaatgaattaagatcgataaagtgcttagaattgtgcctgacatgataaatacatactcactgaatgttagtcatcgttattatattcatcatcatcagtattattatttgtagaaaggctttttaacttctgcagaacttagtcaccattaggcagggtgtttgactgaagaaagaccctttgaaggtaacaagttaagaaaatttcccatcatcatgtacttactattgaacatgaaataatcctaggtgttgggggggaaagtactgtgaataatgtgtgtgaaggactttattccgactaatactctttttgtcgcattatatacccagtaaaaaagaaaagagaacataagcaaaatattggtgcactaatgaggaaaaaaa

SEQ ID NO: 202978 - DNA, 584 bp, Homo sapiens
  Payload ID: 20030
  Gene Name: zinc finger protein 566
  ENST ID: ENST00000427002
  CDS Start-End: 112-584
tttaccagcaactaccccagtgccggggagggttctgctgcttcgaaagctgctctacccttctccaaaagaagagccaagagaaggtccttttctacaaatatcagagccatggctcaggagtcagtgatgttcagtgatgtgtccgtagacttctctcaggaggagtgggaatgcctgaatgatgatcagagagatttatacagagatgtgatgttggagaattacagcaacctggtttcaatggcagggcattctatttctaaaccaaatgtgatctcctacttggagcaagggaaggagccctggttggctgacagagagctaacaagaggccagtggccagtcctggaatcaagatgtgagaccaagaaattatttctgaagaaagaaatttatgaaatagaatcaacccagtgggaaataatggaaaaactcacaagacgtgattttcagtgctccagtttcagagatgattgggaatgtaatcggcagtttaagaaagaactcggctctcaggggggacatttcaatcaattggtattcactcatgaagatctgcccactttgagtcaccatccatc

SEQ ID NO: 202979 - DNA, 2644 bp, Homo sapiens
  Payload ID: 20030
  Gene Name: zinc finger protein 566
  Uniprot ID: Q969W8
  ENST ID: ENST00000424129
  CDS Start-End: 93-1349
gttctgctgcttcgaaagctggtaaggcctgagctctacccttctccaaaagaagagccaagagaaggtccttttctacaaatatcagagccatggctcaggagtcagtgatgttcagtgatgtgtccgtagacttctctcaggaggagtgggaatgcctgaatgatgatcagagagatttatacagagatgtgatgttggagaattacagcaacctggtttcaatggggcattctatttctaaaccaaatgtgatctcctacttggagcaagggaaggagccctggttggctgacagagagctaacaagaggccagtggccagtcctggaatcaagatgtgagaccaagaaattatttctgaagaaagaaatttatgaaatagaatcaacccagtgggaaataatggaaaaactcacaagacgtgattttcagtgctccagtttcagagatgattgggaatgtaatcggcagtttaagaaagaactcggctctcaggggggacatttcaatcaattggtattcactcatgaagatctgcccactttgagtcaccatccatccttcacattacagcaaatcattaacagtaaaaagaaattctgtgcatctaaagaatataggaaaacctttagacatggctcacagtttgctacacatgagataattcataccattgagaagccttatgaatgtaaggaatgtggaaagtcctttagacatccctcaagactcactcatcatcagaaaattcatactggcaagaaaccctttgaatgtaaggaatgtggaaaaacctttatttgtggctcagaccttactcgacatcacagaattcacactggtgagaaaccctatgaatgtaaggaatgtgggaaagcctttagtagtggttcaaacttcactcgacatcagagaattcacacaggtgagaagccttatgaatgcaaagaatgcgggaaggcctttagtagtggctcaaactttactcaacatcagagaattcatactggggaaaaaccctatgaatgtaaggaatgtggcaatgcctttagtcagagctcacaacttattaaacatcaaagaatccatacaggtgagaaaccttacgaatgtaaggaatgtgaaaaggcttttcgttctggctcagaccttactagacatcagagaattcatactggggagaaaccctatgaatgtaagatatgtgggaaggcttattctcagagttcacagcttattagtcatcatagaattcatactagtgagaaaccctatgaatatagggaatgtggaaagaactttaattatgacccacaacttattcagcatcaaaatttgtactggtgatgaaacagaatatatgaaatgtgtagggaggcttttaattatggctcaaaacagaatttatcttgttaataattcctctagatagaataatgtagaaacattttatttgtggactacagcttattcagcctgggaaaaataatgttggagaaatactctatgaatagaatatactttggaagcccttaactaaacgcttacttctcttgacatcagataattcagtctagcaatatgatagataattcagtctgtcatactgaaaatgacagcacttttaacacctttctaaccttcttaacgtcagagaatttttgtagaaatgtagtcctgtgattgtcattttttcccctaatttctctaattgttacattcttagtattttaatccatattaaatttatatggctataaatttcatctgtttacatcctgatttgtatactattttaaaaatacctttagtacctgggagaagtgacctctttatttttgaagatggcttattctttttgttctttataacattaaggctttcttattgtaaaaatgttcatgaacgacattttactcaatagagattcttcattatcttcatggtgttttgttgtgttactgtaatatcacttatgaaatcctattggtggatatcgtagtctcctctagatattttgccataatacatgccaaaatacaagtccctgctggacattctccctaagcacatctttgtatcatatcttttaattgcagaagtaatgtgtgaatatattttccttataaaagatgcaaacattacaaaaaggcaaatgtaccctttgaccatatcccaaaggatagtctttatcagttcattatttattgctgatcatttttctgttcatatatacatgcgtgtctcagtaaaaattataaaatgggggataattataatacctacctcataatgctttgtgaggattaaatgaattaagatcgataaagtgcttagaattgtgcctgacatgataaatacatactcactgaatgttagtcatcgttattatattcatcatcatcagtattattatttgtagaaaggctttttaacttctgcagaacttagtcaccattaggcagggtgtttgactgaagaaagaccctttgaaggtaacaagttaagaaaatttcccatcatcatgtacttactattgaacatgaaataatcctaggtgttgggggggaaagtactgtgaataatgtgtgtgaaggactttattccgactaatactctttttgtcgcattatatacccagt

SEQ ID NO: 202980 - DNA, 793 bp, Homo sapiens
  Payload ID: 20030
  Gene Name: zinc finger protein 566
  ENST ID: ENST00000452939
  CDS Start-End: 93-793
gtgccggggagggttctgctgcttcgaaagctgctctacccttctccaaaagaagagccaagagaaggtccttttctacaaatatcagagccatggctcaggagtcagtgatgttcagtgatgtgtccgtagacttctctcaggaggagtgggaatgcctgaatgatgatcagagagatttatacagagatgtgatgttggagaattacagcaacctggtttcaatggggcattctatttctaaaccaaatgtgatctcctacttggagcaagggaaggagccctggttggctgacagagagctaacaagaggccagtggccagtcctggaatcaagatgtgagaccaagaaattatttctgaagaaagaaatttatgaaatagaatcaacccagtgggaaataatggaaaaactcacaagacgtgattttcagtgctccagtttcagagatgattgggaatgtaatcggcagtttaagaaagaactcggctctcaggggggacatttcaatcaattggtattcactcatgaagatctgcccactttgagtcaccatccatccttcacattacagcaaatcattaacagtaaaaagaaattctgtgcatctaaagaatataggaaaacctttagacatggctcacagtttgctacacatgagataattcataccattgagaagccttatgaatgtaaggaatgtggaaagtcctttagacatccctcaagactcactcatcatcagaaaattcatactggcaagaaaccctttgaatgtaaggaatgtggaaa

SEQ ID NO: 202981 - DNA, 5197 bp, Homo sapiens
  Payload ID: 20030
  Gene Name: zinc finger protein 566
  Uniprot ID: Q969W8
  ENST ID: ENST00000434377
  CDS Start-End: 83-1339
ctcggctttgtgcggcggtggagctctacccttctccaaaagaagagccaagagaaggtccttttctacaaatatcagagccatggctcaggagtcagtgatgttcagtgatgtgtccgtagacttctctcaggaggagtgggaatgcctgaatgatgatcagagagatttatacagagatgtgatgttggagaattacagcaacctggtttcaatggggcattctatttctaaaccaaatgtgatctcctacttggagcaagggaaggagccctggttggctgacagagagctaacaagaggccagtggccagtcctggaatcaagatgtgagaccaagaaattatttctgaagaaagaaatttatgaaatagaatcaacccagtgggaaataatggaaaaactcacaagacgtgattttcagtgctccagtttcagagatgattgggaatgtaatcggcagtttaagaaagaactcggctctcaggggggacatttcaatcaattggtattcactcatgaagatctgcccactttgagtcaccatccatccttcacattacagcaaatcattaacagtaaaaagaaattctgtgcatctaaagaatataggaaaacctttagacatggctcacagtttgctacacatgagataattcataccattgagaagccttatgaatgtaaggaatgtggaaagtcctttagacatccctcaagactcactcatcatcagaaaattcatactggcaagaaaccctttgaatgtaaggaatgtggaaaaacctttatttgtggctcagaccttactcgacatcacagaattcacactggtgagaaaccctatgaatgtaaggaatgtgggaaagcctttagtagtggttcaaacttcactcgacatcagagaattcacacaggtgagaagccttatgaatgcaaagaatgcgggaaggcctttagtagtggctcaaactttactcaacatcagagaattcatactggggaaaaaccctatgaatgtaaggaatgtggcaatgcctttagtcagagctcacaacttattaaacatcaaagaatccatacaggtgagaaaccttacgaatgtaaggaatgtgaaaaggcttttcgttctggctcagaccttactagacatcagagaattcatactggggagaaaccctatgaatgtaagatatgtgggaaggcttattctcagagttcacagcttattagtcatcatagaattcatactagtgagaaaccctatgaatatagggaatgtggaaagaactttaattatgacccacaacttattcagcatcaaaatttgtactggtgatgaaacagaatatatgaaatgtgtagggaggcttttaattatggctcaaaacagaatttatcttgttaataattcctctagatagaataatgtagaaacattttatttgtggactacagcttattcagcctgggaaaaataatgttggagaaatactctatgaatagaatatactttggaagcccttaactaaacgcttacttctcttgacatcagataattcagtctagcaatatgatagataattcagtctgtcatactgaaaatgacagcacttttaacacctttctaaccttcttaacgtcagagaatttttgtagaaatgtagtcctgtgattgtcattttttcccctaatttctctaattgttacattcttagtattttaatccatattaaatttatatggctataaatttcatctgtttacatcctgatttgtatactattttaaaaatacctttagtacctgggagaagtgacctctttatttttgaagatggcttattctttttgttctttataacattaaggctttcttattgtaaaaatgttcatgaacgacattttactcaatagagattcttcattatcttcatggtgttttgttgtgttactgtaatatcacttatgaaatcctattggtggatatcgtagtctcctctagatattttgccataatacatgccaaaatacaagtccctgctggacattctccctaagcacatctttgtatcatatcttttaattgcagaagtaatgtgtgaatatattttccttataaaagatgcaaacattacaaaaaggcaaatgtaccctttgaccatatcccaaaggatagtctttatcagttcattatttattgctgatcatttttctgttcatatatacatgcgtgtctcagtaaaaattataaaatgggggataattataatacctacctcataatgctttgtgaggattaaatgaattaagatcgataaagtgcttagaattgtgcctgacatgataaatacatactcactgaatgttagtcatcgttattatattcatcatcatcagtattattatttgtagaaaggctttttaacttctgcagaacttagtcaccattaggcagggtgtttgactgaagaaagaccctttgaaggtaacaagttaagaaaatttcccatcatcatgtacttactattgaacatgaaataatcctaggtgttgggggggaaagtactgtgaataatgtgtgtgaaggactttattccgactaatactctttttgtcgcattatatacccagtaaaaaagaaaagagaacataagcaaaatattggtgcactaatgaggaaaaaaagtatgaaaagagaaacagcatcatatttaaaaaatggacagagatagaaacatagttacagatttaaaaggttctgttgaatattatgcttttttctaatatgtttgaaaatttaaacaaaatggtttttaaggaaaatatacatcaatattgactccaagaaaattaggactcttcaaagactctcataaacacagagaacagggaaaaattagcatgtgatcagttaactattactaatgaagcaccaaatccagtttctttctaaggaaaactttatcaaatgttcaaggaactatttcagttatatagaagtacacatcttggctcacgcctgtaatcccagcactttgggaggctgagatggaaggatcatttgaggccaggagcttgagaccagcctggccaacatgttgaaaccccatttttactcaaaaatacaaaacttagccaggcatggtggcacatgcctgtaatcccagctactggggaggctgaggcaggagaatcacttgaatgcaggaggtggaggttgcagtgagccaagatcacgccatggcacttcagcctgagcgacagaatgagactattaaaaaaaaaaaaaaaaagtccacagtgtagctttgtttggggttaagttagtgttttgaaatgggccttccctgtgctcaaaacatgctcagcaagcagctccccacgctggacagatcgcatatgtggaaggatgaagtttatgtctgtagaactgttattttatgccccacttccttttttcttagatcctgtgtagacgggtctctctgaacattgtgttactttactttactggcataaggaagtaaaatatttcataataaatttgagaaaagtagagtgagcaaaaatacctgcaaatgagagaattactaaaaatggactgttgtaatgttttgcgttatcaaaatgaaaactgccaaatgagattttgtttactttcttttcttgtgtgcttatgtcttttataaagttcttcatctaaaattatagagatagtgcatttgcacccaaattaatgaaacaataccattaaagagaaagaaaaggggctgggcacagtggcttacgcctgtaatcccagtgctttgggaggccaaggcagggggcagcctggccaatatagtgaaaccccatctctactaaaaatacaaaaattagctgggcgtggtggcatgtgcctgtagtcccagctgctcggaaggctgaggcaggagaatcgcttgaacccgggaggcggaggttgcagtgagctgagatcctgactgcactccagcctgcatgacagagtctcaaaaaatctgtctcaaaaaaaaaaaaaaaaaagaaagaaaaaatgattatctttgcccttctccgttcctcattccctcccctctgtcaattttcttctgaataatatttaaaggttgtgtatattacccatatatttcttcatgctaaaacattaacacacaattattttattatgtttttacagaaaaatggataactatacatttccctgaaatttgcttttttacattcaactgtacattttggattttccttcaatagatgatgatctaacagtctttctgatggttacagtatgttccacagtgttatttaccaatgccttttcaaccactttcccaattgtgatattatggattgtttgcgcttttttgccatctaaaagtaatgctgcaacaaacactttgtattcttgtctgttttatttctataaaataagcttcccaagtcatttccagtgtttttgctttgttttgttttgagacagagtttcactcttgtttcccaggctggagtgcaatggcgcaatcttggcttactgcaatctccgcctcccgggttcaagagattctcctgcctcagcctcccaagtagctggggttacaggtatatgccactacgcctggaaaattttgtatttttagtagagacggcatttttccatgttggtcaggctggtctcgaactcctgacctcaggtgatccaccctcctcggcctcccaaagtgctggcattataggcatgagccaccgcacccggcgtcatttccagtgttttctatgtttcctaggaaggttttgcttctggaagatttcagagggcaagagaataaaggagtggagtgcagtttttcatatatgtgattctgtgagtgtgtatacacagagatttaatattttaatacatcaggaattgattatacgatctaatgcaggatgtcagacttgtttctatccaggaataaaaccagttatgccagaagtaactattattcacctttctcctactgaattaaaatactatcagttgtatattaaatgctcacatctatttctgttctccatattctagcaatccttgacacttttcaatagcttttattacttggaaataaagatgtatgtatatattattaatatatagtttattatttggaaataaagatgtttcttcatgagaa

SEQ ID NO: 202982 - DNA, 3425 bp, Homo sapiens
  Payload ID: 20030
  Gene Name: zinc finger protein 566
  ENST ID: ENST00000493391
  CDS Start-End: 525-1469
gaggctgtccagcgcctgggggcagtaggacgggtccgggaactaagcccatctcaaacacgtcggagtggctttctttgggggccaaggcccgagcctgaggcgggactccatgaggcctctggggcgcgagcggtttgactagggggggcgatcctttcggcggggctgacgcaaggcgcggacaggaattctgacgatcgggaaccatcttgtccggccttgatacgtctctgactacgcttcccagaggtctcctcggcaagactgtacttctcgcggtaattcagcttccaactcacgcgctggcgggaccctcagggctttaccagcaactaccccagtgccggggagggttctgctgcttcgaaagctgctctacccttctccaaaagaagagccaagagaaggtccttttctacaaatatcagagccatggctcagtcctggaatcaagatgtgagaccaagaaattatttctgaagaaagaaatttatgaaatagaatcaacccagtgggaaataatggaaaaactcacaagacgtgattttcagtgctccagtttcagagatgattgggaatgtaatcggcagtttaagaaagaactcggctctcaggggggacatttcaatcaattggtattcactcatgaagatctgcccactttgagtcaccatccatccttcacattacagcaaatcattaacagtaaaaagaaattctgtgcatctaaagaatataggaaaacctttagacatggctcacagtttgctacacatgagataattcataccattgagaagccttatgaatgtaaggaatgtggaaagtcctttagacatccctcaagactcactcatcatcagaaaattcatactggcaagaaaccctttgaatgtaaggaatgtggaaaaacctttatttgtggctcagaccttactcgacatcacagaattcacactggtgagaaaccctatgaatgtaaggaatgtgggaaagcctttagtagtggttcaaacttcactcgacatcagagaattcacacaggtgagaagccttatgaatgcaaagaatgcgggaaggcctttagtagtggctcaaactttactcaacatcagagaattcatactggggaaaaaccctatgaatgtaaggaatgtggcaatgcctttagtcagagctcacaacttattaaacatcaaagaatccatacaggtgagaaaccttacgaatgtaaggaatgtgaaaaggcttttcgttctggctcagaccttactagacatcagagaattcatactggggagaaaccctatgaatgtaagatatgtgggaaggcttattctcagagttcacagcttattagtcatcatagaattcatactagtgagaaaccctatgaatatagggaatgtggaaagaactttaattatgacccacaacttattcagcatcaaaatttgtactggtgatgaaacagaatatatgaaatgtgtagggaggcttttaattatggctcaaaacagaatttatcttgttaataattcctctagatagaataatgtagaaacattttatttgtggactacagcttattcagcctgggaaaaataatgttggagaaatactctatgaatagaatatactttggaagcccttaactaaacgcttacttctcttgacatcagataattcagtctagcaatatgatagataattcagtctgtcatactgaaaatgacagcacttttaacacctttctaaccttcttaacgtcagagaatttttgtagaaatgtagtcctgtgattgtcattttttcccctaatttctctaattgttacattcttagtattttaatccatattaaatttatatggctataaatttcatctgtttacatcctgatttgtatactattttaaaaatacctttagtacctgggagaagtgacctctttatttttgaagatggcttattctttttgttctttataacattaaggctttcttattgtaaaaatgttcatgaacgacattttactcaatagagattcttcattatcttcatggtgttttgttgtgttactgtaatatcacttatgaaatcctattggtggatatcgtagtctcctctagatattttgccataatacatgccaaaatacaagtccctgctggacattctccctaagcacatctttgtatcatatcttttaattgcagaagtaatgtgtgaatatattttccttataaaagatgcaaacattacaaaaaggcaaatgtaccctttgaccatatcccaaaggatagtctttatcagttcattatttattgctgatcatttttctgttcatatatacatgcgtgtctcagtaaaaattataaaatgggggataattataatacctacctcataatgctttgtgaggattaaatgaattaagatcgataaagtgcttagaattgtgcctgacatgataaatacatactcactgaatgttagtcatcgttattatattcatcatcatcagtattattatttgtagaaaggctttttaacttctgcagaacttagtcaccattaggcagggtgtttgactgaagaaagaccctttgaaggtaacaagttaagaaaatttcccatcatcatgtacttactattgaacatgaaataatcctaggtgttgggggggaaagtactgtgaataatgtgtgtgaaggactttattccgactaatactctttttgtcgcattatatacccagtaaaaaagaaaagagaacataagcaaaatattggtgcactaatgaggaaaaaaagtatgaaaagagaaacagcatcatatttaaaaaatggacagagatagaaacatagttacagatttaaaaggttctgttgaatattatgcttttttctaatatgtttgaaaatttaaacaaaatggtttttaaggaaaatatacatcaatattgactccaagaaaattaggactcttcaaagactctcataaacacagagaacagggaaaaattagcatgtgatcagttaactattactaatgaagcaccaaatccagtttctttctaaggaaaactttatcaaatgttcaaggaactatttcagttatatagaagtacacatcttggctcacgcctgtaatcccagcactttgggaggctgagatggaaggatcatttgaggccaggagcttgagaccagcctggccaacatgttgaaaccccatttttactcaaaaatacaaaacttagccaggcatggtggcacatgcctgtaatcccagctactggggaggctgaggcaggagaatcacttgaatgcaggaggtggaggttgcagtgagccaagatcacgccatggcacttcagcctgagcgacagaatgagactattaaaaaaaaaaaaaaaaa

SEQ ID NO: 202983 - DNA, 1154 bp, Homo sapiens
  Payload ID: 20030
  Gene Name: zinc finger protein 566
  ENST ID: ENST00000587567
  CDS Start-End: 1-234
tttgaatgtaaggaatgtggaaaaacctttatttgtggctcagaccttactcgacatcacagaattcacactggtgagaaaccctatgaatgtaaggaatgtgggaaagcctttagtagtggttcaaacttcactcgacatcagagaattcacacagaaaaatggataactatacatttccctgaaatttgcttttttacattcaactgtacattttggattttccttcaatagatgatgatctaacagtctttctgatggttacagtatgttccacagtgttatttaccaatgccttttcaaccactttcccaattgtgatattatggattgtttgcgcttttttgccatctaaaagtaatgctgcaacaaacactttgtattcttgtctgttttatttctataaaataagcttcccaagtcatttccagtgtttttgctttgttttgttttgagacagagtttcactcttgtttcccaggctggagtgcaatggcgcaatcttggcttactgcaatctccgcctcccgggttcaagagattctcctgcctcagcctcccaagtagctggggttacaggtatatgccactacgcctggaaaattttgtatttttagtagagacggcatttttccatgttggtcaggctggtctcgaactcctgacctcaggtgatccaccctcctcggcctcccaaagtgctggcattataggcatgagccaccgcacccggcgtcatttccagtgttttctatgtttcctaggaaggttttgcttctggaagatttcagagggcaagagaataaaggagtggagtgcagtttttcatatatgtgattctgtgagtgtgtatacacagagatttaatattttaatacatcaggaattgattatacgatctaatgcaggatgtcagacttgtttctatccaggaataaaaccagttatgccagaagtaactattattcacctttctcctactgaattaaaatactatcagttgtatattaaatgctcacatctatttctgttctccatattctagcaatccttgacacttttcaatagcttttattacttggaaataaagatgtatgtatatattattaatatatagtttattatttggaaataaagatgtttcttcatgagaa

SEQ ID NO: 202984 - DNA, 2691 bp, Homo sapiens
  Payload ID: 20031
  Gene Name: zinc finger protein 567
  Uniprot ID: Q8N184
  ENST ID: ENST00000360729
  CDS Start-End: 183-2033
gtctttagctctcatggattgggagctgggaaaggaatgagaagacagaagtcagagacaagaagaggctaacatgactgataccactataatttagtggatcagtgtctttcaatgatgtgactgtggacttcactcaggaggagtggcagcacctggatcatgctcagaagactctatatatggatgtgatgttggaaaactattgccacctcatctctgtggggtgtcacatgaccaaacctgatgtgatcctcaagttggaacgaggagaagagccatggacatcatttgcaggtcatacctgcttggaagaaaactggaaagctgaagactttttagtgaaattcaaggaacaccaagagaagtattctagatcagttgtaagcatcaaccacaaaaaactggtgaaggagaagagtaaaatatatgaaaagacatttactctaggcaaaaaccctgtgaattcaaaaaatctacctcctgaatatgatactcatggaaggattttgaaaaatgtttcagaattaatcatcagtaatctaaatcctgcaagaaagagacttagtgagtataatggatatgggaaatcactcctgagtactaaacaagagactactcatcctgaagtcaaatcccataatcaaagtgccagagctttcagtcataatgaagttcttatgcagtatcagaaaacggaaactccagcacagtcatttggatataatgactgtgagaaatcattccttcaaaggggaggcctgattacacatagtagaccttacaaaggagaaaacccatctgtatataataaaaaaagaagagcaaccaatattgaaaaaaaacatacatgcaatgaatgtgggaaatctttctgcaggaaatcagtattgattctgcatcagggaattcactcagaagaaaaaccctatcaatgtcatcaatgtggaaatgcatttagaaggaaatcatatctcattgatcatcagagaactcacacaggagagaaaccctttgtttgcaatgaatgtggtaagtccttccgcctcaagacagccctcactgatcatcagagaacacacacaggggagaaatcgtatgaatgtctgcaatgtaggaatgccttcagattgaagtcacacctcattcgtcatcagagaactcacacgggagagaaaccatatgagtgtaatgactgtgggaagtccttccgccagaagacaacactctctctacatcagagaatccatacaggtgagaaaccctacatttgtaaagaatgtgggaagtcctttcaccagaaggcaaatcttactgtacatcagagaactcatacaggggaaaagccctatatttgtaatgaatgtgggaaatccttctcccagaagacaacccttgctcttcatgagaaaactcataatgaggagaaaccctatatttgtagtgaatgtggaaagtccttccgccagaagacaacccttgtagcacatcagagaacacatacaggggagaaatcttatgaatgtcctcactgtgggaaggcctttagaatgaagtcatacctcattgatcatcaccgaactcacacaggagagaaaccatatgaatgtaatgaatgtggtaaatcattcagtcaaaagacaaatctcaatctacatcagagaattcatacaggggagaaaccctatgtttgtaatgaatgtgggaagtcctttcgccagaaagcaaccctcactgtacatcagaaaatacataccggccagaaatcctatgaatgtcctcagtgtgggaaagcctttagcaggaagtcatatctcattcatcatcaaagaactcatacgggagagaaaccatataaatgtagtgaatgtggaaagtgcttccgccagaagacaaatcttattgtacatcagagaactcacacaggtgagaaaccctatgtttgtaatgagtgtggtaagtctttcagttataagagaaacctcattgtccatcaaagaactcacaagggagaaaacattgaaatgcaataaatgatgtggtttcttatatgaattctttacaagctgttgtaaacatttagttttaaaaagaaaagcatgctgaaacatgttaatgtaattttaaatcacaagtctaataattattaaagtaccatacggaataactgtctactgtttactagcatataaaataagtatgatcattattattgaactctatcagctatgaagctaaattttaaagtcaactgctcttcctactgactcaaatagtttattttttaaaaatacttatataatacatgcagagacaagatacacaatgattataagtattaatctccataagagaaaatatttatgaactatatttctcattgcactctgtaataaaaagcagttagttgttacttacctaagagttaccacttccgtagcctataacatcaaaacgtagtttttgcatgttttcaattttataaatatatattttatcagacatcatgaattattttgtgtcttgcttatttcactcaattttttaagatctgtacattattgcatgtggcagtagtgtattttcattttgcatactattccattttaagaatatattgctgtttatcctattgatggatatttgtattttttatacttttgtgtaataataaaaatactgctgtaaata

SEQ ID NO: 202985 - DNA, 2825 bp, Homo sapiens
  Payload ID: 20031
  Gene Name: zinc finger protein 567
  Uniprot ID: Q8N184
  ENST ID: ENST00000536254
  CDS Start-End: 223-2166
accgaaggtgaggctggtgggtcccgcgggcgcggagaaggcgggtgacggtgtgaccctctttagctctcatggattgggagctgggaaaggaatgagaagacagaagtcagagacaagaagaggctaacatgactgataccactataatttagtgaactgcctcttttctaaagaggactccaaaggaaggactggtcatctctttcatatctcaaaaccatggctcagggatcagtgtctttcaatgatgtgactgtggacttcactcaggaggagtggcagcacctggatcatgctcagaagactctatatatggatgtgatgttggaaaactattgccacctcatctctgtggggtgtcacatgaccaaacctgatgtgatcctcaagttggaacgaggagaagagccatggacatcatttgcaggtcatacctgcttggaagaaaactggaaagctgaagactttttagtgaaattcaaggaacaccaagagaagtattctagatcagttgtaagcatcaaccacaaaaaactggtgaaggagaagagtaaaatatatgaaaagacatttactctaggcaaaaaccctgtgaattcaaaaaatctacctcctgaatatgatactcatggaaggattttgaaaaatgtttcagaattaatcatcagtaatctaaatcctgcaagaaagagacttagtgagtataatggatatgggaaatcactcctgagtactaaacaagagactactcatcctgaagtcaaatcccataatcaaagtgccagagctttcagtcataatgaagttcttatgcagtatcagaaaacggaaactccagcacagtcatttggatataatgactgtgagaaatcattccttcaaaggggaggcctgattacacatagtagaccttacaaaggagaaaacccatctgtatataataaaaaaagaagagcaaccaatattgaaaaaaaacatacatgcaatgaatgtgggaaatctttctgcaggaaatcagtattgattctgcatcagggaattcactcagaagaaaaaccctatcaatgtcatcaatgtggaaatgcatttagaaggaaatcatatctcattgatcatcagagaactcacacaggagagaaaccctttgtttgcaatgaatgtggtaagtccttccgcctcaagacagccctcactgatcatcagagaacacacacaggggagaaatcgtatgaatgtctgcaatgtaggaatgccttcagattgaagtcacacctcattcgtcatcagagaactcacacgggagagaaaccatatgagtgtaatgactgtgggaagtccttccgccagaagacaacactctctctacatcagagaatccatacaggtgagaaaccctacatttgtaaagaatgtgggaagtcctttcaccagaaggcaaatcttactgtacatcagagaactcatacaggggaaaagccctatatttgtaatgaatgtgggaaatccttctcccagaagacaacccttgctcttcatgagaaaactcataatgaggagaaaccctatatttgtagtgaatgtggaaagtccttccgccagaagacaacccttgtagcacatcagagaacacatacaggggagaaatcttatgaatgtcctcactgtgggaaggcctttagaatgaagtcatacctcattgatcatcaccgaactcacacaggagagaaaccatatgaatgtaatgaatgtggtaaatcattcagtcaaaagacaaatctcaatctacatcagagaattcatacaggggagaaaccctatgtttgtaatgaatgtgggaagtcctttcgccagaaagcaaccctcactgtacatcagaaaatacataccggccagaaatcctatgaatgtcctcagtgtgggaaagcctttagcaggaagtcatatctcattcatcatcaaagaactcatacgggagagaaaccatataaatgtagtgaatgtggaaagtgcttccgccagaagacaaatcttattgtacatcagagaactcacacaggtgagaaaccctatgtttgtaatgagtgtggtaagtctttcagttataagagaaacctcattgtccatcaaagaactcacaagggagaaaacattgaaatgcaataaatgatgtggtttcttatatgaattctttacaagctgttgtaaacatttagttttaaaaagaaaagcatgctgaaacatgttaatgtaattttaaatcacaagtctaataattattaaagtaccatacggaataactgtctactgtttactagcatataaaataagtatgatcattattattgaactctatcagctatgaagctaaattttaaagtcaactgctcttcctactgactcaaatagtttattttttaaaaatacttatataatacatgcagagacaagatacacaatgattataagtattaatctccataagagaaaatatttatgaactatatttctcattgcactctgtaataaaaagcagttagttgttacttacctaagagttaccacttccgtagcctataacatcaaaacgtagtttttgcatgttttcaattttataaatatatattttatcagacatcatgaattattttgtgtcttgcttatttcactcaattttttaagatctgtacattattgcatgtggcagtagtgtattttcattttgcatactattccattttaagaatatattgctgtttatcctattgatggatatttgtattttttatacttttgtgtaataataaaaatactgctgtaaatat

SEQ ID NO: 202986 - DNA, 319 bp, Homo sapiens
  Payload ID: 20031
  Gene Name: zinc finger protein 567
  ENST ID: ENST00000589264
  CDS Start-End: 1-195
cacctggatcatgctcagaagactctatatatggatgtgatgttggaaaactattgccacctcatctctgtggggtgtcacatgaccaaacctgatgtgatcctcaagttggaacgaggagaagagccatggacatcatttgcaggtcatacctgcttgggtggagaggatggcctaactggatgtttatcctagcgtcaacccaccaaagatttggggaacatgtgagtcacattctctgggacattctactcccctttgattttgcatttccagacatttcagtggctaccacaaaaaataaaaagtatctgtggca

SEQ ID NO: 202987 - DNA, 3734 bp, Homo sapiens
  Payload ID: 20031
  Gene Name: zinc finger protein 567
  Uniprot ID: Q8N184
  ENST ID: ENST00000585696
  CDS Start-End: 1231-3081
tttgtatttttagtagagacagggtcttgccatgttagctgggctggttttgaactcctgacctcagatgagccaccacgcccagcctcaagctctcgtttctgtcctcccgtcacctttgaggaagtaagtggtggttttatgccatgagagctgtggggtttcaggtaccatgatgcaaaaacagccacaaaattagcagttcttgtacattgcagttgctatccttcaaggataagctcttttccagtttccgcctgctttggttgctttccagtgctattagttgtttattgtatggcatgtgcacattttataattattatctgagggaaagtgtccctgactgttttactctgttaatgctgcatgctgaaaaatctcaccatgcacatacaatattcctccttagtgaagcctgagaaattgttctacctttgtgatacatgctgtatcttgtacatacttctttgttgtacctgtgacaccttcttgcaggtttgtgtttacttacattttcttgcaagtatgtgttacatgcctctggtaacttctgagcagaaacagtgtttgtcttggcacttccataaataaatacagtttttggcattaagtggcttcacagtaaatattcttagaatgtgttatttaaaaactaactgatggatatttttaccttgatttttgttttccctacaatataaatcataaaacagggaaaattgtagtctttctatattaggattcgtatgactgccacaaggaagcagggtcaaaagtagttcccaatatccagtccacctgttctttttcttttccttttttttgacagagtcctgctctgtcgcccaggctggagtgcagtggcatgatctgggctcactgcatcctccgcctcctggtttcaagctattctcctgcctcagcctcccatgtaactgggattacaggcgcacaccactatgcccagctaattttttgtatttttagtagacatggggtttcaccatcttggccagggtggtttttaactcatgacctcaagtgatccacctacctcagcctcccaaagtgctgggattacaggcatgaaccactgtacctggctaagtccacctgttctgattacagttccatccattctagggatcagtgtctttcaatgatgtgactgtggacttcactcaggaggagtggcagcacctggatcatgctcagaagactctatatatggatgtgatgttggaaaactattgccacctcatctctgtggggtgtcacatgaccaaacctgatgtgatcctcaagttggaacgaggagaagagccatggacatcatttgcaggtcatacctgcttggaagaaaactggaaagctgaagactttttagtgaaattcaaggaacaccaagagaagtattctagatcagttgtaagcatcaaccacaaaaaactggtgaaggagaagagtaaaatatatgaaaagacatttactctaggcaaaaaccctgtgaattcaaaaaatctacctcctgaatatgatactcatggaaggattttgaaaaatgtttcagaattaatcatcagtaatctaaatcctgcaagaaagagacttagtgagtataatggatatgggaaatcactcctgagtactaaacaagagactactcatcctgaagtcaaatcccataatcaaagtgccagagctttcagtcataatgaagttcttatgcagtatcagaaaacggaaactccagcacagtcatttggatataatgactgtgagaaatcattccttcaaaggggaggcctgattacacatagtagaccttacaaaggagaaaacccatctgtatataataaaaaaagaagagcaaccaatattgaaaaaaaacatacatgcaatgaatgtgggaaatctttctgcaggaaatcagtattgattctgcatcagggaattcactcagaagaaaaaccctatcaatgtcatcaatgtggaaatgcatttagaaggaaatcatatctcattgatcatcagagaactcacacaggagagaaaccctttgtttgcaatgaatgtggtaagtccttccgcctcaagacagccctcactgatcatcagagaacacacacaggggagaaatcgtatgaatgtctgcaatgtaggaatgccttcagattgaagtcacacctcattcgtcatcagagaactcacacgggagagaaaccatatgagtgtaatgactgtgggaagtccttccgccagaagacaacactctctctacatcagagaatccatacaggtgagaaaccctacatttgtaaagaatgtgggaagtcctttcaccagaaggcaaatcttactgtacatcagagaactcatacaggggaaaagccctatatttgtaatgaatgtgggaaatccttctcccagaagacaacccttgctcttcatgagaaaactcataatgaggagaaaccctatatttgtagtgaatgtggaaagtccttccgccagaagacaacccttgtagcacatcagagaacacatacaggggagaaatcttatgaatgtcctcactgtgggaaggcctttagaatgaagtcatacctcattgatcatcaccgaactcacacaggagagaaaccatatgaatgtaatgaatgtggtaaatcattcagtcaaaagacaaatctcaatctacatcagagaattcatacaggggagaaaccctatgtttgtaatgaatgtgggaagtcctttcgccagaaagcaaccctcactgtacatcagaaaatacataccggccagaaatcctatgaatgtcctcagtgtgggaaagcctttagcaggaagtcatatctcattcatcatcaaagaactcatacgggagagaaaccatataaatgtagtgaatgtggaaagtgcttccgccagaagacaaatcttattgtacatcagagaactcacacaggtgagaaaccctatgtttgtaatgagtgtggtaagtctttcagttataagagaaacctcattgtccatcaaagaactcacaagggagaaaacattgaaatgcaataaatgatgtggtttcttatatgaattctttacaagctgttgtaaacatttagttttaaaaagaaaagcatgctgaaacatgttaatgtaattttaaatcacaagtctaataattattaaagtaccatacggaataactgtctactgtttactagcatataaaataagtatgatcattattattgaactctatcagctatgaagctaaattttaaagtcaactgctcttcctactgactcaaatagtttattttttaaaaatacttatataatacatgcagagacaagatacacaatgattataagtattaatctccataagagaaaatatttatgaactatatttctcattgcactctgtaataaaaagcagttagttgttacttacctaagagttaccacttccgtagcctataacatcaaaacgtagtttttgcatgttttcaattttataaatatatattttatcagacatcatgaattattttgtgtcttgcttatttcactcaattttttaagatctgtacattattgcatgtggcagtagtgtattttcattttgcatactattccattttaagaatatattgctgtttatcctattgatggatatttgtattttttatacttttgtgtaataataaaaatactgctgt

SEQ ID NO: 202988 - DNA, 2042 bp, Homo sapiens
  Payload ID: 20031
  Gene Name: zinc finger protein 567
  ENST ID: ENST00000588311
  CDS Start-End: 141-1919
agactgctgtgctagcaatcagcgagactccgtgggcataggaccctccgagccagggatcagtgtctttcaatgatgtgactgtggacttcactcaggaggagtggcagcacctggatcatgctcagaagactctatatatggatgtgatgttggaaaactattgccacctcatctctgtggggtgtcacatgaccaaacctgatgtgatcctcaagttggaacgaggagaagagccatggacatcatttgcaggtcatacctgcttggaagaaaactggaaagctgaagactttttagtgaaattcaaggaacaccaagagaagtattctagatcagttgtaagcatcaaccacaaaaaactggtgaaggagaagagtaaaatatatgaaaagacatttactctaggcaaaaaccctgtgaattcaaaaaatctacctcctgaatatgatactcatggaaggattttgaaaaatgtttcagaattaatcatcagtaatctaaatcctgcaagaaagagacttagtgagtataatggatatgggaaatcactcctgagtactaaacaagagactactcatcctgaagtcaaatcccataatcaaagtgccagagctttcagtcataatgaagttcttatgcagtatcagaaaacggaaactccagcacagtcatttggatataatgactgtgagaaatcattccttcaaaggggaggcctgattacacatagtagaccttacaaaggagaaaacccatctgtatataataaaaaaagaagagcaaccaatattgaaaaaaaacatacatgcaatgaatgtgggaaatctttctgcaggaaatcagtattgattctgcatcagggaattcactcagaagaaaaaccctatcaatgtcatcaatgtggaaatgcatttagaaggaaatcatatctcattgatcatcagagaactcacacaggagagaaaccctttgtttgcaatgaatgtggtaagtccttccgcctcaagacagccctcactgatcatcagagaacacacacaggggagaaatcgtatgaatgtctgcaatgtaggaatgccttcagattgaagtcacacctcattcgtcatcagagaactcacacgggagagaaaccatatgagtgtaatgactgtgggaagtccttccgccagaagacaacactctctctacatcagagaatccatacaggtgagaaaccctacatttgtaaagaatgtgggaagtcctttcaccagaaggcaaatcttactgtacatcagagaactcatacaggggaaaagccctatatttgtaatgaatgtgggaaatccttctcccagaagacaacccttgctcttcatgagaaaactcataatgaggagaaaccctatatttgtagtgaatgtggaaagtccttccgccagaagacaacccttgtagcacatcagagaacacatacaggggagaaatcttatgaatgtcctcactgtgggaaggcctttagaatgaagtcatacctcattgatcatcaccgaactcacacaggagagaaaccatatgaatgtaatgaatgtggtaaatcattcagtcaaaagacaaatctcaatctacatcagagaattcatacaggggagaaaccctatgtttgtaatgaatgtgggaagtcctttcgccagaaagcaaccctcactgtacatcagaaaatacataccggccagaaatcctatgaatgtcctcagtgtgggaaagcctttagcaggaagtcatatctcattcatcatcaaagaactcatacgggagagaaaccatataaatgtagtgaatgtggaaagtgcttccgccagaagacaaatcttattgtacatcagagaactcacacaggtggagaggatggcctaactggatgtttatcctagcgtcaacccaccaaagatttggggaacatgtgagtcacattctctgggacattctactcccctttgattttgcatttccagacatttcagtggctaccacaaaaaataaaaagtatctgtggc

SEQ ID NO: 202989 - DNA, 483 bp, Homo sapiens
  Payload ID: 20031
  Gene Name: zinc finger protein 567
  ENST ID: ENST00000591308
  CDS Start-End: 1-153
ttggaaaactattgccacctcatctctgtggggtgtcacatgaccaaacctgatgtgatcctcaagttggaacgaggagaagagccatggacatcatttgcaggtcatacctgcttgggtggagaggatggcctaactggatgtttatcctagcgtcaacccaccaaagatttggggaacatatggagtctcacttcttcacccaggctggagtacaatggtgcgatctcggctgactgcaacctctgcctcccgggttcaagcaattctcctgcctcagcctcccaagtagctgggattacaggcacccattaccatgcccggctaaatttttgtatttttagtagagatggggtttcactgtgttagccaggatggtctcgatctcctgacctcatgatccgcctgcctcggcctcccaaagtactgggattacaggtgtgaaccaccgcgcccggccttgcaattcttatctagacgttt

SEQ ID NO: 202990 - DNA, 2441 bp, Homo sapiens
  Payload ID: 20032
  Gene Name: zinc finger protein 568
  Uniprot ID: Q3ZCX4
  ENST ID: ENST00000333987
  CDS Start-End: 507-2441
ggaaacgtcgctggcgcggagggatggttcggcgctttaggcgtctgtcacagacctatctgcgggtcgccttcacccagcatctcagaaactgcgcgcgggatgaacattcgggtgtttccggcaggtgacgctgccgagtccccgcagcagggggcgagcaagggactcgcggttgacgggacacggatcctctaaggcccagagtgtcccgagtagcggcagtggggagtgctcagggtacgctaatgatctgtgtcttgtaaagagcatattgctgggcttacatccgtttatcttgtttgactgttattttaataggtcctggttccacaaggataaaacacatctgcagtgcaaatagaagtctgaggaacaggtgtcttatcatggaaggagacctgacctgagacctgccttagaggctggagagtcctgaaagagagtggaccctggagttgctggagcttgtcttgacccttctgcccagagcaggcagggtctgaatgacatctcaatcttcagtgatcagcaatagctgtgtgacaatggagcgtttgagccacatgatggaaaggaaagcttggtgttctcaagagtctgccctttccgaggaagaagaggatacaaccaggcctcttgaaacagtgacatttaaggatgtggctgttgaccttacccaggaggagtgggagcaaatgaaacctgctcaaagaaacttgtatcgagatgtgatgctggagaactacagcaacctagtcacagtgggctgtcaagtcaccaaaccggatgtgatattcaagttggagcaagaagaggagccctgggtgatggaggaagaaatgtttgggaggcactgtccagaagtttgggaagttgatgaacagatcaagaagcaacaggaaacacttgtgaggaaagtcacatccatctccaagaaaattctgataaaggaaaaagtcattgaatgtaaaaaagttgcgaaaatatttcctctgagttcagacattgttacttcaagacaaagcttctatgactgtgactcacttgataagggtttggaacataatttagacttacttagatatgagaaaggctgtgtaagagagaaacagagtaatgagtttgggaaaccattttaccattgtgcatcctatgttgtaaccccctttaagtgtaatcagtgtggacaagacttcagtcataaatttgacctcattagacatgagcgaattcatgctggagagaaaccttacgaatgtaaagaatgtggaaaagccttcagtaggaaggaaaatcttattacacatcagaaaattcatactggggaaaaaccgtataagtgtaatgaatgtggaaaagctttcattcagatgtcaaaccttattagacaccacagaattcatactggggagaaaccttatgcatgtaaggattgttggaaagccttcagtcagaaatcaaatctcattgaacatgagcgaattcacactggagagaaaccctatgaatgtaaggaatgtgggaaatccttcagccagaagcaaaatcttattgagcacgagaaaattcatactggggagaaaccttatgcatgtaatgaatgtggtagagctttttctcgaatgtcatctgttacgctacatatgagaagtcacacaggggagaaaccctataaatgtaataaatgtggaaaagctttctctcaatgctcagtatttattatacatatgagaagtcacactggtgagaaaccctatgtatgtagtgaatgtgggaaagccttctctcagagttcatccctaaccgtacatatgcgaaatcatacagctgagaaaccctatgaatgtaaggaatgtggaaaagccttcagcaggaaagaaaatctcattacacatcagaaaattcacactggagagaaaccttatgaatgcagtgaatgtgggaaagcttttattcagatgtcaaacctcattcgacaccagagaattcatacgggtgagaaaccctatgcatgtacagtatgtggaaaagcctttagtcagaaatcaaacctcactgaacatgagaaaattcatactggagagaaaccttatcattgtaatcaatgtgggaaagctttcagtcagagacaaaatcttcttgagcatgaaaaaattcatactggagagaaaccattcaaatgtaatgaatgtggtaaagccttctctcgaatctcatccctcactcttcatgtgagaagtcacacaggggagaaaccctatgaatgtaataaatgtgggaaagccttttctcagtgctcattacttattatacatatgagaagtcatactggtgagaaaccctttgaatgtaatgaatgtgggaaagcattctctcaaagagcatccctttctatacataagagaggtcatacaggtgagagacaccaagtatattaa

SEQ ID NO: 202991 - DNA, 2232 bp, Homo sapiens
  Payload ID: 20032
  Gene Name: zinc finger protein 568
  ENST ID: ENST00000444991
  CDS Start-End: 484-2232
atggttcggcgctttaggcgtctgtcacagacctatctgcgggtcgccttcacccagcatctcagaaactgcgcgcgggatgaacattcgggtgtttccggcaggtgacgctgccgagtccccgcagcagggggcgagcaagggactcgcggttgacgggacacggatcctctaaggcccagagtgtcccgagtagcggcagtggggagtgctcagggtacgctaatgatctgtgtcttgtaaagagcatattgctgggcttacatccgtttatcttgtttgactgttattttaataggtcctggttccacaaggataaaacacatctgcagtgcaaatagaagtctgaggaacaggtgtcttatcatggaaggagacctgacctgagacctgccttagaggctggagagtcctgaaagagagtggaccctggagttgctggagcttgtcttgacccttctgcccagagcaggcagggtctgaatgacatctcaatcttcagtgatcagcaatagctgtgtgacaatggagcgtttgagccacatgatggaaaggaaagcttggtgttctcaagagtctgccctttccgaggaagaagaggatacaaccaggcctcttgaaacagtgacatttaaggatgtggctgttgaccttacccaggaggagtgggagcaaatgaaacctgctcaaagaaacttgtatcgagatgtgatgctggagaactacagcaacctagtcacagtgggctgtcaagtcaccaaaccggatgtgatattcaagttggagcaagaagaggagccctgggtgatggaggaagaaatgtttgggaggcactgtccagaacccagaagaggagagaactgctgtgcgtctgaagtgatggcggagggcttgaagttcaaagatgtggtcatttacttctctcaaaaggagtgggaatgcttgcactctgctcagaaggatttgtaccgagatgtaatgttggaaaattacggcaacctggtcttactggggctttctgatactaagccaaatgtgatctccttattggagcagaagaaagagccctggatggttaagaggaaggagacaaaagaatggtgtccagattgggagtttggaagagaaaccaagaatttatctccaaaggaaaacatttatgaaattagatcaccacaacaggagaaggccagagttatcagagaaatcagatgccaggtggagagacaacagggtcatcaggagggacatttcagaccagctgtaataccatttacttccatgcagtgcacagcccatagagaatatcagtggcttcatactggagagaaatcctgtgaatgcaggaaatgtaagaatgcttttaggtaccagtcatgtcctattcaacatgaaataattcataataaggaaaaagaacctgaatgtggagaatgtaggaaaatctttaatagtggatcagacttgattaagcatcagacgcttcatgaaagcaaaaaacatagtgaaaataacaaatgtgcctttaatcatgattctggaattactcaacctcagagcattaatactggagagaaacctcataaatgtaaggaatgtgggaaagcctttcgttccagctcacaaattagtcagcatcagaggatgcatcttggtgagaaaccctataagtgtagggagtgtgggaaagcctttccatccactgcacagcttaatctacatcagaggatccatactgatgagaaatactatgaaagtaaggcgtgtgggaaggcctttacccgtccctcacacctttttcgacatcaaagaatccatacgggtgagaaaccccataaatgtaaggaatgtggaaaggcttttcgttatgacacacagctgagccttcatcagataatccatactggtgaaagacgctatgaatgcagggagtgtggaaaggtgtacagttgtgcctcacagctgagtctacatcaaagaattcatactggtgagaaaccccatgaatgtaaggaatgtgggaaagcctttatctctgattcacatcttattcgacatcagagtgtccatactggggagaaaccctgtaagtgtaaggaatgtgggaagtcctttcgtcgtggctcagaacttacccgacatcagagagctcatactggtgaaaaaccctatgagtgtaaggaatgtgaaaaggcctttacttgtagcacagaacttgttcgacatcaaaaa

SEQ ID NO: 202992 - DNA, 3774 bp, Homo sapiens
  Payload ID: 20032
  Gene Name: zinc finger protein 568
  Uniprot ID: Q3ZCX4
  ENST ID: ENST00000415168
  CDS Start-End: 377-2119
aaacgtcgctggcgcggagggatggttcggcgctttaggcgtctgtcacagacctatctgcgggtcgccttcacccagcatctcagaaactgcgcgcgggatgaacattcgggtgtttccggcaggtgacgctgccgagtccccgcagcagggggcgagcaagggactcgcggttgacgggacacggatcctctaaggcccagagtgtcccgagtagcggcagtggggagtgctcagggtacgctaatgatctgtgtcttgtaaagagcatattgctgggcttacatccgtttatcttgtttgactgttattttaataggaaacagtgacatttaaggatgtggctgttgaccttacccaggaggagtgggagcaaatgaaacctgctcaaagaaacttgtatcgagatgtgatgctggagaactacagcaacctagtcacagtgggctgtcaagtcaccaaaccggatgtgatattcaagttggagcaagaagaggagccctgggtgatggaggaagaaatgtttgggaggcactgtccagaagtttgggaagttgatgaacagatcaagaagcaacaggaaacacttgtgaggaaagtcacatccatctccaagaaaattctgataaaggaaaaagtcattgaatgtaaaaaagttgcgaaaatatttcctctgagttcagacattgttacttcaagacaaagcttctatgactgtgactcacttgataagggtttggaacataatttagacttacttagatatgagaaaggctgtgtaagagagaaacagagtaatgagtttgggaaaccattttaccattgtgcatcctatgttgtaaccccctttaagtgtaatcagtgtggacaagacttcagtcataaatttgacctcattagacatgagcgaattcatgctggagagaaaccttacgaatgtaaagaatgtggaaaagccttcagtaggaaggaaaatcttattacacatcagaaaattcatactggggaaaaaccgtataagtgtaatgaatgtggaaaagctttcattcagatgtcaaaccttattagacaccacagaattcatactggggagaaaccttatgcatgtaaggattgttggaaagccttcagtcagaaatcaaatctcattgaacatgagcgaattcacactggagagaaaccctatgaatgtaaggaatgtgggaaatccttcagccagaagcaaaatcttattgagcacgagaaaattcatactggggagaaaccttatgcatgtaatgaatgtggtagagctttttctcgaatgtcatctgttacgctacatatgagaagtcacacaggggagaaaccctataaatgtaataaatgtggaaaagctttctctcaatgctcagtatttattatacatatgagaagtcacactggtgagaaaccctatgtatgtagtgaatgtgggaaagccttctctcagagttcatccctaaccgtacatatgcgaaatcatacagctgagaaaccctatgaatgtaaggaatgtggaaaagccttcagcaggaaagaaaatctcattacacatcagaaaattcacactggagagaaaccttatgaatgcagtgaatgtgggaaagcttttattcagatgtcaaacctcattcgacaccagagaattcatacgggtgagaaaccctatgcatgtacagtatgtggaaaagcctttagtcagaaatcaaacctcactgaacatgagaaaattcatactggagagaaaccttatcattgtaatcaatgtgggaaagctttcagtcagagacaaaatcttcttgagcatgaaaaaattcatactggagagaaaccattcaaatgtaatgaatgtggtaaagccttctctcgaatctcatccctcactcttcatgtgagaagtcacacaggggagaaaccctatgaatgtaataaatgtgggaaagccttttctcagtgctcattacttattatacatatgagaagtcatactggtgagaaaccctttgaatgtaatgaatgtgggaaagcattctctcaaagagcatccctttctatacataagagaggtcatacaggtgagagacaccaagtatattaaatgaaagaaggcctcttaaattcaacccatgttttacttaaaatatcttggcataagctcaaaaaagccaggatctttatggaaaaattttaatactttgttaaaaggtgtaagactggaataaatggaaagaaataccatatacatagatggaaaaacccagtattataaaaacctcaattctgaaaatctatagactgaatgcagttccaaacaaaatcaactaagaattttctaggatctttcaaaaatgattataaaattcatgtgaaatagaagtgtatgaattgctgcgacaattttgaaaagaatagaggaaacaccctcactgtatgatataaagttatagtcatttaaaaatgtgtgatattagtacattagtaggtaaatgagcagattttaaagaatagaatatccagaagcagattcatgaatatatgtgaactcagtgtatgttagacctgacatcatgaattagtagggaaatgatgacctagtcaataaaattgctgggaatatttgactctccgtattggagaaaataaaattacaacattacgacatactaaaaaatcaatattcttttttttttttttttttttttgagacaagcgtctcactctgtcgcccaggctggagtacggtggtgcaatctcagctcactgcagcctctgctttccgggtttttttgttttgttttgttttgttttttgtatttttagtagagacggggtttcaccatgttggccagggtagtcttgaactcctgacttcaaaagtgatcgccctctttggcctcccaaagtgctggggtttacaggcttgagccactgcacctggccaaaaaattaacattctaaaggatttaaatactggaatttgaaaagccaaactgtgaaaccattgggagaaaatagatgatattgtctatgacgttgaggccaaggagctttttttttttttttttcaagacaaaaggactctgtaattccacttctaggtatatatacatcctatagaaactcacaaataatgcataagaaatatatatataatatatgtatgtatgtatagccagatgcagtggcacatgcctgtaatcccagctacttgggaggctgatagaagaagataacttgaggtcaggagttcaagaccagcctgggaaacatagcaagaccccatctcttaaaaaaaaagaaatatatagacatatatctgcattgaaaacaacctaaatattcatcagtggggtaatggatgaataaaatatgatatattcaaatgatagaatagtatacagcacttaaaagcagtgaaccagatccatattgtgtaacatggatagttaaaacaatgttgaatgaaaaaaatcaaaatacaaatgaaacattgtgtaataatatttatgtaaattggaatgaaatcatttataaagaacaactgtttctattattgaaaattgtatgtaaaactatttaaaatagaatagaaggatacacacccaattattgatagcattgtctctggagattgaatttgaggctgttgattaaaaggagactttagctttgcttgtagtttttataccttaaaaagactggtagcatataaaataaatcttaaaagctaattatacacaatgacaatatgaa

SEQ ID NO: 202993 - DNA, 1725 bp, Homo sapiens
  Payload ID: 20032
  Gene Name: zinc finger protein 568
  ENST ID: ENST00000433993
  CDS Start-End: 578-1725
ttggaaagcaaagggctggaacgtcccgggctgcggagctcgctgggttgggatggactcgttcagacctgagtgctaggacgccgaagggggcggtgaggcgtcccggcgaggagctggggtcgtctggagtttaaaagacaggtggctctcggagatgtgcgggctgcatgcccacgcttcaccgctaggggaggtcagggctgtgcgatggggaaggaagagagtgtcggggcggtgcagtcgggatgggagaagggtgtcagggccactggcccccagctcggcagagggcagtgtcgggccgcgcgcaggcagggagtgggtgtggtgtgaggctggcgctggagcggtctgggaatgttaggaggtctagggtatcgcggccctgcgtcctcttgtctggactaaaagtccgggcagttctccccggacctggattgtgggcccagcgacaggtgcttggcgatctgtgcccgctgtgcctgcggggctgtggtgggagtcctgtctgcacggtattctgtgtggctgtgcataacccagaagaggagagaactgctgtgcgtctgaagtgatggcggagggcttgaagttcaaagatgtggtcatttacttctctcaaaaggagtgggaatgcttgcactctgctcagaaggatttgtaccgagatgtaatgttggaaaattacggcaacctggtcttactggggctttctgatactaagccaaatgtgatctccttattggagcagaagaaagagccctggatggttaagaggaaggagacaaaagaatggtgtccagattgggagtttggaagagaaaccaagaatttatctccaaaggaaaacatttatgaaattagatcaccacaacaggagaaggccagagttatcagagaaatcagatgccaggtggagagacaacagggtcatcaggagggacatttcagaccagctgtaataccatttacttccatgcagtgcacagcccatagagaatatcagtggcttcatactggagagaaatcctgtgaatgcaggaaatgtaagaatgcttttaggtaccagtcatgtcctattcaacatgaaataattcataataaggaaaaagaacctgaatgtggagaatgtaggaaaatctttaatagtggatcagacttgattaagcatcagacgcttcatgaaagcaaaaaacatagtgaaaataacaaatgtgcctttaatcatgattctggaattactcaacctcagagcattaatactggagagaaacctcataaatgtaaggaatgtgggaaagcctttcgttccagctcacaaattagtcagcatcagaggatgcatcttggtgagaaaccctataagtgtagggagtgtgggaaagcctttccatccactgcacagcttaatctacatcagaggatccatactgatgagaaatactatgaaagtaaggcgtgtgggaaggcctttacccgtccctcacacctttttcgacatcaaagaatccatacgggtgagaaaccccataaatgtaaggaatgtggaaaggcttttcgttatgacacacagctgagccttcatcagataatccatactggtgaaagacgctatgaatgcagggagtgtggaaaggtgtacagttgtgcctcacagctgagtctacatcaaagaattcatactggtgagaaaccccatgaatgtaaggaatgtgggaaagc

SEQ ID NO: 202994 - DNA, 1827 bp, Homo sapiens
  Payload ID: 20032
  Gene Name: zinc finger protein 568
  ENST ID: ENST00000427117
  CDS Start-End: 519-1034
ggtgttgtcctcggaaacgtcgctggcgcggagggatggttcggcgctttaggcgtctgtcacagacctatctgcgggtcgccttcacccagcatctcagaaactgcgcgcgggatgaacattcgggtgtttccggcaggtgacgctgccgagtccccgcagcagggggcgagcaagggactcgcggttgacgggacacggatcctctaaggcccagagtgtcccgagtagcggcagtggggagtgctcagggtacgctaatgatctgtgtcttgtaaagagcatattgctgggcttacatccgtttatcttgtttgactgttattttaataggtcctggttccacaaggataaaacacatctgcagtgcaaatagaagtctgaggaacaggtgtcttatcatggaaggagacctgacctgagacctgccttagaggctggagagtcctgaaagagagtggaccctggagttgctggagcttgtcttgacccttctgcccagagcaggcagggtctgaatgacatctcaatcttcagtgatcagcaatagctgtgtgacaatggagcgtttgagccacatgatggaaaggaaagcttggtgttctcaagagtctgccctttccgaggaagaagaggatacaaccaggcctcttgaaacagtgacatttaaggatgtggctgttgaccttacccaggaggagtgggagcaaatgaaacctgctcaaagaaacttgtatcgagatgtgatgctggagaactacagcaacctagtcacagtgggctgtcaagtcaccaaaccggatgtgatattcaagttggagcaagaagaggagccctgggtgatggaggaagaaatgtttgggaggcactgtccagaacccagaagaggagagaactgctgtgcgtctgaagtgatggcggagatggagttttgcccttgttgcccaggctggagtgcaatggcgcgatctcagctcaccgcaacctctgcctcccgagttgaagtgattctcctgcctcagcctcccgagtagctgggattacaggcatgtgtcaccacacccagctaatttagtgttttttatagagacggggtttctccatgttggtcaggctggtctcaaactcccgacctcaggtgatccgcctgccttggcctcccaaagtgctgggattacaggtgtgaaccaccgcacctggcctttaactgtctttttaaaactgctttttattaaatattgaatagtagaacatgtgtaatatattaagggggactgaacacccatgttaagaggtagaatgctaatgttagaaatcccatgtgtgctttgatcttcccaatctaaatccccttctttagctgtcagaggtatctgttattccgaatcttgtgtttggcatttccttgtttttctttacagtcttaaccatatgtgtttattttcctgttctaatttgatgtcaagaaatcatactgtttggatttttctgcaactctattacttgtcctccaacgagtgttcaagagatccattcacattgcaaacttatcctactgtatagccatccattgtaagaatacattttttcatttatattgtgtacattactccagtgaacattcttgaactcctctttttgtatcctgtgcaagaatttctgtatgtaactaaaaaaggaattgctagctcataggttatatgcattttcagccttactcaacattgcccagttgttttctaaagtgtttattatactcatttactattccttttacttcgtatcctcaccaacacttggtattattaaattttaaatttttacgca

SEQ ID NO: 202995 - DNA, 561 bp, Homo sapiens
  Payload ID: 20032
  Gene Name: zinc finger protein 568
  ENST ID: ENST00000455817
  CDS Start-End: 323-561
gggtgtggtgtgaggctggcgctggagcggtctgggaatgttaggaggtctagggtatcgcggccctgcgtcctcttgtctggactaaaagtccgggcagttctccccggacctggattgtgggcccagcgacaggtgcttggcgatctgtgcccgctgtgcctgcggggctgtggtgggagtcctgtctgcacggtattctgtgtggctgtgcataacccagaagaggagagaactgctgtgcgtctgaagtgatggcggagggctttctgatactaagccaaatgtgatctccttattggagcagaagaaagagccctggatggttaagaggaaggagacaaaagaatggtgtccagattgggagtttggaagagaaaccaagaatttatctccaaaggaaaacatttatgaaattagatcaccacaacaggagaaggccagagttatcagagaaatcagatgccaggtggagagacaacagggtcatcaggagggacatttcagaccagctgtaataccatttacttccatgcagtgcacagcccatagagaatatca

SEQ ID NO: 202996 - DNA, 2378 bp, Homo sapiens
  Payload ID: 20032
  Gene Name: zinc finger protein 568
  Uniprot ID: Q3ZCX4
  ENST ID: ENST00000455427
  CDS Start-End: 330-2045
attcgggtgtttccggcaggtgacgctgccgagtccccgcagcagggggcgagcaagggactcgcggttgacgggacacggatcctctaaggcccagagtgtcccgagtagcggcagtggggagtgctcagggtacgctaatgatctgtgtcttgtaaagagcatattgctgggcttacatccgtttatcttgtttgactgttattttaatagcttggtgttctcaagagtctgccctttccgaggaagaagaggatacaaccaggcctcttgaaacagtgacatttaaggatgtggctgttgaccttacccaggaggagtgggagcaaatgaaacctgctcaaagaaacttgtatcgagatgtgatgctggagaactacagcaacctagtcacagtgggctgtcaagtcaccaaaccggatgtgatattcaagttggagcaagaagaggagccctgggtgatggaggaagaaatgtttgggaggcactgtccagaacccagaagaggagagaactgctgtgcgtctgaagtgatggcggagggcttgaagttcaaagatgtggtcatttacttctctcaaaaggagtgggaatgcttgcactctgctcagaaggatttgtaccgagatgtaatgttggaaaattacggcaacctggtcttactggggctttctgatactaagccaaatgtgatctccttattggagcagaagaaagagccctggatggttaagaggaaggagacaaaagaatggtgtccagattgggagtttggaagagaaaccaagaatttatctccaaaggaaaacatttatgaaattagatcaccacaacaggagaaggccagagttatcagagaaatcagatgccaggtggagagacaacagggtcatcaggagggacatttcagaccagctgtaataccatttacttccatgcagtgcacagcccatagagaatatcagtggcttcatactggagagaaatcctgtgaatgcaggaaatgtaagaatgcttttaggtaccagtcatgtcctattcaacatgaaataattcataataaggaaaaagaacctgaatgtggagaatgtaggaaaatctttaatagtggatcagacttgattaagcatcagacgcttcatgaaagcaaaaaacatagtgaaaataacaaatgtgcctttaatcatgattctggaattactcaacctcagagcattaatactggagagaaacctcataaatgtaaggaatgtgggaaagcctttcgttccagctcacaaattagtcagcatcagaggatgcatcttggtgagaaaccctataagtgtagggagtgtgggaaagcctttccatccactgcacagcttaatctacatcagaggatccatactgatgagaaatactatgaaagtaaggcgtgtgggaaggcctttacccgtccctcacacctttttcgacatcaaagaatccatacgggtgagaaaccccataaatgtaaggaatgtggaaaggcttttcgttatgacacacagctgagccttcatcagataatccatactggtgaaagacgctatgaatgcagggagtgtggaaaggtgtacagttgtgcctcacagctgagtctacatcaaagaattcatactggtgagaaaccccatgaatgtaaggaatgtgggaaagcctttatctctgattcacatcttattcgacatcagagtgtccatactggggagaaaccctgtaagtgtaaggaatgtgggaagtcctttcgtcgtggctcagaacttacccgacatcagagagctcatactggtgaaaaaccctatgagtgtaaggaatgtgaaaaggcctttacttgtagcacagaacttgttcgacatcaaaaagttcacactggggagagaccccataagtgtaaggaatgtgggaaggctttcattcgaaggtcagaactcacacatcatgagagaagtcacactggtgagaaaccctacgagtgtaaggagtgtgggaagccctttggtggtggctcagaacttagttgacaccagaaaattcatactggtgagaaaccatatgaatgtcagcagtgtggaaaggccttcattcgggcctcacaccttagtcaacatcaaagaattcattcaggacagaggagtgaatgaagaaatgagggatggctcagaatttgattgacatgagaaagttcatactgatttggaaaaaaaaacttatgattctaagtgtgagacaccttataaatgttaggaattagcagggatttatttatgtttcagaatttattacacatcatgatacaactggtgaaaaattgaagacctccatgaatgtaaagaaagtagggaggcctttttggt

SEQ ID NO: 202997 - DNA, 1902 bp, Homo sapiens
  Payload ID: 20032
  Gene Name: zinc finger protein 568
  ENST ID: ENST00000586353
  CDS Start-End: 580-699
tgttggaaagcaaagggctggaacgtcccgggctgcggagctcgctgggttgggatggactcgttcagacctgagtgctaggacgccgaagggggcggtgaggcgtcccggcgaggagctggggtcgtctggagtttaaaagacaggtggctctcggagatgtgcgggctgcatgcccacgcttcaccgctaggggaggtcagggctgtgcgatggggaaggaagagagtgtcggggcggtgcagtcgggatgggagaagggtgtcagggccactggcccccagctcggcagagggcagtgtcgggccgcgcgcaggcagggagtgggtgtggtgtgaggctggcgctggagcggtctgggaatgttaggaggtctagggtatcgcggccctgcgtcctcttgtctggactaaaagtccgggcagttctccccggacctggattgtgggcccagcgacaggtgcttggcgatctgtgcccgctgtgcctgcggggctgtggtgggagtcctgtctgcacggtattctgtgtggctgtgcataacccagaagaggagagaactgctgtgcgtctgaagtgatggcggagatggagttttgcccttgttgcccaggctggagtgcaatggcgcgatctcagctcaccgcaacctctgcctcccgagttgaagtgattctcctgcctcagcctcccgagtagctgggattacaggcatgtgtcaccacacccagctaatttagtgttttttatagagacggggtttctccatgttggtcaggctggtctcaaactcccgacctcaggtgatccgcctgccttggcctcccaaagtgctgggattacaggtgtgaaccaccgcacctggcctttaactgtctttttaaaactgctttttattaaatattgaatagtagaacatgtgtaatatattaagggggactgaacacccatgttaagaggtagaatgctaatgttagaaatcccatgtgtgctttgatcttcccaatctaaatccccttctttagctgtcagaggtatctgttattccgaatcttgtgtttggcatttccttgtttttctttacagtcttaaccatatgtgtttattttcctgttctaatttgatgtcaagaaatcatactgtttggatttttctgcaactctattacttgtcctccaacgagtgttcaagagatccattcacattgcaaacttatcctactgtatagccatccattgtaagaatacattttttcatttatattgtgtacattactccagtgaacattcttgaactcctctttttgtatcctgtgcaagaatttctgtatgtaactaaaaaaggaattgctagctcataggttatatgcattttcagccttactcaacattgcccagttgttttctaaagtgtttattatactcatttactattccttttacttcgtatcctcaccaacacttggtattattaaattttaaatttttacgcacttgggtatgagttgatatgtattattttgatttcaaatttgcatattttggtactaaatgaggttgagccccccacccccgcaactttcatgctcattggcattcatgttttctcttttctgaagtacaattttatgtcatttctaatttttctattgatttttatatttccagagtttttgttccttttaatgctttgtatgcatttcttaaatattgtggattgtcgtccttgccggttatatgtgctgtgcatgctttcttactttaacctttaaatgatggtagatattctcaattttaatgccttcaaatttaatgctgttttctttaatttatttacatcttgtgtatgaaatctctcctctcctaagagtaaagatattatccctattttctataaatgata

SEQ ID NO: 202998 - DNA, 308 bp, Homo sapiens
  Payload ID: 20032
  Gene Name: zinc finger protein 568
  ENST ID: ENST00000592567
  CDS Start-End: 232-308
gaaagcaaagggctggaacgtcccgggctgcggagctcgctgggttgggatggactcgttcagacctgagtgctaggacgccgaagggggcggtgaggcgtcccggcgaggagctggggtcgtctggagtttaaaagacaggtggctctcggagatgtgcgggctgcatgcccacgcttcaccgctaggggagaacccagaagaggagagaactgctgtgcgtctgaagtgatggcggagggcttgaagttcaaagatgtggtcatttacttctctcaaaaggagtgggaatgcttgcactctgctca

SEQ ID NO: 202999 - DNA, 516 bp, Homo sapiens
  Payload ID: 20032
  Gene Name: zinc finger protein 568
  ENST ID: ENST00000588596
  CDS Start-End: 341-516
ggagcggtctgggaatgttaggaggtctagggtatcgcggccctgcgtcctcttgtctggactaaaagtccgggcagttctccccggacctggattgtgggcccagcgacaggtgcttggcgatctgtgcccgctgtgcctgcggggctgtggtgggagtcctgtctgcacggtattctgtgtggctgtgcataacccagaagaggagagaactgctgtgcgtctgaagtgatggcggagatgtgatcttgtttaatccacataacaaccctattagacagggctttctgatactaagccaaatgtgatctccttattggagcagaagaaagagccctggatggttaagaggaaggagacaaaagaatggtgtccagattgggagtttggaagagaaaccaagaatttatctccaaaggaaaacatttatgaaattagatcaccacaacaggagaaggccagagttatcagagaaatcagatgccaggtggagagacaacagggtcatcaggaggg

SEQ ID NO: 203000 - DNA, 1914 bp, Homo sapiens
  Payload ID: 20032
  Gene Name: zinc finger protein 568
  ENST ID: ENST00000587857
  CDS Start-End: 324-1914
gtgtttccggcaggtgacgctgccgagtccccgcagcagggggcgagcaagggactcgcggttgacgggacacggatcctctaaggcccagagtgtcccgagtagcggcagtggggagtgctcagggtacgctaatgatctgtgtcttgtaaagagcatattgctgggcttacatccgtttatcttgtttgactgttattttaatagcttggtgttctcaagagtctgccctttccgaggaagaagaggatacaaccaggcctcttgaaacagtgacatttaaggatgtggctgttgaccttacccaggaggagtgggagcaaatgaaacctgctcaaagaaacttgtatcgagatgtgatgctggagaactacagcaacctagtcacagtgggctgtcaagtcaccaaaccggatgtgatattcaagttggagcaagaagaggagccctgggtgatggaggaagaaatgtttgggaggcactgtccagaagtttgggaagttgatgaacagatcaagaagcaacaggaaacacttgtgaggaaagtcacatccatctccaagaaaattctgataaaggaaaaagtcattgaatgtaaaaaagttgcgaaaatatttcctctgagttcagacattgttacttcaagacaaagcttctatgactgtgactcacttgataagggtttggaacataatttagacttacttagatatgagaaaggctgtgtaagagagaaacagagtaatgagtttgggaaaccattttaccattgtgcatcctatgttgtaaccccctttaagtgtaatcagtgtggacaagacttcagtcataaatttgacctcattagacatgagcgaattcatgctggagagaaaccttacgaatgtaaagaatgtggaaaagccttcagtaggaaggaaaatcttattacacatcagaaaattcatactggggaaaaaccgtataagtgtaatgaatgtggaaaagctttcattcagatgtcaaaccttattagacaccacagaattcatactggggagaaaccttatgcatgtaaggattgttggaaagccttcagtcagaaatcaaatctcattgaacatgagcgaattcacactggagagaaaccctatgaatgtaaggaatgtgggaaatccttcagccagaagcaaaatcttattgagcacgagaaaattcatactggggagaaaccttatgcatgtaatgaatgtggtagagctttttctcgaatgtcatctgttacgctacatatgagaagtcacacaggggagaaaccctataaatgtaataaatgtggaaaagctttctctcaatgctcagtatttattatacatatgagaagtcacactggtgagaaaccctatgtatgtagtgaatgtgggaaagccttctctcagagttcatccctaaccgtacatatgcgaaatcatacagctgagaaaccctatgaatgtaaggaatgtggaaaagccttcagcaggaaagaaaatctcattacacatcagaaaattcacactggagagaaaccttatgaatgcagtgaatgtgggaaagcttttattcagatgtcaaacctcattcgacaccagagaattcatacgggtgagaaaccctatgcatgtacagtatgtggaaaagcctttagtcagaaatcaaacctcactgaacatgagaaaattcatactggagagaaaccttatcattgtaatcaatgtgggaaagctttcagtcagagacaaaatcttcttgagcatgaaaaaattcatactggagagaaaccattcaaatgtaatgaatgtggtaaagccttctctcgaatctcatccctcactcttcatgtgagaagtcacacaggggagaaaccctatgaatgtaataaatgtgggaaagcct

SEQ ID NO: 203001 - DNA, 552 bp, Homo sapiens
  Payload ID: 20032
  Gene Name: zinc finger protein 568
  ENST ID: ENST00000587130
  CDS Start-End: 531-552
ggaaacgtcgctggcgcggagggatggttcggcgctttaggcgtctgtcacagacctatctgcgggtcgccttcacccagcatctcagaaactgcgcgcgggatgaacattcgggtgtttccggcaggtgacgctgccgagtccccgcagcagggggcgagcaagggactcgcggttgacgggacacggatcctctaaggcccagagtgtcccgagtagcggcagtggggagtgctcagggtacgctaatgatctgtgtcttgtaaagagcatattgctgggcttacatccgtttatcttgtttgactgttattttaatagcttggtgttctcaagagtctgccctttccgaggaagaagaggatacaaccaggcctcttagatggagtctcactatgttaccaaggctgttctcgaactcctggcctcaagcagtcctcctgcctcagcctcccaaagtgctacgattataggaaacagtgacatttaaggatgtggctgttgaccttacccaggaggagtgggagcaaatgaaacctgctcaaagaaact

SEQ ID NO: 203002 - DNA, 3542 bp, Homo sapiens
  Payload ID: 20032
  Gene Name: zinc finger protein 568
  ENST ID: ENST00000616085
  CDS Start-End: 149-1282
ccctgagtaccagctaaacaagttcttgtatgttgtgatcacaatgcctaattttgatgacttcaaattaattagcattatgtttttacaggaaacagtgacatttaaggatgtggctgttgaccttacccaggaggagtgggagcaaatgaaacctgctcaaagaaacttgtatcgagatgtgatgctggagaactacagcaacctagtcacagtgggctgtcaagtcaccaaaccggatgtgatattcaagttggagcaagaagaggagccctgggtgatggaggaagaaatgtttgggaggcactgtccagaagtttgggaagttgatgaacagatcaagaagcaacaggaaacacttgtgaggaaagtcacatccatctccaagaaaattctgataaaggaaaaagtcattgaatgtaaaaaagttgcgaaaatatttcctctgagttcagacattgttacttcaagacaaagcttctatgactgtgactcacttgataagggtttggaacataatttagacttacttagatatgagaaaggctgtgtaagagagaaacagagtaatgagtttgggaaaccattttaccattgtgcatcctatgttgtaaccccctttaagtgtaatcagtgtggacaagacttcagtcataaatttgacctcattagacatgagcgaattcatgctggagagaaaccttacgaatgtaaagaatgtggaaaagccttcagtaggaaggaaaatcttattacacatcagaaaattcatactggggaaaaaccgtataagtgtaatgaatgtggaaaagctttcattcagatgtcaaaccttattagacaccacagaattcatactggggagaaaccttatgcatgtaaggattgttggaaagccttcagtcagaaatcaaatctcattgaacatgagcgaattcacactggagagaaaccctatgaatgtaaggaatgtgggaaatccttcagccagaagcaaaatcttattgagcacgagaaaattcatactggggagaaaccttatgcatgtaatgaatgtggtagagctttttctcgaatgtcatctgttacgctacatatgagaagtcacacaggggagaaaccctataaatgtaataaatgtggaaaagctttctctcaatgctcagtatttattatacatatgagaagtcacactggtgagaaaccctatgtatgtagtgaatgtgggaaagccttctctcagagttcatccctaaccgtacatgcgaaatcatacagctgagaaaccctatgaatgtaaggaatgtggaaaagccttcagcaggaaagaaaatctcattacacatcagaaaattcacactggagagaaaccttatgaatgcagtgaatgtgggaaagcttttattcagatgtcaaacctcattcgacaccagagaattcatacgggtgagaaaccctatgcatgtacagtatgtggaaaagcctttagtcagaaatcaaacctcactgaacatgagaaaattcatactggagagaaaccttatcattgtaatcaatgtgggaaagctttcagtcagagacaaaatcttcttgagcatgaaaaaattcatactggagagaaaccattcaaatgtaatgaatgtggtaaagccttctctcgaatctcatccctcactcttcatgtgagaagtcacacaggggagaaaccctatgaatgtaataaatgtgggaaagccttttctcagtgctcattacttattatacatatgagaagtcatactggtgagaaaccctttgaatgtaatgaatgtgggaaagcattctctcaaagagcatccctttctatacataagagaggtcatacaggtgagagacaccaagtatattaaatgaaagaaggcctcttaaattcaacccatgttttacttaaaatatcttggcataagctcaaaaaagccaggatctttatggaaaaattttaatactttgttaaaaggtgtaagactggaataaatggaaagaaataccatatacatagatggaaaaacccagtattataaaaacctcaattctgaaaatctatagactgaatgcagttccaaacaaaatcaactaagaattttctaggatctttcaaaaatgattataaaattcatgtgaaatagaagtgtatgaattgctgcgacaattttgaaaagaatagaggaaacaccctcactgtatgatataaagttatagtcatttaaaaatgtgtgatattagtacattagtaggtaaatgagcagattttaaagaatagaatatccagaagcagattcatgaatatatgtgaactcagtgtatgttagacctgacatcatgaattagtagggaaatgatgacctagtcaataaaattgctgggaatatttgactctccgtattggagaaaataaaattacaacattacgacatactaaaaaatcaatattcttttttttttttttttttttttgagacaagcgtctcactctgtcgcccaggctggagtacggtggtgcaatctcagctcactgcagcctctgctttccgggtttttttgttttgttttgttttgttttttgtatttttagtagagacggggtttcaccatgttggccagggtagtcttgaactcctgacttcaaaagtgatcgccctctttggcctcccaaagtgctggggtttacaggcttgagccactgcacctggccaaaaaattaacattctaaaggatttaaatactggaatttgaaaagccaaactgtgaaaccattgggagaaaatagatgatattgtctatgacgttgaggccaaggagctttttttttttttttttcaagacaaaaggactctgtaattccacttctaggtatatatacatcctatagaaactcacaaataatgcataagaaatatatatataatatatgtatgtatgtatagccagatgcagtggcacatgcctgtaatcccagctacttgggaggctgatagaagaagataacttgaggtcaggagttcaagaccagcctgggaaacatagcaagaccccatctcttaaaaaaaaagaaatatatagacatatatctgcattgaaaacaacctaaatattcatcagtggggtaatggatgaataaaatatgatatattcaaatgatagaatagtatacagcacttaaaagcagtgaaccagatccatattgtgtaacatggatagttaaaacaatgttgaatgaaaaaaatcaaaatacaaatgaaacattgtgtaataatatttatgtaaattggaatgaaatcatttataaagaacaactgtttctattattgaaaattgtatgtaaaactatttaaaatagaatagaaggatacacacccaattattgatagcattgtctctggagattgaatttgaggctgttgattaaaaggagactttagctttgcttgtagtttttataccttaaaaagactggtagcatataaaataaatcttaaaagctaattatacacaatgacaatatg

SEQ ID NO: 203003 - DNA, 3797 bp, Homo sapiens
  Payload ID: 20032
  Gene Name: zinc finger protein 568
  Uniprot ID: Q3ZCX4
  ENST ID: ENST00000619231
  CDS Start-End: 210-2144
ttagatttatatcctaatccacaggtcctggttccacaaggataaaacacatctgcagtgcaaatagaagtctgaggaacaggtgtcttatcatggaaggagacctgacctgagacctgccttagaggctggagagtcctgaaagagagtggaccctggagttgctggagcttgtcttgacccttctgcccagagcaggcagggtctgaatgacatctcaatcttcagtgatcagcaatagctgtgtgacaatggagcgtttgagccacatgatggaaaggaaagcttggtgttctcaagagtctgccctttccgaggaagaagaggatacaaccaggcctcttgaaacagtgacatttaaggatgtggctgttgaccttacccaggaggagtgggagcaaatgaaacctgctcaaagaaacttgtatcgagatgtgatgctggagaactacagcaacctagtcacagtgggctgtcaagtcaccaaaccggatgtgatattcaagttggagcaagaagaggagccctgggtgatggaggaagaaatgtttgggaggcactgtccagaagtttgggaagttgatgaacagatcaagaagcaacaggaaacacttgtgaggaaagtcacatccatctccaagaaaattctgataaaggaaaaagtcattgaatgtaaaaaagttgcgaaaatatttcctctgagttcagacattgttacttcaagacaaagcttctatgactgtgactcacttgataagggtttggaacataatttagacttacttagatatgagaaaggctgtgtaagagagaaacagagtaatgagtttgggaaaccattttaccattgtgcatcctatgttgtaaccccctttaagtgtaatcagtgtggacaagacttcagtcataaatttgacctcattagacatgagcgaattcatgctggagagaaaccttacgaatgtaaagaatgtggaaaagccttcagtaggaaggaaaatcttattacacatcagaaaattcatactggggaaaaaccgtataagtgtaatgaatgtggaaaagctttcattcagatgtcaaaccttattagacaccacagaattcatactggggagaaaccttatgcatgtaaggattgttggaaagccttcagtcagaaatcaaatctcattgaacatgagcgaattcacactggagagaaaccctatgaatgtaaggaatgtgggaaatccttcagccagaagcaaaatcttattgagcacgagaaaattcatactggggagaaaccttatgcatgtaatgaatgtggtagagctttttctcgaatgtcatctgttacgctacatatgagaagtcacacaggggagaaaccctataaatgtaataaatgtggaaaagctttctctcaatgctcagtatttattatacatatgagaagtcacactggtgagaaaccctatgtatgtagtgaatgtgggaaagccttctctcagagttcatccctaaccgtacatatgcgaaatcatacagctgagaaaccctatgaatgtaaggaatgtggaaaagccttcagcaggaaagaaaatctcattacacatcagaaaattcacactggagagaaaccttatgaatgcagtgaatgtgggaaagcttttattcagatgtcaaacctcattcgacaccagagaattcatacgggtgagaaaccctatgcatgtacagtatgtggaaaagcctttagtcagaaatcaaacctcactgaacatgagaaaattcatactggagagaaaccttatcattgtaatcaatgtgggaaagctttcagtcagagacaaaatcttcttgagcatgaaaaaattcatactggagagaaaccattcaaatgtaatgaatgtggtaaagccttctctcgaatctcatccctcactcttcatgtgagaagtcacacaggggagaaaccctatgaatgtaataaatgtgggaaagccttttctcagtgctcattacttattatacatatgagaagtcatactggtgagaaaccctttgaatgtaatgaatgtgggaaagcattctctcaaagagcatccctttctatacataagagaggtcatacaggtgagagacaccaagtatattaaatgaaagaaggcctcttaaattcaacccatgttttacttaaaatatcttggcataagctcaaaaaagccaggatctttatggaaaaattttaatactttgttaaaaggtgtaagactggaataaatggaaagaaataccatatacatagatggaaaaacccagtattataaaaacctcaattctgaaaatctatagactgaatgcagttccaaacaaaatcaactaagaattttctaggatctttcaaaaatgattataaaattcatgtgaaatagaagtgtatgaattgctgcgacaattttgaaaagaatagaggaaacaccctcactgtatgatataaagttatagtcatttaaaaatgtgtgatattagtacattagtaggtaaatgagcagattttaaagaatagaatatccagaagcagattcatgaatatatgtgaactcagtgtatgttagacctgacatcatgaattagtagggaaatgatgacctagtcaataaaattgctgggaatatttgactctccgtattggagaaaataaaattacaacattacgacatactaaaaaatcaatattcttttttttttttttttttttttgagacaagcgtctcactctgtcgcccaggctggagtacggtggtgcaatctcagctcactgcagcctctgctttccgggtttttttgttttgttttgttttgttttttgtatttttagtagagacggggtttcaccatgttggccagggtagtcttgaactcctgacttcaaaagtgatcgccctctttggcctcccaaagtgctggggtttacaggcttgagccactgcacctggccaaaaaattaacattctaaaggatttaaatactggaatttgaaaagccaaactgtgaaaccattgggagaaaatagatgatattgtctatgacgttgaggccaaggagctttttttttttttttttcaagacaaaaggactctgtaattccacttctaggtatatatacatcctatagaaactcacaaataatgcataagaaatatatatataatatatgtatgtatgtatagccagatgcagtggcacatgcctgtaatcccagctacttgggaggctgatagaagaagataacttgaggtcaggagttcaagaccagcctgggaaacatagcaagaccccatctcttaaaaaaaaagaaatatatagacatatatctgcattgaaaacaacctaaatattcatcagtggggtaatggatgaataaaatatgatatattcaaatgatagaatagtatacagcacttaaaagcagtgaaccagatccatattgtgtaacatggatagttaaaacaatgttgaatgaaaaaaatcaaaatacaaatgaaacattgtgtaataatatttatgtaaattggaatgaaatcatttataaagaacaactgtttctattattgaaaattgtatgtaaaactatttaaaatagaatagaaggatacacacccaattattgatagcattgtctctggagattgaatttgaggctgttgattaaaaggagactttagctttgcttgtagtttttataccttaaaaagactggtagcatataaaataaatcttaaaagctaattatacacaatgacaatatg

SEQ ID NO: 203004 - DNA, 2441 bp, Homo sapiens
  Payload ID: 20032
  Gene Name: zinc finger protein 568
  ENST ID: ENST00000617745
  CDS Start-End: 201-2108
tatcctaatccacaggtcctggttccacaaggataaaacacatctgcagtgcaaatagaagtctgaggaacaggtgtcttatcatggaaggagacctgacctgagacctgccttagaggctggagagtcctgaaagagagtggaccctggagttgctggagcttgtcttgacccttctgcccagagcaggcagggtctgaatgacatctcaatcttcagtgatcagcaatagctgtgtgacaatggagcgtttgagccacatgatggaaaggaaagcttggtgttctcaagagtctgccctttccgaggaagaagaggatacaaccaggcctcttgaaacagtgacatttaaggatgtggctgttgaccttacccaggaggagtgggagcaaatgaaacctgctcaaagaaacttgtatcgagatgtgatgctggagaactacagcaacctagtcacagtgggctgtcaagtcaccaaaccggatgtgatattcaagttggagcaagaagaggagccctgggtgatggaggaagaaatgtttgggaggcactgtccagaacccagaagaggagagaactgctgtgcgtctgaagtgatggcggagggcttgaagttcaaagatgtggtcatttacttctctcaaaaggagtgggaatgcttgcactctgctcagaaggatttgtaccgagatgtaatgttggaaaattacggcaacctggtcttactggggctttctgatactaagccaaatgtgatctccttattggagcagaagaaagagccctggatggttaagaggaaggagacaaaagaatggtgtccagattgggagtttggaagagaaaccaagaatttatctccaaaggaaaacatttatgaaattagatcaccacaacaggagaaggccagagttatcagagaaatcagatgccaggtggagagacaacagggtcatcaggagggacatttcagaccagctgtaataccatttacttccatgcagtgcacagcccatagagaatatcagtggcttcatactggagagaaatcctgtgaatgcaggaaatgtaagaatgcttttaggtaccagtcatgtcctattcaacatgaaataattcataataaggaaaaagaacctgaatgtggagaatgtaggaaaatctttaatagtggatcagacttgattaagcatcagacgcttcatgaaagcaaaaaacatagtgaaaataacaaatgtgcctttaatcatgattctggaattactcaacctcagagcattaatactggagagaaacctcataaatgtaaggaatgtgggaaagcctttcgttccagctcacaaattagtcagcatcagaggatgcatcttggtgagaaaccctataagtgtagggagtgtgggaaagcctttccatccactgcacagcttaatctacatcagaggatccatactgatgagaaatactatgaaagtaaggcgtgtgggaaggcctttacccgtccctcacacctttttcgacatcaaagaatccatacgggtgagaaaccccataaatgtaaggaatgtggaaaggcttttcgttatgacacacagctgagccttcatcagataatccatactggtgaaagacgctatgaatgcagggagtgtggaaaggtgtacagttgtgcctcacagctgagtctacatcaaagaattcatactggtgagaaaccccatgaatgtaaggaatgtgggaaagcctttatctctgattcacatcttattcgacatcagagtgtccatactggggagaaaccctgtaagtgtaaggaatgtgggaagtcctttcgtcgtggctcagaacttacccgacatcagagagctcatactggtgaaaaaccctatgagtgtaaggaatgtgaaaaggcctttacttgtagcacagaacttgttcgacatcaaaaagttcacactggggagagaccccataagtgtaaggaatgtgggaaggctttcattcgaaggtcagaactcacacatcatgagagaagtcacactggtgagaaaccctacgagtgtaaggagtgtgggaagccctttggtggtggctcagaacttagttgacaccagaaaattcatactggtgagaaaccatatgaatgtcagcagtgtggaaaggccttcattcgggcctcacaccttagtcaacatcaaagaattcattcaggacagaggagtgaatgaagaaatgagggatggctcagaatttgattgacatgagaaagttcatactgatttggaaaaaaaaacttatgattctaagtgtgagacaccttataaatgttaggaattagcagggatttatttatgtttcagaatttattacacatcatgatacaactggtgaaaaattgaagacctccatgaatgtaaagaaagtagggaggcctttttggt

SEQ ID NO: 203005 - DNA, 4061 bp, Homo sapiens
  Payload ID: 20033
  Gene Name: zinc finger protein 569
  Uniprot ID: Q5MCW4
  ENST ID: ENST00000316950
  CDS Start-End: 559-2619
gcagcggaacgattcgattcttctcagcaccaagttgcgctcccaatctctcagagctgggctcgcgggaggccgctcgtgcaaaacctaggctgagctcccctgcgcggagctgtgagccctggaacaccgtggtctgcttctcaggacgcgcaaacagtgaagccagtcccgcccgggtgagccgcgggggcctctgggaagcgtcgcccctggtgtaacggaccgagacttgtggcgctctcagccaccgacagcgccggcctcagtgccgcctctgtcccagcccgcgccggctctgccactttggcagcgttaagtgtggaatcggggcctgtgtccgcgggcttggtgagttcttcatatattaaggattcattcattcatagactcatttattgaaggctgtctgtgtaacaggcacaatcctaggtgcttgggatatagcagtgaacaagagacaaaccccctactatcatggtacttacatttttgtgggctggataataaacaagctctacttctgcaggccccatcccttcccagaaagaagaggaaatgactgagtcccagggaacagtaacattcaaagatgtggctatcgacttcactcaggaggagtggaagagattggatcctgctcagagaaaactgtaccggaatgtgatgctagaaaactataacaacttaatcacagtaggctatccgttcaccaaacctgatgtgattttcaaattggagcaagaagaagaaccatgggtgatggaggaagaagtattaaggagacactggcaaggagaaatatggggagttgatgagcatcagaaaaaccaggacagacttttgagacaagttgaagttaaattccagaaaacactgactgaagaaaaaggcaatgaatgtcaaaagaaatttgcaaatgtatttcctctgaactctgattttttcccttccagacacaatctctatgagtatgacttatttggaaagtgtttagaacataattttgactgtcataataatgtgaaatgccttatgagaaaggagcattgtgaatataatgaacctgtgaaatcatatggtaatagctcatcccattttgtcattaccccctttaagtgtaatcattgtggaaaaggcttcaatcagactttggacctcatcagacatctgagaattcatactggagagaagccctatgaatgtagtaactgtagaaaagccttcagtcacaaggaaaaacttattaaacattataaaattcacagtagggagcagtcttacaaatgtaatgaatgtggtaaagctttcattaaaatgtcaaatctcattagacatcaaagaattcatactggagagaagccctatgcatgtaaggaatgtgagaagtccttcagccagaaatcaaatcttattgatcatgaaaaaattcatactggagagaaaccttatgaatgtaatgagtgtggaaaagcattcagccagaagcaaagcctcattgcacatcagaaagttcatactggggagaaaccttatgcatgtaatgaatgtggtaaagccttccctcgaattgcatcccttgctcttcatatgagaagtcatacaggagaaaaaccttataaatgtgataaatgtggtaaagccttctctcagttttccatgcttattatacatgttagaattcatacaggtgaaaaaccctatgaatgtaatgagtgtggaaaagccttctctcaaagctcagcccttactgtacatatgagaagtcacactggtgagaaaccctatgaatgtaaggaatgcagaaaagccttcagccacaagaaaaacttcattacacaccagaaaattcatactagagagaaaccttatgagtgtaatgaatgtgggaaagcttttatacagatgtcaaatcttgttagacaccagagaattcatactggggaaaaaccctatatatgtaaggaatgtgggaaagcctttagccagaaatcaaatctcattgctcatgaaaaaattcattctggagagaaaccctatgaatgcaatgaatgtggtaaagccttcagccaaaagcaaaacttcattacacatcaaaaagttcatactggagagaaaccttatgattgtaatgaatgtggtaaagccttctctcaaattgcatcccttacccttcatttgagaagtcatacaggggaaaagccttatgaatgtgataaatgtggtaaagccttctctcagtgctcactgcttaatttacatatgagaagtcacacaggtgagaagccctatgtatgtaatgaatgtgggaaagccttctctcaaagaacttcccttattgtgcacatgagaggccatacaggtgaaaaaccctatgaatgtaataaatgtggaaaagccttctcccaaagctcatcccttactatacatatacgaggacatacaggtgagaaacccttcgactgtagtaaatgtggaaaagccttctctcaaatctcatctcttacccttcatatgagaaaacatacaggtgagaagccctatcactgtattgagtgtggcaaggctttcagccaaaagtcgcaccttgttagacaccagagaattcatactcattagaaaccctatgaatattgtgaatatggcaaggccatctgaaggaattaacacctcattgcacattacatgatcacttccagagtagaaaactatgaatgtgggatagccttctgaaaaagccacaaatttatgaaacattagagaattcttccaaggtgacaaattatataatgaaaaagctgttaccagaaactttcagcagacatcttattgataatatttaatcagcattctcattgaaatctgaaacaaggtatcttccatcagcataacaacacaacacttgagctcctagccaatgtattaagtaaggaaaacaagtatcaacgaagaactataaaaataacttttatacaagaaataattagaaaatgtgttgatagaaaacctaagaataaacacaacaatgagttaggtctttatcaagttataaaatatgttgaaaggcacaaaagaacacctgaaaaatgatattttgtctgaaaagacttgacattgtaaaaatataatttctctcccaaatcactaagtttaatatacttctgaagtttacatcagttttattttaaggaacttcacaaacttatccaaaaattttatgtggaaaagtaaagaaacacaaatagctgaaacaaacttgacaaagcaagtagagaagacacactctattattagatatatcatgtacttatttaaagctgctgtcatttaaacaatgtattaccaagtgaataaatcaagcagtagtaagatagtgagcattcatacaaaaatccaagaagatacaggaattctgtgtatgacagtgctattgaaatcactggggaatgaatggcttatttaataaatggaaggttcataggagaaaaattttagctttctactttatatcatatacaaaaataaaatccaactaaagaccagaatataaaaagcaaaattttaaaactatgatgaaagtagaatccgttactttagggtaacaagatttctttaaaaaacatgtaaacatggaatagtctgttgaattttggtgtattggcctcacaggcacccacaaatgtacacaaagagatatatatcactgtgttcctgaatcatggtttgtattgcccaaaattggatataacaaatttttatcaattgtggaatagatgaataagtgtgatcatttctgtgataaaatacagaatttagaaacaaaatctacctatagttatatggatagattacaatatataatattgagagaaaaaattaaaatgcacaaaggaacacagtataacatttgtataatttaataagatcttgcaaagaacagtactgtgtattggtcatggatccatatatgacttggttgccttttgggatgtgggaaaggtttggtgggagttgttatatttatctgtaatatttctttaataaaagagtgaaagcaaata

SEQ ID NO: 203006 - DNA, 3689 bp, Homo sapiens
  Payload ID: 20033
  Gene Name: zinc finger protein 569
  Uniprot ID: Q5MCW4
  ENST ID: ENST00000392149
  CDS Start-End: 187-2247
gcccctggtgtaacggaccgagacttgtggcgctctcagccaccgacagcgccggcctcagtgccgcctctgtcccagcccgcgccggctctgccactttggcagcgttaagtgtggaatcggggcctgtgtccgcgggcttgctctacttctgcaggccccatcccttcccagaaagaagaggaaatgactgagtcccagggaacagtaacattcaaagatgtggctatcgacttcactcaggaggagtggaagagattggatcctgctcagagaaaactgtaccggaatgtgatgctagaaaactataacaacttaatcacagtaggctatccgttcaccaaacctgatgtgattttcaaattggagcaagaagaagaaccatgggtgatggaggaagaagtattaaggagacactggcaaggagaaatatggggagttgatgagcatcagaaaaaccaggacagacttttgagacaagttgaagttaaattccagaaaacactgactgaagaaaaaggcaatgaatgtcaaaagaaatttgcaaatgtatttcctctgaactctgattttttcccttccagacacaatctctatgagtatgacttatttggaaagtgtttagaacataattttgactgtcataataatgtgaaatgccttatgagaaaggagcattgtgaatataatgaacctgtgaaatcatatggtaatagctcatcccattttgtcattaccccctttaagtgtaatcattgtggaaaaggcttcaatcagactttggacctcatcagacatctgagaattcatactggagagaagccctatgaatgtagtaactgtagaaaagccttcagtcacaaggaaaaacttattaaacattataaaattcacagtagggagcagtcttacaaatgtaatgaatgtggtaaagctttcattaaaatgtcaaatctcattagacatcaaagaattcatactggagagaagccctatgcatgtaaggaatgtgagaagtccttcagccagaaatcaaatcttattgatcatgaaaaaattcatactggagagaaaccttatgaatgtaatgagtgtggaaaagcattcagccagaagcaaagcctcattgcacatcagaaagttcatactggggagaaaccttatgcatgtaatgaatgtggtaaagccttccctcgaattgcatcccttgctcttcatatgagaagtcatacaggagaaaaaccttataaatgtgataaatgtggtaaagccttctctcagttttccatgcttattatacatgttagaattcatacaggtgaaaaaccctatgaatgtaatgagtgtggaaaagccttctctcaaagctcagcccttactgtacatatgagaagtcacactggtgagaaaccctatgaatgtaaggaatgcagaaaagccttcagccacaagaaaaacttcattacacaccagaaaattcatactagagagaaaccttatgagtgtaatgaatgtgggaaagcttttatacagatgtcaaatcttgttagacaccagagaattcatactggggaaaaaccctatatatgtaaggaatgtgggaaagcctttagccagaaatcaaatctcattgctcatgaaaaaattcattctggagagaaaccctatgaatgcaatgaatgtggtaaagccttcagccaaaagcaaaacttcattacacatcaaaaagttcatactggagagaaaccttatgattgtaatgaatgtggtaaagccttctctcaaattgcatcccttacccttcatttgagaagtcatacaggggaaaagccttatgaatgtgataaatgtggtaaagccttctctcagtgctcactgcttaatttacatatgagaagtcacacaggtgagaagccctatgtatgtaatgaatgtgggaaagccttctctcaaagaacttcccttattgtgcacatgagaggccatacaggtgaaaaaccctatgaatgtaataaatgtggaaaagccttctcccaaagctcatcccttactatacatatacgaggacatacaggtgagaaacccttcgactgtagtaaatgtggaaaagccttctctcaaatctcatctcttacccttcatatgagaaaacatacaggtgagaagccctatcactgtattgagtgtggcaaggctttcagccaaaagtcgcaccttgttagacaccagagaattcatactcattagaaaccctatgaatattgtgaatatggcaaggccatctgaaggaattaacacctcattgcacattacatgatcacttccagagtagaaaactatgaatgtgggatagccttctgaaaaagccacaaatttatgaaacattagagaattcttccaaggtgacaaattatataatgaaaaagctgttaccagaaactttcagcagacatcttattgataatatttaatcagcattctcattgaaatctgaaacaaggtatcttccatcagcataacaacacaacacttgagctcctagccaatgtattaagtaaggaaaacaagtatcaacgaagaactataaaaataacttttatacaagaaataattagaaaatgtgttgatagaaaacctaagaataaacacaacaatgagttaggtctttatcaagttataaaatatgttgaaaggcacaaaagaacacctgaaaaatgatattttgtctgaaaagacttgacattgtaaaaatataatttctctcccaaatcactaagtttaatatacttctgaagtttacatcagttttattttaaggaacttcacaaacttatccaaaaattttatgtggaaaagtaaagaaacacaaatagctgaaacaaacttgacaaagcaagtagagaagacacactctattattagatatatcatgtacttatttaaagctgctgtcatttaaacaatgtattaccaagtgaataaatcaagcagtagtaagatagtgagcattcatacaaaaatccaagaagatacaggaattctgtgtatgacagtgctattgaaatcactggggaatgaatggcttatttaataaatggaaggttcataggagaaaaattttagctttctactttatatcatatacaaaaataaaatccaactaaagaccagaatataaaaagcaaaattttaaaactatgatgaaagtagaatccgttactttagggtaacaagatttctttaaaaaacatgtaaacatggaatagtctgttgaattttggtgtattggcctcacaggcacccacaaatgtacacaaagagatatatatcactgtgttcctgaatcatggtttgtattgcccaaaattggatataacaaatttttatcaattgtggaatagatgaataagtgtgatcatttctgtgataaaatacagaatttagaaacaaaatctacctatagttatatggatagattacaatatataatattgagagaaaaaattaaaatgcacaaaggaacacagtataacatttgtataatttaataagatcttgcaaagaacagtactgtgtattggtcatggatccatatatgacttggttgccttttgggatgtgggaaaggtttggtgggagttgttatatttatctgtaatatttctttaataaaagagtgaaagcaaata

SEQ ID NO: 203007 - DNA, 1918 bp, Homo sapiens
  Payload ID: 20033
  Gene Name: zinc finger protein 569
  Uniprot ID: Q5MCW4
  ENST ID: ENST00000392150
  CDS Start-End: 293-1876
cttctgcaggccccatcccttcccagaaagaagaggaaatgactgagtcccaggagaaatatggggagttgatgagcatcagaaaaaccaggacagacttttgagacaagttgaagttaaattccagaaaacactgactgaagaaaaaggcaatgaatgtcaaaagaaatttgcaaatgtatttcctctgaactctgattttttcccttccagacacaatctctatgagtatgacttatttggaaagtgtttagaacataattttgactgtcataataatgtgaaatgccttatgagaaaggagcattgtgaatataatgaacctgtgaaatcatatggtaatagctcatcccattttgtcattaccccctttaagtgtaatcattgtggaaaaggcttcaatcagactttggacctcatcagacatctgagaattcatactggagagaagccctatgaatgtagtaactgtagaaaagccttcagtcacaaggaaaaacttattaaacattataaaattcacagtagggagcagtcttacaaatgtaatgaatgtggtaaagctttcattaaaatgtcaaatctcattagacatcaaagaattcatactggagagaagccctatgcatgtaaggaatgtgagaagtccttcagccagaaatcaaatcttattgatcatgaaaaaattcatactggagagaaaccttatgaatgtaatgagtgtggaaaagcattcagccagaagcaaagcctcattgcacatcagaaagttcatactggggagaaaccttatgcatgtaatgaatgtggtaaagccttccctcgaattgcatcccttgctcttcatatgagaagtcatacaggagaaaaaccttataaatgtgataaatgtggtaaagccttctctcagttttccatgcttattatacatgttagaattcatacaggtgaaaaaccctatgaatgtaatgagtgtggaaaagccttctctcaaagctcagcccttactgtacatatgagaagtcacactggtgagaaaccctatgaatgtaaggaatgcagaaaagccttcagccacaagaaaaacttcattacacaccagaaaattcatactagagagaaaccttatgagtgtaatgaatgtgggaaagcttttatacagatgtcaaatcttgttagacaccagagaattcatactggggaaaaaccctatatatgtaaggaatgtgggaaagcctttagccagaaatcaaatctcattgctcatgaaaaaattcattctggagagaaaccctatgaatgcaatgaatgtggtaaagccttcagccaaaagcaaaacttcattacacatcaaaaagttcatactggagagaaaccttatgattgtaatgaatgtggtaaagccttctctcaaattgcatcccttacccttcatttgagaagtcatacaggggaaaagccttatgaatgtgataaatgtggtaaagccttctctcagtgctcactgcttaatttacatatgagaagtcacacaggtgagaagccctatgtatgtaatgaatgtgggaaagccttctctcaaagaacttcccttattgtgcacatgagaggccatacaggtgaaaaaccctatgaatgtaataaatgtggaaaagccttctcccaaagctcatcccttactatacatatacgaggacatacaggtgagaaacccttcgactgtagtaaatgtggaaaagccttctctcaaatctcatctcttacccttcatatgagaaaacatacaggtgagaagccctatcactgtattgagtgtggcaaggctttcagccaaaagtcgcaccttgttagacaccagagaattcatactcattagaaaccctatgaatattgtgaatatggcaaggccatctgaagg

SEQ ID NO: 203008 - DNA, 789 bp, Homo sapiens
  Payload ID: 20033
  Gene Name: zinc finger protein 569
  ENST ID: ENST00000591710
  CDS Start-End: 576-789
gggaaatgtagttcggcgcaggaagcagcggaacgattcgattcttctcagcaccaagttgcgctcccaatctctcagagctgggctcgcgggaggccgctcgtgcaaaacctaggctgagctcccctgcgcggagctgtgagccctggaacaccgtggtctgcttctcaggacgcgcaaacagtgaagccagtcccgcccggagttcttcatatattaaggattcattcattcatagactcatttattgaaggctgtctgtgtaacaggcacaatcctaggtgcttgggatatagcagtgaacaagagacaaaccccctactatcatggtacttacatttttgtgggctggataataaacaagggatgtaaacagctggaaagaactttgcttcaatcattacaacaaggaaactacaaacttctaccgtacaacaaggaaatggacaaactacaaaataatttttctaggacccttcagagaactgaggtcacagggcaaccaagtaatcttaaatctggggaaagaaagatgccagctgagagaaacaggactcaagctttacttacctgggatggactctgccagacaccatataagccactctacttctgcaggccccatcccttcccagaaagaagaggaaatgactgagtcccagggaacagtaacattcaaagatgtggctatcgacttcactcaggaggagtggaagagattggatcctgctcagagaaaactgtaccggaatgtgatgctagaaaactataacaacttaatcacagtag

SEQ ID NO: 203009 - DNA, 579 bp, Homo sapiens
  Payload ID: 20033
  Gene Name: zinc finger protein 569
  ENST ID: ENST00000592490
  CDS Start-End: 330-395
gacttgtggcgctctcagccaccgacagcgccggcctcagtgccgcctctgtcccagcccgcgccggctctgccactttggcagcgttaagtgtggaatcggggcctgtgtccgcgggcttggtgagttcttcatatattaaggattcattcattcatagactcatttattgaaggctgtctgtgtaacaggcacaatcctaggtgcttgggatatagcagtgaacaagagacaaaccccctactatcatggtacttacatttttgtgggctggataataaacaagctctacttctgcaggccccatcccttcccagaaagaagaggaaatgactgagtcccaggagaaatatggggagttgatgagcatcagaaaaaccaggacagacttttgagacaagttgaagttaaattccagaaaacactgactgaagaaaaaggcaatgaatgtcaaaagaaatttgcaaatgtatttcctctgaactctgattttttcccttccagacacaatctctatgagtatgacttatttggaaagtgtttagaacataattttgactgtcataataatgtgaaatg

SEQ ID NO: 203010 - DNA, 1716 bp, Homo sapiens
  Payload ID: 20033
  Gene Name: zinc finger protein 569
  ENST ID: ENST00000448051
  CDS Start-End: 936-1716
agaaaaggtcgcggcgtcgcagtgtctggcagcagcggtgcagctccgcgcagggtttgtaacacggcctcctccccaccaggtcctcccacactggcctctccccggccttccagagagcccgaaagtccggattccctgcagctccgagcctggcccggtcacagggacggggcccagcgtcacactacacgggctggtgtggaagtgcgcaggcacaagcgctctgcgcgcctcccttagcaaccagggcggggagttgagaatcgcaggttggccgcagggaaaaggacgcgcaaacagtgaagccagtcccgcccgggtgagccgcgggggcctctgggaagcgtcgcccctggtgtaacggaccgagacttgtggcgctctcagccaccgacagcgccggcctcagtgccgcctctgtcccagcccgcgccggctctgccactttggcagcgttaagtgtggaatcggggcctgtgtccgcgggcttggtgtatgaacctgcgtgcaaacgtgcatgacagtgggatcttgaatgaatgaaaaactgtggatacaagagttcttcatatattaaggattcattcattcatagactcatttattgaaggctgtctgtgtaacaggcacaatcctaggtgcttgggatatagcagtgaacaagagacaaaccccctactatcatggtacttacatttttgtgggctggataataaacaagggatgtaaacagctggaaagaactttgcttcaatcattacaacaaggaaactacaaacttctaccgtacaacaaggaaatggacaaactacaaaataatttttctaggacccttcagagaactgaggtcacagggcaaccaagtaatcttaaatctggggaaagaaagatgccagctgagagaaacaggactcaagctttacttacctgggatggactctgccagacaccatataagccactctacttctgcaggccccatcccttcccagaaagaagaggaaatgactgagtcccagggaacagtaacattcaaagatgtggctatcgacttcactcaggaggagtggaagagattggatcctgctcagagaaaactgtaccggaatgtgatgctagaaaactataacaacttaatcacagtaggctatccgttcaccaaacctgatgtgattttcaaattggagcaagaagaagaaccatgggtgatggaggaagaagtattaaggagacactggcaaggagaaatatggggagttgatgagcatcagaaaaaccaggacagacttttgagacaagttgaagttaaattccagaaaacactgactgaagaaaaaggcaatgaatgtcaaaagaaatttgcaaatgtatttcctctgaactctgattttttcccttccagacacaatctctatgagtatgacttatttggaaagtgtttagaacataattttgactgtcataataatgtgaaatgccttatgagaaaggagcattgtgaatataatgaacctgtgaaatcatatggtaatagctcatcccattttgtcattaccccctttaagtgtaatcattgtggaaaaggcttcaatcagactttggacctcatcagacatctgagaattcatactggagagaagccctatgaatgtagtaactgtagaaaagccttcagtcacaaggaaaaacttattaaacattataaaattcaca

SEQ ID NO: 203011 - DNA, 762 bp, Homo sapiens
  Payload ID: 20033
  Gene Name: zinc finger protein 569
  ENST ID: ENST00000589833
  CDS Start-End: 214-528
agggatgtaaacagctggaaagaactttgcttcaatcattacaacaaggaaactacaaacttctaccgtacaacaaggaaatggacaaactacaaaataatttttctaggacccttcagagaactgaggtcacagggcaaccaagtaatcttaaatctggggaaagaaagatgccagctgagagaaacaggactcaagctttacttacctgggatggactctgccagacaccatataagccactctacttctgcaggccccatcccttcccagaaagaagaggaaatgactgagtcccagggaacagtaacattcaaagatgtggctatcgacttcactcaggaggagtggaagagattggatcctgctcagagaaaactgtaccggaatgtgatgctagaaaactataacaacttaatcacagtaggctatccgttcaccaaacctgatgtgattttcaaattggagcaagaagaagaaccatgggtgatggaggaagaagtattaaggagacactggcaaggttagtggaagggaaccagacaggtgaggagaggtcagggcctattaatgattaatcagtgaatggttgatccctctaaaatattcttcaaagatattttcagaggttggcacagtggttcatacctatagtcccagcactttgggaagccaaggtggaaggattgcttgagtccaggagtttgggaccagcctgggcaacatagtgagacctcatctcttaaaaaaaaaagagaaaag

SEQ ID NO: 203012 - DNA, 2003 bp, Homo sapiens
  Payload ID: 20034
  Gene Name: zinc finger protein 57
  Uniprot ID: Q68EA5
  ENST ID: ENST00000306908
  CDS Start-End: 149-1816
tccgaggccccgagggcgggacgtttcgtcctccctgccgcgcgtgccctgcctaccacgagcggcccgggagtacctgtacctttcagctgcgccggccgcgaggccacggagagctcgccttggagagcccaggagcaggggagacatggactcagtggtctttgaggatgtggctgtggacttcaccctggaggagtgggctttgctggattctgctcagagggacctctacagagatgtgatgctggagaccttccggaacctggcctcagtagatgatgggactcaatttaaagccaatgggtcagtttctctgcaggatatgtacgggcaagaaaaatctaaggaacagacaataccaaacttcacaggaaataattcctgtgcctacactttagaaaaaaattgtgaaggctatggcactgaagaccaccacaaaaatctgagaaatcatatggtggacagattctgtacacataatgaaggtaatcaatatggagaagccatccatcaaatgccagatcttaccctgcacaagaaagtttctgctggagaaaaaccatatgaatgcaccaagtgcaggacagtcttcacgcatctttcttctcttaaaaggcacgtcaagtctcactgtggacgaaaagcacctccaggtgaggaatgtaagcaggcctgcatttgtccctcacacctacacagtcacggaagaactgacactgaggagaagccgtataagtgtcaagcatgtgggcaaactttccaacatcctcgttacctctcccaccacgtaaagactcacacagcagagaaaacctacaaatgcgagcagtgtcggatggcgtttaatgggttcgcaagcttcactagacatgtgagaactcacacaaaagacaggccatataaatgtcaggaatgtgggagagccttcatttatccctcgacatttcaaagacacatgacaacacacactggagagaagccctataaatgtcagcactgtgggaaagccttcacttacccccaggcttttcaaagacatgagaagacgcacacgggagagaagccctatgaatgcaagcagtgtgggaaaacattcagttggtctgaaaccttgcgagtccacatgaggatccacactggggacaaactctataaatgtgaacactgtgggaaggcttttacctcttccagatcattccaaggtcatttgaggacgcacactggagagaaaccttatgagtgtaaacaatgtgggaaagccttcacttggtcctcaacgtttagagaacatgtgagaattcacacgcaagagcagctctataaatgtgaacaatgtgggaaggcttttacctcttccagatcattccgaggtcatttgaggacgcacactggagagaagccttatgagtgtaaacaatgtggaaaaaccttcacttggtcctcaacgtttagagaacatgtgagaattcacacgcaagagcagctccataaatgtgaacactgtgggaaggcctttacctcttccagagcattccaaggtcatttgaggatgcacactggagagaagccttatgagtgtaaacaatgtggaaaaaccttcacttggtcctcaaccttacataatcatgtgaggatgcacactggagagaaacctcacaaatgtaaacaatgtgggatgtccttcaagtggcactcctccttccggaaccatctgaggatgcacacaggacagaaatcccacgaatgtcagtcatactcaaaagccttcagttgccaagtcattctttctaaaaccagtgagagcacacactaaagagaaattctataactttaatggggtaacctcacattaattcatgtataatgctccagaaaattcacaccaggagagaaatcttacaagtatgatattgtctttgtcaatacctcatttgtaaaacagacccattagtcgtgaatttccagctctttcaaaaataaatgtttatgtgagaaaataa

SEQ ID NO: 203013 - DNA, 1774 bp, Homo sapiens
  Payload ID: 20034
  Gene Name: zinc finger protein 57
  ENST ID: ENST00000523428
  CDS Start-End: 146-1717
gtcccacaagtaggctgatttctgatcgcacagatgggtcagagtaaaacctgactcagtggtctttgaggatgtggctgtggacttcaccctggaggagtgggctttgctggattctgctcagagggacctctacagagatgtgatgctggagaccttccggaacctggcctcagtagatgatgggactcaatttaaagccaatgggtcagtttctctgcaggatatgtacgggcaagaaaaatctaaggaacagacaataccaaacttcacaggaaataattcctgtgcctacactttagaaaaaaattgtgaaggctatggcactgaagaccaccacaaaaatctgagaaatcatatggtggacagattctgtacacataatgaaggtaatcaatatggagaagccatccatcaaatgccagatcttaccctgcacaagaaagtttctgctggagaaaaaccatatgaatgcaccaagtgcaggacagtcttcacgcatctttcttctcttaaaaggcacgtcaagtctcactgtggacgaaaagcacctccaggtgaggaatgtaagcaggcctgcatttgtccctcacacctacacagtcacggaagaactgacactgaggagaagccgtataagtgtcaagcatgtgggcaaactttccaacatcctcgttacctctcccaccacgtaaagactcacacagcagagaaaacctacaaatgcgagcagtgtcggatggcgtttaatgggttcgcaagcttcactagacatgtgagaactcacacaaaagacaggccatataaatgtcaggaatgtgggagagccttcatttatccctcgacatttcaaagacacatgacaacacacactggagagaagccctataaatgtcagcactgtgggaaagccttcacttacccccaggcttttcaaagacatgagaagacgcacacgggagagaagccctatgaatgcaagcagtgtgggaaaacattcagttggtctgaaaccttgcgagtccacatgaggatccacactggggacaaactctataaatgtgaacactgtgggaaggcttttacctcttccagatcattccaaggtcatttgaggacgcacactggagagaaaccttatgagtgtaaacaatgtgggaaagccttcacttggtcctcaacgtttagagaacatgtgagaattcacacgcaagagcagctctataaatgtgaacaatgtgggaaggcttttacctcttccagatcattccgaggtcatttgaggacgcacactggagagaagccttatgagtgtaaacaatgtggaaaaaccttcacttggtcctcaacgtttagagaacatgtgagaattcacacgcaagagcagctccataaatgtgaacactgtgggaaggcctttacctcttccagagcattccaaggtcatttgaggatgcacactggagagaagccttatgagtgtaaacaatgtggaaaaaccttcacttggtcctcaaccttacataatcatgtgaggatgcacactggagagaaacctcacaaatgtaaacaatgtgggatgtccttcaagtggcactcctccttccggaaccatctgaggatgcacacaggacagaaatcccacgaatgtcagtcatactcaaaagccttcagttgccaagtcattctttctaaaaccagtgagagcacacactaaagagaaattctataactttaatggggtaacctcacattaattcatgtataatgctcc

SEQ ID NO: 203014 - DNA, 713 bp, Homo sapiens
  Payload ID: 20034
  Gene Name: zinc finger protein 57
  ENST ID: ENST00000522294
  CDS Start-End: 272-713
gtcccacaagtaggctgatttctgatcgcacagatgggtcagagtaaaaccttctattcttgagcctgtgccccgcgacactgaacttcacaagtgcttctcagttcttccttctcctctcacttggcgggacaagatgaatagaggaagatgatgggggatacatctctttccacaggactcagtggtctttgaggatgtggctgtggacttcaccctggaggagtgggctttgctggattctgctcagagggacctctacagagatgtgatgctggagaccttccggaacctggcctcagtagatgatgggactcaatttaaagccaatgggtcagtttctctgcaggatatgtacgggcaagaaaaatctaaggaacagacaataccaaacttcacaggaaataattcctgtgcctacactttagaaaaaaattgtgaaggctatggcactgaagaccaccacaaaaatctgagaaatcatatggtggacagattctgtacacataatgaaggtaatcaatatggagaagccatccatcaaatgccagatcttaccctgcacaagaaagtttctgctggagaaaaaccatatgaatgcaccaagtgcaggacagtcttcacgcatctttcttctcttaaaaggcacgtcaagtctcactgtggacgaaaagcacctccaggtgaggaatgtaagcaggcctgcatttgtc

SEQ ID NO: 203015 - DNA, 623 bp, Homo sapiens
  Payload ID: 20034
  Gene Name: zinc finger protein 57
  ENST ID: ENST00000590305
  CDS Start-End: 171-623
aatttatgaattgagtccagttccccagtactttcagtgtctccaatcctcctgcacacctgtgtggtttgtcttaggactcagtggtctttgaggatgtggctgtggacttcaccctggaggagtgggctttgctggattctgctcagagggacctctacagagatgtgatgctggagaccttccggaacctggcctcagtagatgatgggactcaatttaaagccaatgggtcagtttctctgcaggatatgtacgggcaagaaaaatctaaggaacagacaataccaaacttcacaggaaataattcctgtgcctacactttagaaaaaaattgtgaaggctatggcactgaagaccaccacaaaaatctgagaaatcatatggtggacagattctgtacacataatgaaggtaatcaatatggagaagccatccatcaaatgccagatcttaccctgcacaagaaagtttctgctggagaaaaaccatatgaatgcaccaagtgcaggacagtcttcacgcatctttcttctcttaaaaggcacgtcaagtctcactgtggacgaaaagcacctccaggtgaggaatgtaagcaggcctgcatttgtccctcacaccta

SEQ ID NO: 203016 - DNA, 2002 bp, Homo sapiens
  Payload ID: 20034
  Gene Name: zinc finger protein 57
  ENST ID: ENST00000614108
  CDS Start-End: 149-1822
tccgaggccccgagggcgggacgtttcgtcctccctgccgcgcgtgccctgcctaccacgagcggcccgggagtacctgtacctttcagctgcgccggccgcgaggccacggagagctcgccttggagagcccaggagcaggggagacatggactcagtggtctttgaggatgtggctgtggacttcaccctggaggagtgggctttgctggattctgctcagagggacctctacagagatgtgatgctggagaccttccggaacctggcctcagtaggatgtgaaatgtgggaaaggaccaatgggtcagtttctctgcaggatatgtacgggcaagaaaaatctaaggaacagacaataccaaacttcacaggaaataattcctgtgcctacactttagaaaaaaagcggatcacgaggtcaggagatcaatcccagctacctgtgaggcggagaaatcatatggtggacagattctgtacacataatgaaggtaatcaatatggagaagccatccatcaaatgccagatcttaccctgcacaagaaagtttctgctggagaaaaaccatatgaatgcaccaagtgcaggacagtcttcacgcatctttcttctcttaaaaggcacgtcaagtctcactgtggacgaaaagcacctccaggtgaggaatgtaagcaggcctgcatttgtccctcacacctacacagtcacggaagaactgacactgaggagaagccgtataagtgtcaagcatgtgggcaaactttccaacatcctcgttacctctcccaccacgtaaagactcacacagcagagaaaacctacaaatgcgagcagtgtcggatggcgtttaatgggttcgcaagcttcactagacatgtgagaactcacacaaaagacaggccatataaatgtcaggaatgtgggagagccttcatttatccctcgacatttcaaagacacatgacaacacacactggagagaagccctataaatgtcagcactgtgggaaagccttcacttacccccaggcttttcaaagacatgagaagacgcacacgggagagaagccctatgaatgcaagcagtgtgggaaaacattcagttggtctgaaaccttgcgagtccacatgaggatccacactggggacaaactctataaatgtgaacactgtgggaaggcttttacctcttccagatcattccaaggtcatttgaggacgcacactggagagaaaccttatgagtgtaaacaatgtgggaaagccttcacttggtcctcaacgtttagagaacatgtgagaattcacacgcaagagcagctctataaatgtgaacaatgtgggaaggcttttacctcttccagatcattccgaggtcatttgaggacgcacactggagagaagccttatgagtgtaaacaatgtggaaaaaccttcacttggtcctcaacgtttagagaacatgtgagaattcacacgcaagagcagctccataaatgtgaacactgtgggaaggcctttacctcttccagagcattccaaggtcatttgaggatgcacactggagagaagccttatgagtgtaaacaatgtggaaaaaccttcacttggtcctcaaccttacataatcatgtgaggatgcacactggagagaaacctcacaaatgtaaacaatgtgggatgtccttcaagtggcactcctccttccggaaccatctgaggatgcacacaggacagaaatcccacgaatgtcagtcatactcaaaagccttcagttgccaagtcattctttctaaaaccagtgagagcacacactaaagagaaattctataactttaatggggtaacctcacattaattcatgtataatgctccagaaaattcacaccaggagagaaatcttacaagtatgatattgtctttgtcaatacctcatttgtaaaacagacccattagtcgtgaatttccagctctttcaaaaataaatgtttatgtgag

SEQ ID NO: 203017 - DNA, 5559 bp, Homo sapiens
  Payload ID: 20035
  Gene Name: zinc finger protein 570
  Uniprot ID: Q96NI8
  ENST ID: ENST00000330173
  CDS Start-End: 530-2140
gtagtgtgacgctgggccccgtccctgtgaccgggccaggctcggagctgcagggaatccggactttcgggctctctggaaggccggggagaggccagtgtgggaggacctggtggggaggaggccgtgttacaaaccctgcgcggagctgcaccgctgctgccagacactgcgacgccgcgaccttttctactccggactacgtttcccagcggaccccgcgggagttgggccggcggcccctttgtgtcctccgggggcggaggcagctgaggcgcttctttccgggcccgtaagggctgggttccatccaactaagggtagcggtgagacccgagtgcagattccccgagccttcggggcaggaaggagatcttccaccagttctgttctgcaggtcgggagtgggctgaggagtggcgtgtgggtctccggaagctcgtcgcaggccatctgtgtgactccggtgcgagtggagtcatctgaggccactgctatttcccaagagaagagccaggaggaagaaagaatggctgttgggcttcttaaagccatgtaccaggagttggtgaccttcagagatgtggctgtagacttctcccaagaggaatgggattgtctggattcttctcaaagacatctgtacagtaatgtgatgctagagaactacaggatcttggtatcactgggactttgcttttccaaaccaagtgtgatattattgttggaacaaggaaaagcaccctggatggtgaagagagagctgacaaaaggcttgtgctcaggctgggagcctatatgtgagactgaagaattaaccccaaagcaggatttttatgaagaacatcaatcccagaagataatagaaacacttacaagctataaccttgaatactccagtttgagagaagagtggaaatgtgagggctattttgaaaggcaaccaggtaatcagaaggcgtgtttcaaggaagagataatcactcatgaagaacccctttttgatgagagagaacaagaatataaatcttggggaagttttcatcagaacccactgctttgtacacaaaagataatccccaaagaggagaaagtacataaacatgacacacaaaagagaagctttaaaaaaaatttaatggctattaagcccaagagtgtctgtgcagagaagaaacttttgaaatgtaatgactgtgaaaaagtcttcagccagagttcatcccttactcttcatcaaagaattcatactggagagaaaccctataaatgtatagagtgtggaaaagccttcagccagagatcaaatcttgttcaacatcagaggattcatactggagaaaaaccctatgaatgtaaggaatgtaggaaagccttcagtcagaatgcacacctagttcaacatctgcgagttcatactggagaaaaaccttacgaatgtaaggtatgtcgaaaagccttcagccagtttgcctaccttgctcaacatcagagagttcacacgggagagaaaccctatgaatgtatcgaatgtgggaaagcatttagcaacagatcatccattgctcaacaccagagagttcatacaggagagaaaccctatgaatgtaatgtctgtgggaaagcatttagccttcgtgcataccttactgtacatcagagaatacatactggagagagaccctatgaatgtaaggaatgtgggaaggcctttagccagaattcacaccttgctcaacatcagagaattcatactggagaaaaaccttataagtgtcaggaatgtaggaaagcattcagccagattgcctaccttgctcagcatcaaagagttcatactggagagaaaccctatgaatgtattgaatgtgggaaggcttttagcaatgactcgtcccttactcaacatcagcgagttcatactggagagaaaccttatgaatgtactgtttgtggaaaggcttttagttactgtggatcccttgcccaacatcagagaattcatactggagagagaccctatgaatgtaaggaatgcaaaaaaaccttcaggcagcatgcacaccttgctcatcaccagagaattcacattggggagtcactgtcaccacccaacccagtcaatcaccaagtcctatagatcctgagtcctaaatgtttctagaatttatactgttttttatctttaatgttgtcaccttggtctgattcatctcactctgattactaatatagctttcaaacaggttttcctgtatttatttttgctacctttaaatccatttcccacaatgcactcaaacggatcttttttttctttttttttctttttgagacaatgtcttgctgtgttgcccaggctggagtacagtgggacgatctcagctcactgcaacctctgactcccagcctctgcctccagggttcaagcaattctcatgcatcagcctcccgagtagctgggactatagacatgcaccaccatgcctggctaatttttgtattttttagtagagatggggttttgccatgttggccaggctggtcttgaactcctgatctcaagtgatctgtctgtctcggcctcccaaagtgctgggattacaggcatgagccaccacgcccagcctcaaagtgttctttttaaagaataagaaaacacacatgggctgggtgtgatggctcatgcctgtaatcgcagcgctttgggaggccaaggcaggcagatcacccaaggtcaggagtttgagaccagccagactaacatggcgaaactccatctctactaaaaatacaaaattagccgggcgtggtggtgcacacttgtaatcccagctactctggaggctgaggcaggagcattgcttgaacccaggaggcagaggttgcagtgagccgagatggcgccattgcattccaacctgggcaacaaggctgcaactccgtctcaaaataaaaagaaaagaagagaaaagaaaacacatgttactatctccagttaaaactttttttttttttttgcttgttattgttcttagactaatattcacagcctttaaaattgtctgcaaggcttttgttatttggttcttacacaccattcagccttattttattccagtcttcttctttgggcactaggcacttcccaggactaagagcttagattctggaaaatcatagctccaacactactatggcattgcgtgactttgagcaatttgcttatctaaacctcagggttttctttaaatcttaaaataggaataatataggatactgtactgtagaaatgtaagtattaagtgaaatagtgtctgttgtagattgatgcatattaaatgagaaatttgcatgtaaaatacttcatatagtctgtcaaatatagcagatattcaataaatgataatagctaacatgtattgagtgcccactacacatcaggcactgtcttacatactctacatatattaactcatctactcctcacaaaacaagattccttattggacaaagtggagcattcctgcaaaacaccagttcagaatttggaaaatctaaaaatgttagaacataaatggcagtctttgtactgtagcttagtagttgttatgaagtcaggtagtggaactataacactgacagccagttttaggaagtttctacagataatgaattggataagccaattaagaaaaatagaattcactgggaagaatgcagaacctacatttaaatcaaggaaggaatagaaatggtcacaattaaccaaaaaaaatcaataaacatagaaattcatgtgatccccttaaataggcaccacaccctggccaggtgcagtagctcattcctgtaatcccagcactttgggaggccgaggtgggtggattatgaggtcaggagttcgagaccagcctgcctaacatggtgaaaccccatctctactaaaaatataacagttagccaggtgtggtggcgcacgcctgtaatcccagctactcaggaggctgaggcaagagaattgcttgaacccaggagacagaggttgcagtgagctgagatcgtgctactgcaccccagcctgggcaatacagcaagactccatctcaaaaaaaaaaaaaaaaaaaaaaaaaaagcactacccccagctaattgtatggttaaattcgggtaatttagaaggcatgtaaagtgttccatactatagaaaaatgtaaagttttaaaattatttatccagtggttgcaaaattgaaatcaaaaggggattaagggaagaaaacagatagatacacaaataatataggcattcattctgttaatattgagtaattactgtttgtcagacactgttttaggtatgaggaaatgacagtgagcaatacaaaggccacattctcatggagtaaaattccagaggtggagacatgtaattaatacttaaatataaaacagtagattttctaaacgcagaaaacggaagagtaacaagaaactaaatcaaggagcattatatagcctagactgcagagactcaatataataaagttggcgattcttcctaattatcaaatttactgcaattccagccaaaatgtttcagtggttttttttgtttgttgtttttgtttttgttttgccctttagcttcacaggtttgttctgaaatttatgaggtataaattcttaagagcagcaagaaaaatttcgaatctatttgtagaaactgcatatgatgatggttcataccagtagagagaaagattggatttgggggtattactagtagtaaggggattcactagtagtaagggaaatgcaaaataaaatcacattgaactagttcaaaatcatcacattggcaaaagcattagagtgccaattactggaaagatgtggagcaataggaacactcatacggtgctataggaagtagttgtgtttagcataatttggcaatgtctagtaaagttgaagatgtgaataatctttgacccagcaattccatgtttaaacctctacatagtctctcctcgtgtttcaaggagatacatatgatggtccattgcagaactgtgagaatgagaagttgaaagcaatctaaccattaggttaaatacaagatagaatgcaaactaaaatgaataactagagatatttctgtcaacatgggtaaacctcaaaaatagtattaatgaaattgaactacagactattttatataatacagtataacgtacaatttcaaaacatgcaaattagtgttatgtatttttgtcatggctaaatactatataaaaaggatctaaaagaattaataaaataatcatcagattcagaacagtggtgacctgcagggagaaagacaactgagattggggaaaggatgcaaatgaaaatacctttaattattcatttcttttaaaaataagcaaatactgtatagccaattcttaaaatttgataaagctggctgtgagtatatgagtcagttcttactctctgtatctttctgtataaactatttcataatgcaaaaaaataaagaatatttaaatga

SEQ ID NO: 203018 - DNA, 587 bp, Homo sapiens
  Payload ID: 20035
  Gene Name: zinc finger protein 570
  ENST ID: ENST00000590664
  CDS Start-End: 191-451
gcagattccccgagccttcggggcaggaaggagatcttccaccagttctgttctgcaggtcgggagtgggctgaggagtggcgtgtgggtctccggaagctcgtcgcaggccatctgtgtgactccggtgcgagtggagtcatctgaggccactgctatttcccaagagaagagccaggaggaagaaagaatggctgttgggcttcttaaagccatgtaccaggagttggtgaccttcagagatgtggctgtagacttctcccaagaggaatgggattgtctggattcttctcaaagacatctgtacagtaatgtgatgctagagaactacaggatcttggtatcactgggactttgcttttccaaaccaagtgtgatattattgttggaacaaggaaaagcaccctggatggtgaagagagagctgacaaaaggcttgtgctcaggttagtgaagaggaaattggcaaaaatctttgcacgtgacagctcagcttgactcaaaggctgggagcctatatgtgagactgaagaattaaccccaaagcaggatttttatgaagaacatcaatcccagaagataataga

SEQ ID NO: 203019 - DNA, 1964 bp, Homo sapiens
  Payload ID: 20035
  Gene Name: zinc finger protein 570
  ENST ID: ENST00000588644
  CDS Start-End: 296-430
gcttctttccgggcccgtaagggctgggttccatccaactaagggtagcggtgagacccgagtgcagattccccgagccttcggggcaggaaggagatcttccaccagttctgttctgcaggtcgggagtgggctgaggagtggcgtgtgggtctccggaagctcgtcgcaggccatctgtgtgactccggtgcgagtggaggagttggtgaccttcagagatgtggctgtagacttctcccaagaggaatgggattgtctggattcttctcaaagacatctgtacagtaatgtgatgctagagaactacaggatcttggtatcactgggactttgcttttccaaaccaagtgtgatattattgttggaacaaggaaaagcaccctggatggtgaagagagagctgacaaaaggcttgtgctcaggttagtgaagaggaaattggcaaaaatctttgcacgtgacagctcagcttgactcaaaggctgggagcctatatgtgagactgaagaattaaccccaaagcaggatttttatgaagaacatcaatcccagaagataatagaaacacttacaagctataaccttgaatactccagtttgagagaagagtggaaatgtgagggctattttgaaaggcaaccaggtaatcagaaggcgtgtttcaaggaagagataatcactcatgaagaacccctttttgatgagagagaacaagaatataaatcttggggaagttttcatcagaacccactgctttgtacacaaaagataatccccaaagaggagaaagtacataaacatgacacacaaaagagaagctttaaaaaaaatttaatggctattaagcccaagagtgtctgtgcagagaagaaacttttgaaatgtaatgactgtgaaaaagtcttcagccagagttcatcccttactcttcatcaaagaattcatactggagagaaaccctataaatgtatagagtgtggaaaagccttcagccagagatcaaatcttgttcaacatcagaggattcatactggagaaaaaccctatgaatgtaaggaatgtaggaaagccttcagtcagaatgcacacctagttcaacatctgcgagttcatactggagaaaaaccttacgaatgtaaggtatgtcgaaaagccttcagccagtttgcctaccttgctcaacatcagagagttcacacgggagagaaaccctatgaatgtatcgaatgtgggaaagcatttagcaacagatcatccattgctcaacaccagagagttcatacaggagagaaaccctatgaatgtaatgtctgtgggaaagcatttagccttcgtgcataccttactgtacatcagagaatacatactggagagagaccctatgaatgtaaggaatgtgggaaggcctttagccagaattcacaccttgctcaacatcagagaattcatactggagaaaaaccttataagtgtcaggaatgtaggaaagcattcagccagattgcctaccttgctcagcatcaaagagttcatactggagagaaaccctatgaatgtattgaatgtgggaaggcttttagcaatgactcgtcccttactcaacatcagcgagttcatactggagagaaaccttatgaatgtactgtttgtggaaaggcttttagttactgtggatcccttgcccaacatcagagaattcatactggagagagaccctatgaatgtaaggaatgcaaaaaaaccttcaggcagcatgcacaccttgctcatcaccagagaattcacattggggagtcactgtcaccacccaacccagtcaatcaccaagtcctatagatcctgagtcctaaatgtttctagaatttatactgttttttatctttaatgttgtcaccttggtctgattcatctcactctgattactaatatagctttcaaacaggttttcctgtatttatttt

SEQ ID NO: 203020 - DNA, 1985 bp, Homo sapiens
  Payload ID: 20035
  Gene Name: zinc finger protein 570
  ENST ID: ENST00000586475
  CDS Start-End: 120-1898
gagagaccctgtccagtgacatctgaggtcgtgcgaatatgcgaccttttgtgtgaccatggtcgcgttttatattctcgtggctgtttgattctgaccttgcagttttgtcagagacaatgtgcatgtatttgttctttctggacttctcgattgtcgggagtgggctgaggagtggcgtgtgggtctccggaagctcgtcgcaggccatctgtgtgactccggtgcgagtggagtcatctgaggccactgctatttcccaagagaagagccaggaggaagaaagaatggctgttgggcttcttaaagccatgtaccaggagttggtgaccttcagagatgtggctgtagacttctcccaagaggaatgggattgtctggattcttctcaaagacatctgtacagtaatgtgatgctagagaactacaggatcttggtatcactgggactttgcttttccaaaccaagtgtgatattattgttggaacaaggaaaagcaccctggatggtgaagagagagctgacaaaaggcttgtgctcaggctgggagcctatatgtgagactgaagaattaaccccaaagcaggatttttatgaagaacatcaatcccagaagataatagaaacacttacaagctataaccttgaatactccagtttgagagaagagtggaaatgtgagggctattttgaaaggcaaccaggtaatcagaaggcgtgtttcaaggaagagataatcactcatgaagaacccctttttgatgagagagaacaagaatataaatcttggggaagttttcatcagaacccactgctttgtacacaaaagataatccccaaagaggagaaagtacataaacatgacacacaaaagagaagctttaaaaaaaatttaatggctattaagcccaagagtgtctgtgcagagaagaaacttttgaaatgtaatgactgtgaaaaagtcttcagccagagttcatcccttactcttcatcaaagaattcatactggagagaaaccctataaatgtatagagtgtggaaaagccttcagccagagatcaaatcttgttcaacatcagaggattcatactggagaaaaaccctatgaatgtaaggaatgtaggaaagccttcagtcagaatgcacacctagttcaacatctgcgagttcatactggagaaaaaccttacgaatgtaaggtatgtcgaaaagccttcagccagtttgcctaccttgctcaacatcagagagttcacacgggagagaaaccctatgaatgtatcgaatgtgggaaagcatttagcaacagatcatccattgctcaacaccagagagttcatacaggagagaaaccctatgaatgtaatgtctgtgggaaagcatttagccttcgtgcataccttactgtacatcagagaatacatactggagagagaccctatgaatgtaaggaatgtgggaaggcctttagccagaattcacaccttgctcaacatcagagaattcatactggagaaaaaccttataagtgtcaggaatgtaggaaagcattcagccagattgcctaccttgctcagcatcaaagagttcatactggagagaaaccctatgaatgtattgaatgtgggaaggcttttagcaatgactcgtcccttactcaacatcagcgagttcatactggagagaaaccttatgaatgtactgtttgtggaaaggcttttagttactgtggatcccttgcccaacatcagagaattcatactggagagagaccctatgaatgtaaggaatgcaaaaaaaccttcaggcagcatgcacaccttgctcatcaccagagaattcacattggggagtcactgtcaccacccaacccagtcaatcaccaagtcctatagatcctgagtcctaaatgtttctagaatttatactgttttttatctttaatgttgtcaccttggtctgattcatctcactctgattac

SEQ ID NO: 203021 - DNA, 581 bp, Homo sapiens
  Payload ID: 20035
  Gene Name: zinc finger protein 570
  ENST ID: ENST00000589725
  CDS Start-End: 137-581
agtgcgaggctgtcaccccgtgtgcctgtccacgtcctgtgtgactgggtgcgaggaagtcaatggcaccgtggaatgtgaggcttcatctgaggccactgctatttcccaagagaagagccaggaggaagaaagaatggctgttgggcttcttaaagccatgtaccaggagttggtgaccttcagagatgtggctgtagacttctcccaagaggaatgggattgtctggattcttctcaaagacatctgtacagtaatgtgatgctagagaactacaggatcttggtatcactgggactttgcttttccaaaccaagtgtgatattattgttggaacaaggaaaagcaccctggatggtgaagagagagctgacaaaaggcttgtgctcaggctgggagcctatatgtgagactgaagaattaaccccaaagcaggatttttatgaagaacatcaatcccagaagataatagaaacacttacaagctataaccttgaatactccagtttgagagaagagtggaaatgtgagggctattttgaaaggcaaccaggtaatcagaaggcgtgtttcaaggaag

SEQ ID NO: 203022 - DNA, 577 bp, Homo sapiens
  Payload ID: 20035
  Gene Name: zinc finger protein 570
  ENST ID: ENST00000587363
  CDS Start-End: 307-441
gtctttttgggtctctacctgaggctagaatacagcggggtgaaggtggtgagagctccagggccagtgaaggccgggtcagctggagccttaaggtcctgacagcggctagaagagggaggagtgacgtagtgtgactgtatgtgtgaaacttcggccatggaatttggagtggggtttccagggcgagagaccctgtccagtgacatctgaggtcgtgcgaatatgcgaccttttgtgtgaccatggtcgcgttttatattctcgtggctgtttgattctgaccttgcagttttgtcagagacaatgtgcatgtatttgttctttctggacttctcgattgtgagtgtgacagtgttattggatttcatgacccgggatcgtgagcgaaaagtagtgtggccagaccgcctgacttctaaacagacttggccttactagctgtgtcatctcagactaggtcgggagtgggctgaggagtggcgtgtgggtctccggaagctcgtcgcaggccatctgtgtgactccggtgcgagtggagtcatctgaggccactgctatttcccaagagaagagc

SEQ ID NO: 203023 - DNA, 4113 bp, Homo sapiens
  Payload ID: 20036
  Gene Name: zinc finger protein 571
  Uniprot ID: Q7Z3V5
  ENST ID: ENST00000328550
  CDS Start-End: 120-1949
acacttacgctgttatgtcttgacgcacggagcttgtctgcgccggccagcactggcttctctggactttgcacacctccaggagaagaacccagaaaattgatcagttctaaaaaaccatgccccacttgttggtgactttcagggatgtggccattgacttctctcaggaggaatgggaatgcctggaccctgctcagagggacttgtacagggatgtgatgttggagaactacagcaacctgatctcattggacttggaatccagttgtgtgaccaaaaagttatctccagaaaaggaaatttatgaaatggaatcactccagtgggagaatatggggaaacgtatcaaccatcaccttcaatacaatggtcttggagacaatatggagtgcaaaggcaacttagagggtcaagaagcaagtcaggaagggctttacatgtgtgtcaaaattacctgtgaagaaaaggccactgaaagtcattcaacctcttctacttttcatcggataattcctaccaaggaaaaattgtacaaatgtaaggaatgcagacaaggtttcagctacctgtcatgccttattcaacatgaggaaaatcataatatagaaaaatgctctgaagttaagaaacacaggaatacctttagcaaaaagccaagctatattcaacatcagagaattcagactggtgagaaaccttatgagtgtatggaatgtggaaaggcctttggtcgtacttctgatctcattcaacatcagaaaattcatactaatgaaaaaccttatcagtgtaacgcatgtgggaaagcttttattcgtggttcacagctcactgaacatcagagagttcatacaggagagaaaccatatgaatgtaagaaatgtggaaaagcctttagttattgttcacaatatactcttcatcagagaattcatagtggtgaaaaaccctatgaatgtaaggattgtgggaaggcctttattcttggctctcaacttacttaccatcagagaattcatagtggtgagaaaccttatgagtgtaaggaatgtggaaaggcctttattcttggttcacaccttacataccatcagagagttcatactggtgaaaagccttacatatgtaaagaatgtgggaaagcctttttatgtgcctcccaactgaatgaacatcagagaattcatacaggagagaaaccctatgaatgtaaagaatgcgggaagaccttttttcgtggctcacaacttacttaccacctgagagttcattcaggtgagagaccttataaatgcaaagaatgtgggaaagcctttatttctaattctaatcttattcaacatcaaagaattcataccggagagaagccctacaaatgtaaggaatgtggaaaggcctttatttgtggcaaacaacttagtgaacatcagagaattcatacaggtgagaaaccctttgaatgtaaggaatgtggaaaggcctttattcgtgttgcatatcttactcaacatgagaaaattcatggtgagaaacattatgaatgtaaggaatgtgggaagacctttgtacgtgctacacaacttacatatcatcaaagaattcatacaggtgaaaagccctacaaatgtaaggaatgtgacaaggcctttatttatggctcacaacttagtgaacatcagagaattcacagaggtgaaaaaccttatgaatgtaaacagtgtgggaaggcttttattcgtggctcacaccttactgaacatctgagaactcatactggagagaaaccctatgaatgtaaggaatgtgggagggcctttagtcgtggctcagaacttactctgcatcaaaggatccatactggtgagaaaccctatacatgtgtccagtgtggtaaagactttagatgtccttcacaacttactcaacatacaaggcttcataattgagaaagccttgaatgtgattaaatttaagaaaatcttcatctatttcatatctataatgaatgtagaacatcttgcttctgctcagaatctgctcattcttagaaggcctacattaacatggatgcagaataatttcagaaaccccttaaataattccttaacatctctataaacgctagaatataatgctgaattatatcctttattaagcatcatctccatttcaccatatcctaactgaaatcctatatatttcttgtgtgttcttttctatttgtaaaatactgtaattgtattacaatgactaaattataattaaatacatataattccctttcgatagcatctgatatttgttgttaaaatgattgccattatcatcattacatactgttagagaactcaaatggtgggaatattttatgattacagtaaaaagatgcaaccattctcttatcatgtagcccctttagaacaacagatactttattttagacaaaacctttaaagtatagtaaaggtatgaaggacttctgagcatcagataatccacaccaggaagaaacttccaaaaattgctttagggctgttgttttttgttgttttgttttttaagaaagtgaaagattatttttctacaacaaattccaaaagcaaaagtttttggcccacattttctgattgttactttaagggaaaaagaatttcttaacaaaatgatggccaaggtagttccatatatatacatatattccacatgtgtgtatgtggaatatattccacatgtgtgtatgtggaatatattccacatgtgtatatattccacgtgtatgtattccacatgtatatattccacatatgtatacattccacgtgtgtatatagtccccatatgtatacattccacgtgtgtatatattccacatatgtatacattccatgtatgtatgcatatatgtattccatatatgtatatattccatataccatatatgtatatattccacatatgtattccatatatatattccatatgtatatgtgtgtgtgtataaaatatatatttgccttaaatggaaatataaacaaaatttaccaactacagtttttcctcatttgaatctaacccatttctgatatactgaatggtaaatttttagagacccagatctcggaggctacattccattttttggtctttttgtcttttttttctttttttttgagacagggtcttgctctccttgttcaggctggagtacagtggcacaatcacagctcactgcagccttgacctcctaggctcaagctatcctccaacctcagcctgccaagtagctgtcaccatagctgttcatcaccatgcctagctcatttaaaaaaaaatttttttagagatggggtctcactatgtttcctcatctggtcttaaacttctaggctcaagcatctacctgcctcagcctccagaagtgctgggattacaaatgtgagccaccacatctggccccattattttatttttggtttgtattatttttatttggccccattattttaaataggaaaaacagtatgttttcagtccattaaaaaatcctaaccaaatttaatttgaattcaacttaatttaagccacctaaatgacctctatcagggatttctgaataatgtaaaacactcaaaagccagttaacagttaattaccagatatgtttgtgcatgcagtgattttgaaaaatataatacatgaattatgctttccttctatgctttaaggaacagatactatagtgacaataaatgtaatacattagtacataatggacgcaaatgacagataaaaacagctttaaataatttgaacttgttaattagaatgttgttgaatgagggctgatggtcagaaattaatgatggtgagaagaggttaatggtgttcagtgagtgaaggtgagttagaataatatattggagcagcaatcaatcaatgcctacagttcttctatgattccaagcatctggtgcacagaactcaagacctcaaaattgagttactgtatacaaagctgttcatagaaaaacaaatgttaccaagaaatacttaccttttctatatgcagtgttatctcttgtcttctaatacattatcttttttggtttc

SEQ ID NO: 203024 - DNA, 2049 bp, Homo sapiens
  Payload ID: 20036
  Gene Name: zinc finger protein 571
  Uniprot ID: Q7Z3V5
  ENST ID: ENST00000358744
  CDS Start-End: 191-2020
gagcttgtctgcgccggccagcgcttggcccctcccgggccgcagtactcctcgtgtgacacggacatcattaagccagctgagaatcgtgcggttacagctgctgcagtttctttgcagacactggcttctctggactttgcacacctccaggagaagaacccagaaaattgatcagttctaaaaaaccatgccccacttgttggtgactttcagggatgtggccattgacttctctcaggaggaatgggaatgcctggaccctgctcagagggacttgtacagggatgtgatgttggagaactacagcaacctgatctcattggacttggaatccagttgtgtgaccaaaaagttatctccagaaaaggaaatttatgaaatggaatcactccagtgggagaatatggggaaacgtatcaaccatcaccttcaatacaatggtcttggagacaatatggagtgcaaaggcaacttagagggtcaagaagcaagtcaggaagggctttacatgtgtgtcaaaattacctgtgaagaaaaggccactgaaagtcattcaacctcttctacttttcatcggataattcctaccaaggaaaaattgtacaaatgtaaggaatgcagacaaggtttcagctacctgtcatgccttattcaacatgaggaaaatcataatatagaaaaatgctctgaagttaagaaacacaggaatacctttagcaaaaagccaagctatattcaacatcagagaattcagactggtgagaaaccttatgagtgtatggaatgtggaaaggcctttggtcgtacttctgatctcattcaacatcagaaaattcatactaatgaaaaaccttatcagtgtaacgcatgtgggaaagcttttattcgtggttcacagctcactgaacatcagagagttcatacaggagagaaaccatatgaatgtaagaaatgtggaaaagcctttagttattgttcacaatatactcttcatcagagaattcatagtggtgaaaaaccctatgaatgtaaggattgtgggaaggcctttattcttggctctcaacttacttaccatcagagaattcatagtggtgagaaaccttatgagtgtaaggaatgtggaaaggcctttattcttggttcacaccttacataccatcagagagttcatactggtgaaaagccttacatatgtaaagaatgtgggaaagcctttttatgtgcctcccaactgaatgaacatcagagaattcatacaggagagaaaccctatgaatgtaaagaatgcgggaagaccttttttcgtggctcacaacttacttaccacctgagagttcattcaggtgagagaccttataaatgcaaagaatgtgggaaagcctttatttctaattctaatcttattcaacatcaaagaattcataccggagagaagccctacaaatgtaaggaatgtggaaaggcctttatttgtggcaaacaacttagtgaacatcagagaattcatacaggtgagaaaccctttgaatgtaaggaatgtggaaaggcctttattcgtgttgcatatcttactcaacatgagaaaattcatggtgagaaacattatgaatgtaaggaatgtgggaagacctttgtacgtgctacacaacttacatatcatcaaagaattcatacaggtgaaaagccctacaaatgtaaggaatgtgacaaggcctttatttatggctcacaacttagtgaacatcagagaattcacagaggtgaaaaaccttatgaatgtaaacagtgtgggaaggcttttattcgtggctcacaccttactgaacatctgagaactcatactggagagaaaccctatgaatgtaaggaatgtgggagggcctttagtcgtggctcagaacttactctgcatcaaaggatccatactggtgagaaaccctatacatgtgtccagtgtggtaaagactttagatgtccttcacaacttactcaacatacaaggcttcataattgagaaagccttgaatgtgattaaatttaaga

SEQ ID NO: 203025 - DNA, 2265 bp, Homo sapiens
  Payload ID: 20036
  Gene Name: zinc finger protein 571
  Uniprot ID: Q7Z3V5
  ENST ID: ENST00000451802
  CDS Start-End: 102-1931
cttgacgcacggagcttgtctgcgccggccagcactggcttctctggactttgcacacctccaggagaagaacccagaaaattgatcagttctaaaaaaccatgccccacttgttggtgactttcagggatgtggccattgacttctctcaggaggaatgggaatgcctggaccctgctcagagggacttgtacagggatgtgatgttggagaactacagcaacctgatctcattggacttggaatccagttgtgtgaccaaaaagttatctccagaaaaggaaatttatgaaatggaatcactccagtgggagaatatggggaaacgtatcaaccatcaccttcaatacaatggtcttggagacaatatggagtgcaaaggcaacttagagggtcaagaagcaagtcaggaagggctttacatgtgtgtcaaaattacctgtgaagaaaaggccactgaaagtcattcaacctcttctacttttcatcggataattcctaccaaggaaaaattgtacaaatgtaaggaatgcagacaaggtttcagctacctgtcatgccttattcaacatgaggaaaatcataatatagaaaaatgctctgaagttaagaaacacaggaatacctttagcaaaaagccaagctatattcaacatcagagaattcagactggtgagaaaccttatgagtgtatggaatgtggaaaggcctttggtcgtacttctgatctcattcaacatcagaaaattcatactaatgaaaaaccttatcagtgtaacgcatgtgggaaagcttttattcgtggttcacagctcactgaacatcagagagttcatacaggagagaaaccatatgaatgtaagaaatgtggaaaagcctttagttattgttcacaatatactcttcatcagagaattcatagtggtgaaaaaccctatgaatgtaaggattgtgggaaggcctttattcttggctctcaacttacttaccatcagagaattcatagtggtgagaaaccttatgagtgtaaggaatgtggaaaggcctttattcttggttcacaccttacataccatcagagagttcatactggtgaaaagccttacatatgtaaagaatgtgggaaagcctttttatgtgcctcccaactgaatgaacatcagagaattcatacaggagagaaaccctatgaatgtaaagaatgcgggaagaccttttttcgtggctcacaacttacttaccacctgagagttcattcaggtgagagaccttataaatgcaaagaatgtgggaaagcctttatttctaattctaatcttattcaacatcaaagaattcataccggagagaagccctacaaatgtaaggaatgtggaaaggcctttatttgtggcaaacaacttagtgaacatcagagaattcatacaggtgagaaaccctttgaatgtaaggaatgtggaaaggcctttattcgtgttgcatatcttactcaacatgagaaaattcatggtgagaaacattatgaatgtaaggaatgtgggaagacctttgtacgtgctacacaacttacatatcatcaaagaattcatacaggtgaaaagccctacaaatgtaaggaatgtgacaaggcctttatttatggctcacaacttagtgaacatcagagaattcacagaggtgaaaaaccttatgaatgtaaacagtgtgggaaggcttttattcgtggctcacaccttactgaacatctgagaactcatactggagagaaaccctatgaatgtaaggaatgtgggagggcctttagtcgtggctcagaacttactctgcatcaaaggatccatactggtgagaaaccctatacatgtgtccagtgtggtaaagactttagatgtccttcacaacttactcaacatacaaggcttcataattgagaaagccttgaatgtgattaaatttaagaaaatcttcatctatttcatatctataatgaatgtagaacatcttgcttctgctcagaatctgctcattcttagaaggcctacattaacatggatgcagaataatttcagaaaccccttaaataattccttaacatctctataaacgctagaatataatgctgaattatatcctttattaagcatcatctccatttcaccatatcctaactgaaatcctatatatttcttgtgtgttcttttctatttgtaaaatactgtaattgtattacaatgactaaattataattaaatacatataattccc

SEQ ID NO: 203026 - DNA, 293 bp, Homo sapiens
  Payload ID: 20036
  Gene Name: zinc finger protein 571
  ENST ID: ENST00000590390
  CDS Start-End: 42-293
ctcatttcacttcagaatcattcctgtagaatcatcctgtaatggatttgttgtttcagttgttggtgactttcagggatgtggccattgacttctctcaggaggaatgggaatgcctggaccctgctcagagggacttgtacagggatgtgatgttggagaactacagcaacctgatctcattggacttggaatccagttgtgtgaccaaaaagttatctccagaaaaggaaatttatgaaatggaatcactccagtgggagaatatggggaaacgtatcaaccatcacctt

SEQ ID NO: 203027 - DNA, 2904 bp, Homo sapiens
  Payload ID: 20036
  Gene Name: zinc finger protein 571
  Uniprot ID: Q7Z3V5
  ENST ID: ENST00000593133
  CDS Start-End: 730-2559
ggccaggtgagtgggcggcctcaccgggaaccgctcgcagcttttgggttgcttcatcgaaaaagtagttcttgtatggtgctgggaataccggtgtcctggctggggctcggtgctgacaggaacgggacggtgctctggctaattacttatggaagtcggccttgcgcttgcggaggggtgtcggcaccgtcactttggttctggcagtggcgggggtgtggtgctgctagttgtgttcctccgcaccgaatttatgagtgtgcccctggagcccctgccgcggacaaaatcggcaccataactttgggatagggaggctagaaggaggcgggtgttactagtagtgttcctccgccctggacgtgtgcgtgtgcgcttgtgcggccgcggggtgggctcacctgccgcctgttaatgctcctagcgcttggcccctcccgggccgcagtactcctcgtgtgacacggacatcattaagccagctgagaatcgtgcggttacagctgctgcagtttctttgcagagtaagaggctctttttgaagtttccctgatggtgaggctttacccctggaagtgtcttaggaagaagaccactgttaaagatgtcctattctagcttgacagccctgtggggaagactaatccctttctagagcactggcttctctggactttgcacacctccaggagaagaacccagaaaattgatcagttctaaaaaaccatgccccacttgttggtgactttcagggatgtggccattgacttctctcaggaggaatgggaatgcctggaccctgctcagagggacttgtacagggatgtgatgttggagaactacagcaacctgatctcattggacttggaatccagttgtgtgaccaaaaagttatctccagaaaaggaaatttatgaaatggaatcactccagtgggagaatatggggaaacgtatcaaccatcaccttcaatacaatggtcttggagacaatatggagtgcaaaggcaacttagagggtcaagaagcaagtcaggaagggctttacatgtgtgtcaaaattacctgtgaagaaaaggccactgaaagtcattcaacctcttctacttttcatcggataattcctaccaaggaaaaattgtacaaatgtaaggaatgcagacaaggtttcagctacctgtcatgccttattcaacatgaggaaaatcataatatagaaaaatgctctgaagttaagaaacacaggaatacctttagcaaaaagccaagctatattcaacatcagagaattcagactggtgagaaaccttatgagtgtatggaatgtggaaaggcctttggtcgtacttctgatctcattcaacatcagaaaattcatactaatgaaaaaccttatcagtgtaacgcatgtgggaaagcttttattcgtggttcacagctcactgaacatcagagagttcatacaggagagaaaccatatgaatgtaagaaatgtggaaaagcctttagttattgttcacaatatactcttcatcagagaattcatagtggtgaaaaaccctatgaatgtaaggattgtgggaaggcctttattcttggctctcaacttacttaccatcagagaattcatagtggtgagaaaccttatgagtgtaaggaatgtggaaaggcctttattcttggttcacaccttacataccatcagagagttcatactggtgaaaagccttacatatgtaaagaatgtgggaaagcctttttatgtgcctcccaactgaatgaacatcagagaattcatacaggagagaaaccctatgaatgtaaagaatgcgggaagaccttttttcgtggctcacaacttacttaccacctgagagttcattcaggtgagagaccttataaatgcaaagaatgtgggaaagcctttatttctaattctaatcttattcaacatcaaagaattcataccggagagaagccctacaaatgtaaggaatgtggaaaggcctttatttgtggcaaacaacttagtgaacatcagagaattcatacaggtgagaaaccctttgaatgtaaggaatgtggaaaggcctttattcgtgttgcatatcttactcaacatgagaaaattcatggtgagaaacattatgaatgtaaggaatgtgggaagacctttgtacgtgctacacaacttacatatcatcaaagaattcatacaggtgaaaagccctacaaatgtaaggaatgtgacaaggcctttatttatggctcacaacttagtgaacatcagagaattcacagaggtgaaaaaccttatgaatgtaaacagtgtgggaaggcttttattcgtggctcacaccttactgaacatctgagaactcatactggagagaaaccctatgaatgtaaggaatgtgggagggcctttagtcgtggctcagaacttactctgcatcaaaggatccatactggtgagaaaccctatacatgtgtccagtgtggtaaagactttagatgtccttcacaacttactcaacatacaaggcttcataattgagaaagccttgaatgtgattaaatttaagaaaatcttcatctatttcatatctataatgaatgtagaacatcttgcttctgctcagaatctgctcattcttagaaggcctacattaacatggatgcagaataatttcagaaaccccttaaataattccttaacatctctataaacgctagaatataatgctgaattatatcctttattaagcatcatctccatttcaccatatcctaactgaaatcctatatatttcttgtgtgttcttttctatttgtaaaatactgtaattgtattacaatgactaaattataattaaatacatataattccctttcgatagca

SEQ ID NO: 203028 - DNA, 1700 bp, Homo sapiens
  Payload ID: 20036
  Gene Name: zinc finger protein 571
  ENST ID: ENST00000590751
  CDS Start-End: 185-613
gtctgcgccggccagcgcttggcccctcccgggccgcagtactcctcgtgtgacacggacatcattaagccagctgagaatcgtgcggttacagctgctgcagtttctttgcagacactggcttctctggactttgcacacctccaggagaagaacccagaaaattgatcagttctaaaaaaccatgccccacttgttggtgactttcagggatgtggccattgacttctctcaggaggaatgggaatgcctggaccctgctcagagggacttgtacagggatgtgatgttggagaactacagcaacctgatctcattggagccagcccgtacccgcgaagagcaacacaatctgccggtcccaaaagcaggaagtgtcaaccttgcagcaggatttggacactccaggagccaaactggatgtggaagctccaaaggtgcagaaaaaggactccaaaatgttgacttttacctctgtcctgggaatcaccctgacactagctgtcgagatacttaccagtttttctgccctgattggacatgtgtaactttagccacctactctgggggatcaaccagatcttcattccataactcgtgcttctcgtcctaaattatgtactagaaaaaattgtaatcctcttactataactgtccatgaccctaattcaactcagtagtattatggcatgtcatgggaattaagattttatatcccaggatttgatgttgggactatgttcaccatccaaaaaatcctggtctcatggagcccacccaagccaatcgggcctttaactgatctaggtgaccctatgttccagaaaccccctaacaaagttgatttaactgttcctccaccattcttagtcataaaagatacactccaaaagttcgagaaaatctagataggcgccaacaggaacgagaaaacaacatcccctggtatcaaagcatgttcaactggaacccctggctaactactttaatcactgggttagctggacctctcctcatcatactattaagtttaatttttgggccttgtatataaaattggtttcttaattttgtaaaagaatgcatagcttctgtcaaacttatgtatcttaatactcaatataacccccttgttataattgaggaatcaacgatttgattccccaaaaacacaagtggggaatgtaatgcccaaccttgtttttactaaccctgtttttagactctcccttttcctttaattacccagccttgtttccacctgaattgactctcccttagctaagagagccagacagactccatcttggctctttcactggcagccgcttcctcaaggacttaacttgtgcaagctgactcccagcacatccaagaatgcaattaactgataagatactgtggcaagctatatctgcaattcccaggaattcatctgattgataacgcccaaagcccccggtctatcaccttgtaatagtcttaaagcccctgcacctggaactgtttaatttcctgtaaccatttatccttttaactttttgcctactttatttctgtaaaattgttttaactagaccctcccctcccctttctaaaccaaagtataaaagaaaatctagccccttcttcgggccgagagaattttgagcgttagccgtctctcggtcgccagctaataaatggactcttaattcgtc

SEQ ID NO: 203029 - DNA, 3275 bp, Homo sapiens
  Payload ID: 20037
  Gene Name: zinc finger protein 572
  Uniprot ID: Q7Z3I7
  ENST ID: ENST00000319286
  CDS Start-End: 155-1744
tttctgccttccgggtttgagagtttaggaccctgggttggtggggtcagagggagagggggtaccttcctcccggaccgctgggggtgcagggcgccttgggtgtagcacccagaacaggtttctgatctctaacttggctgtgatcattgtgatggagcaagaaaaaaaactgttggtctcagattctaacagctttatggagagggagagtttgaaaagccctttcacaggagatacaagtatgaataatttggaaactgttcaccacaataattctaaggcagataaacttaaagagaaaccttcagaatggtctaaaagacatagaccacaacattataagcatgaggatgcaaaagaaatgccactgacatgggttcaagatgagatttggtgtcatgattcctatgagagtgatggcaagtcagagaattggggaaattttatagctaaagaggaggaaaaacccaatcaccaggaatgggactcaggagaacataccaatgcctgtgtccagcagaattcatcctttgtagacagaccctataaatgttccgaatgttggaaaagcttcagtaatagttctcatttgcgtactcaccagaggacccactcaggagaaaagccttataaatgctctgagtgtgcaaaatgtttttgtaacagttctcacctgattcagcatctaagaatgcacacaggagagaagccctaccagtgtggtgaatgtgggaaaagcttcagcaatacctcccatcttattatccatgagagaactcacacgggagagaaaccctacaaatgtcccgagtgtgggaagagattcagcagcagctctcaccttattcagcatcacagatcacatacaggtgaaaaaccatatgaatgttctgtctgcggaaaaggcttcagtcacagctatgtcctaatagaacatcagaggactcacactggagaaaaaccttataagtgccctgattgtgggaagagttttagtcagagttccagcctcattcgccaccagcggacacacacaggtgagaagccctacaaatgtcttgagtgtgaaaaaagctttggttgtaattctactctaataaaacatcagagaatacatacaggagaaaagccttatcaatgtccagaatgtgggaagaattttagtcgtagttcaaaccttattacacaccagaaaatgcacacaggagagaaatcctatgaaagttctgaatatgaggaaagtttgggtcagaactgcaatgtgatagaagaatgcagaatccagttaggagagaaaccatatagatgttgtgaatgtgggaagagttttggccttagctcccatctcattagacatcagagaacacatacaggagaaaaaccttacagatgttctgagtgctggaaaactttcagtcagagttccaccctggtgattcaccaaaggacacatacaggagagaaaccttataaatgtcctgattgtggtgaaagcttcagtcagagctttaaccttatcaggcaccggaggacccacataggggaaaaaccttacaaatgtaccagctgtgagaaatgcttcagcagaagtgcctacctcagtcagcatcggaaaattcacgtagaaaagccttttgagtctcccgacgttggggattttcctcatgaatggacttggaaaaactgttcaggggaaatgcccttcatctcttcattttccgtctcaaattcatcttcctgagtcccaaagcctggttggtgatggttttttcttccttgttggaccatgacaatttaggtattctgtgattgttgtgctataaagtttctttgatgtgtttgtcaaaacatttggaaaaagtcaacctcccagtttaaaggatgggaagaccccaatcaccaggttattggatctgtccagtgagagattcatccaccaaggatgaagaaaggaggacttttaaaaatttaaggtaagatagtaatagcttcaaaagaacacatacagagtaatcctgagagtaagcaaaggaaccatgagaaccgaagctagaattgctattgaattactttattttctcttcccttattgggtagagatacatcattactggcctcaggggtttacccaaagaaagggtatttttgagcaaataatgtgatttcctggctattttgttgggggcttaagatttttttttttcaaatgcatttttagtcactaaaaattaactgtcgtaccatctagaactatactgtccagtaccatagcctctagccgtatgtagctatttgtattaagattaattgaaattttaaatccagttcctcagtcacactagccactttctaagtgctcagtagctctgtgtgaccagcggctactgtattggatattatagaaggttctttcattcaagatcatcattcttgacagacccataaatatttcctataaagactgtagaagtgtgttctggagggtttgctctccaaaaagaattgtaatatagagtagaattgggatagagtattgaagacactgggtttagacattggatattttaatgattgtgtgttctaattcatgtgctgccaactgagttatctagtgatatgacctcactgtcttgaccaaagccagaatagaaggcaggattcctgaattctatcttaaaatttgcaatgaagagccttttccctaaattatcccattatgtaattcttggtcagctcaagaactgggttctttttctaataattaactcactaaatctgagccagtgtccaaggacagtttgtcattaaggagtactgagacttcttagctttggtactgacagttttcttttgcctcttgacataattggtatatggatctgataactgaggtcccatcttccctactcattcctatgggaatgatgctttggaaattattagatatatcctattcccttcctcccatttttttcctgctagtgcaaaaggtagatgagtaggaagattaggactcctgagttgcccatgatttcatctaatttttggattcagaatgtattttatgaataatatgcagagatgcatattaggaatgtgaagccagaatgggtcagttgtagctgctgcaaagttctgtagctgatggtcatttaattgcatgggggttattttatctttcatgattgtggtgcacctgatgctggcggggtatttgtgtgtttttgtattgttatttgattacaaaaataaagcaaaaactaacaaataaa

SEQ ID NO: 203030 - DNA, 2014 bp, Homo sapiens
  Payload ID: 20038
  Gene Name: zinc finger protein 573
  Uniprot ID: Q86YE8
  ENST ID: ENST00000339503
  CDS Start-End: 1-1824
atggagtcttgctctgtcgcacaggctggagtgcagtggcccgatctcagctcactgcaacctccgcctcccaggttcaagcaattctcctgccacagcctccaagtagctgggattacagatttggatttacagtgtgagataatcagctacatagaagtacccacttatgaaacagatatatcctctacacaacttcagagcatatataagagagagaaactctatgaatgtaagaaatgtcagaagaaatttagtagtggttatcaacttattctacatcacaggtttcatgtcattgagagaccctatgaatgcaaagagtgtgggaagaactttcgtagtggctatcaacttactctacatcaaagatttcatactggtgagaaaccctatgaatgtacagaatgtgggaagaactttagaagtggttatcagctgactgtgcatcagagatttcatactggtgagaaaacctatgaatgtaggcagtgtgggaaggcctttatatatgcctcacacattgttcaacatgagagaattcacactggtgggaagccgtatgaatgtcaggagtgtgggagggcctttagtcaaggtggacatcttagaattcatcagagagttcatactggcgaaaaaccatataaatgtaaggaatgtgggaagacttttagtaggcgctcaaatcttgttgaacatgggcagtttcatactgatgagaagccatacatatgtgagaaatgtggaaaggcctttagaagaggtcaccagcttactgtacatcagagagttcacactggtaaaaagccatatgagtgtaaagaatgtgggaagggctataccactgcctcatactttcttctacatcagagaattcataaaggtggaaaaccctatgaatgtaaggagtgtaagaaaacctttactttgtatagaaatcttactcggcatcagaatattcatactggtgagaaactttttgaatgcaagcaatgtgggaagacctatactactggttcaaaactctttcaacatcagaaaactcatactggcgagaaaccctatgaatgcaaggaatgcggaaaggcctttagcttgtatggctaccttaaacaacatcagaaaattcatactggcatgaaacactttgaatgtaaggagtgtaaaaaaacctttactttgtatagaaatcttactcgacatcagaatattcacactggtaagaaactttttgaatgtcaggaatgtgggaaggcctatagtactggctcaaaccttattcaacatcggaaaactcatactggtgagaaaccctataaatgtaaggaatgtggcaagacctttagcttgcatggatatcttaatcaacatcagaaaattcatactggtatgaaaccctatgaatgtaaggtatgtagaaaaacctttactttctatagaaatcttactctacatcaaagtattcatactgatgagaaaccttttgaatgtaaggaatgtgggaagacctttagacgtagttcacaccttactgcacatcagagcattcatgctgataaaaaaccctatgaatgtaaagaatgtggaaaggcctttaaaatgtatggctaccttacccaacatcagaaaattcatactggtggaaaaccttatgaatgtaaagaatgtgggaaggccttcagtcgtgcttcaaaccttgttcaacatgagagaattcatactggtgagaaaccctatgtgtgtaagcagtgtgggaaaaccttcagatatggttcagcccttaaagcccatcagagaattcataggagcataaaagtgtaagaccgtaaagagtacgagcgcgccattcatcatcagacagcccacactggtgagaaatgatggaatgttagtcttataggtatggctttagcaattgagagagttcaaaatgcagatcttgccacattagaaagcattcaatgtcagtcctgttttaatggaatatctgactattcaatggtaaattaag

SEQ ID NO: 203031 - DNA, 2124 bp, Homo sapiens
  Payload ID: 20038
  Gene Name: zinc finger protein 573
  Uniprot ID: Q86YE8
  ENST ID: ENST00000357309
  CDS Start-End: 201-1934
acccaatctatggcttcccttccgttttcgcgtggttcttttgcaagctctggattctctggagtttgaatgtttccagtattggaaccccaccaagtaggactgatcaggtcttacaattctaaaaccatgacctgtgaggacattccatttctaaaccagttgtggttgatttactggagcgaggaaaagagccctggatgattttgagggaagaaacacagttcacagatttggatttacagtgtgagataatcagctacatagaagtacccacttatgaaacagatatatcctctacacaacttcagagcatatataagagagagaaactctatgaatgtaagaaatgtcagaagaaatttagtagtggttatcaacttattctacatcacaggtttcatgtcattgagagaccctatgaatgcaaagagtgtgggaagaactttcgtagtggctatcaacttactctacatcaaagatttcatactggtgagaaaccctatgaatgtacagaatgtgggaagaactttagaagtggttatcagctgactgtgcatcagagatttcatactggtgagaaaacctatgaatgtaggcagtgtgggaaggcctttatatatgcctcacacattgttcaacatgagagaattcacactggtgggaagccgtatgaatgtcaggagtgtgggagggcctttagtcaaggtggacatcttagaattcatcagagagttcatactggcgaaaaaccatataaatgtaaggaatgtgggaagacttttagtaggcgctcaaatcttgttgaacatgggcagtttcatactgatgagaagccatacatatgtgagaaatgtggaaaggcctttagaagaggtcaccagcttactgtacatcagagagttcacactggtaaaaagccatatgagtgtaaagaatgtgggaagggctataccactgcctcatactttcttctacatcagagaattcataaaggtggaaaaccctatgaatgtaaggagtgtaagaaaacctttactttgtatagaaatcttactcggcatcagaatattcatactggtgagaaactttttgaatgcaagcaatgtgggaagacctatactactggttcaaaactctttcaacatcagaaaactcatactggcgagaaaccctatgaatgcaaggaatgcggaaaggcctttagcttgtatggctaccttaaacaacatcagaaaattcatactggcatgaaacactttgaatgtaaggagtgtaaaaaaacctttactttgtatagaaatcttactcgacatcagaatattcacactggtaagaaactttttgaatgtcaggaatgtgggaaggcctatagtactggctcaaaccttattcaacatcggaaaactcatactggtgagaaaccctataaatgtaaggaatgtggcaagacctttagcttgcatggatatcttaatcaacatcagaaaattcatactggtatgaaaccctatgaatgtaaggtatgtagaaaaacctttactttctatagaaatcttactctacatcaaagtattcatactgatgagaaaccttttgaatgtaaggaatgtgggaagacctttagacgtagttcacaccttactgcacatcagagcattcatgctgataaaaaaccctatgaatgtaaagaatgtggaaaggcctttaaaatgtatggctaccttacccaacatcagaaaattcatactggtggaaaaccttatgaatgtaaagaatgtgggaaggccttcagtcgtgcttcaaaccttgttcaacatgagagaattcatactggtgagaaaccctatgtgtgtaagcagtgtgggaaaaccttcagatatggttcagcccttaaagcccatcagagaattcataggagcataaaagtgtaagaccgtaaagagtacgagcgcgccattcatcatcagacagcccacactggtgagaaatgatggaatgttagtcttataggtatggctttagcaattgagagagttcaaaatgcagatcttgccacattagaaagcattcaatgtcagtcctgttttaatggaatatctgactattcaatggtaaattaag

SEQ ID NO: 203032 - DNA, 476 bp, Homo sapiens
  Payload ID: 20038
  Gene Name: zinc finger protein 573
  ENST ID: ENST00000378445
  CDS Start-End: 54-476
cccttccgttttcgcgtggttcttttgcaagctctggattctctggagtttgaatgtttccagtattggaaccccaccaagtaggactgatcaggtcttacaattctaaaaccatgacctgtgaattagtgacattcagggatgtggccatagacttctctcggcaggagtgggaatacctggaccctaatcagagggacttatacagggatgtgatgttggagaactatagaaacctggtatcactgggaggacattccatttctaaaccagttgtggttgatttactggagcgaggaaaagagccctggatgattttgagggaagaaacacagttcacagatttggatttacagtgtgagataatcagctacatagaagtacccacttatgaaacagatatatcctctacacaacttcagagcatatataagagagagaaactctatgaatgtaagaaatgtcagaagaaattt

SEQ ID NO: 203033 - DNA, 2266 bp, Homo sapiens
  Payload ID: 20038
  Gene Name: zinc finger protein 573
  Uniprot ID: Q86YE8
  ENST ID: ENST00000392138
  CDS Start-End: 340-2076
gagtgcgcatgcgcagagcggccaacccgtgagggaacgtttctgacgctaggtcaagggcggtgttcctgtgttcttagggccccaggaggcgagtctgagtggaacctggctggggtaggctgaaaggtgacttcgacgctcttctgaggcctcagacgtgtgtgatgactgccctgtagaatcagtgctgtgaccccgagtaacaacgcgcgcttgagttggtataaactcctgaagtttcaggaattagtgacattcagggatgtggccatagacttctctcggcaggagtgggaatacctggaccctaatcagagggacttatacagggatgtgatgttggagaactatagaaacctggtatcactggatttggatttacagtgtgagataatcagctacatagaagtacccacttatgaaacagatatatcctctacacaacttcagagcatatataagagagagaaactctatgaatgtaagaaatgtcagaagaaatttagtagtggttatcaacttattctacatcacaggtttcatgtcattgagagaccctatgaatgcaaagagtgtgggaagaactttcgtagtggctatcaacttactctacatcaaagatttcatactggtgagaaaccctatgaatgtacagaatgtgggaagaactttagaagtggttatcagctgactgtgcatcagagatttcatactggtgagaaaacctatgaatgtaggcagtgtgggaaggcctttatatatgcctcacacattgttcaacatgagagaattcacactggtgggaagccgtatgaatgtcaggagtgtgggagggcctttagtcaaggtggacatcttagaattcatcagagagttcatactggcgaaaaaccatataaatgtaaggaatgtgggaagacttttagtaggcgctcaaatcttgttgaacatgggcagtttcatactgatgagaagccatacatatgtgagaaatgtggaaaggcctttagaagaggtcaccagcttactgtacatcagagagttcacactggtaaaaagccatatgagtgtaaagaatgtgggaagggctataccactgcctcatactttcttctacatcagagaattcataaaggtggaaaaccctatgaatgtaaggagtgtaagaaaacctttactttgtatagaaatcttactcggcatcagaatattcatactggtgagaaactttttgaatgcaagcaatgtgggaagacctatactactggttcaaaactctttcaacatcagaaaactcatactggcgagaaaccctatgaatgcaaggaatgcggaaaggcctttagcttgtatggctaccttaaacaacatcagaaaattcatactggcatgaaacactttgaatgtaaggagtgtaaaaaaacctttactttgtatagaaatcttactcgacatcagaatattcacactggtaagaaactttttgaatgtcaggaatgtgggaaggcctatagtactggctcaaaccttattcaacatcggaaaactcatactggtgagaaaccctataaatgtaaggaatgtggcaagacctttagcttgcatggatatcttaatcaacatcagaaaattcatactggtatgaaaccctatgaatgtaaggtatgtagaaaaacctttactttctatagaaatcttactctacatcaaagtattcatactgatgagaaaccttttgaatgtaaggaatgtgggaagacctttagacgtagttcacaccttactgcacatcagagcattcatgctgataaaaaaccctatgaatgtaaagaatgtggaaaggcctttaaaatgtatggctaccttacccaacatcagaaaattcatactggtggaaaaccttatgaatgtaaagaatgtgggaaggccttcagtcgtgcttcaaaccttgttcaacatgagagaattcatactggtgagaaaccctatgtgtgtaagcagtgtgggaaaaccttcagatatggttcagcccttaaagcccatcagagaattcataggagcataaaagtgtaagaccgtaaagagtacgagcgcgccattcatcatcagacagcccacactggtgagaaatgatggaatgttagtcttataggtatggctttagcaattgagagagttcaaaatgcagatcttgccacattagaaagcattcaatgtcagtcctgttttaatggaatatctgactattcaatggtaaattaag

SEQ ID NO: 203034 - DNA, 2257 bp, Homo sapiens
  Payload ID: 20038
  Gene Name: zinc finger protein 573
  Uniprot ID: Q86YE8
  ENST ID: ENST00000536220
  CDS Start-End: 70-2067
acccaatctatggcttcccttccgttttcgcgtggttcttttgcaagctctggattctctggagtttgaatgtttccagtattggaaccccaccaagtaggactgatcaggtcttacaattctaaaaccatgacctgttttcaggaattagtgacattcagggatgtggccatagacttctctcggcaggagtgggaatacctggaccctaatcagagggacttatacagggatgtgatgttggagaactatagaaacctggtatcactgggaggacattccatttctaaaccagttgtggttgatttactggagcgaggaaaagagccctggatgattttgagggaagaaacacagttcacagatttggatttacagtgtgagataatcagctacatagaagtacccacttatgaaacagatatatcctctacacaacttcagagcatatataagagagagaaactctatgaatgtaagaaatgtcagaagaaatttagtagtggttatcaacttattctacatcacaggtttcatgtcattgagagaccctatgaatgcaaagagtgtgggaagaactttcgtagtggctatcaacttactctacatcaaagatttcatactggtgagaaaccctatgaatgtacagaatgtgggaagaactttagaagtggttatcagctgactgtgcatcagagatttcatactggtgagaaaacctatgaatgtaggcagtgtgggaaggcctttatatatgcctcacacattgttcaacatgagagaattcacactggtgggaagccgtatgaatgtcaggagtgtgggagggcctttagtcaaggtggacatcttagaattcatcagagagttcatactggcgaaaaaccatataaatgtaaggaatgtgggaagacttttagtaggcgctcaaatcttgttgaacatgggcagtttcatactgatgagaagccatacatatgtgagaaatgtggaaaggcctttagaagaggtcaccagcttactgtacatcagagagttcacactggtaaaaagccatatgagtgtaaagaatgtgggaagggctataccactgcctcatactttcttctacatcagagaattcataaaggtggaaaaccctatgaatgtaaggagtgtaagaaaacctttactttgtatagaaatcttactcggcatcagaatattcatactggtgagaaactttttgaatgcaagcaatgtgggaagacctatactactggttcaaaactctttcaacatcagaaaactcatactggcgagaaaccctatgaatgcaaggaatgcggaaaggcctttagcttgtatggctaccttaaacaacatcagaaaattcatactggcatgaaacactttgaatgtaaggagtgtaaaaaaacctttactttgtatagaaatcttactcgacatcagaatattcacactggtaagaaactttttgaatgtcaggaatgtgggaaggcctatagtactggctcaaaccttattcaacatcggaaaactcatactggtgagaaaccctataaatgtaaggaatgtggcaagacctttagcttgcatggatatcttaatcaacatcagaaaattcatactggtatgaaaccctatgaatgtaaggtatgtagaaaaacctttactttctatagaaatcttactctacatcaaagtattcatactgatgagaaaccttttgaatgtaaggaatgtgggaagacctttagacgtagttcacaccttactgcacatcagagcattcatgctgataaaaaaccctatgaatgtaaagaatgtggaaaggcctttaaaatgtatggctaccttacccaacatcagaaaattcatactggtggaaaaccttatgaatgtaaagaatgtgggaaggccttcagtcgtgcttcaaaccttgttcaacatgagagaattcatactggtgagaaaccctatgtgtgtaagcagtgtgggaaaaccttcagatatggttcagcccttaaagcccatcagagaattcataggagcataaaagtgtaagaccgtaaagagtacgagcgcgccattcatcatcagacagcccacactggtgagaaatgatggaatgttagtcttataggtatggctttagcaattgagagagttcaaaatgcagatcttgccacattagaaagcattcaatgtcagtcctgttttaatggaatatctgactattcaatggtaaattaag

SEQ ID NO: 203035 - DNA, 2225 bp, Homo sapiens
  Payload ID: 20038
  Gene Name: zinc finger protein 573
  Uniprot ID: Q86YE8
  ENST ID: ENST00000590414
  CDS Start-End: 23-2020
ctctggattctctggagtttgaatgtttccagtattggaaccccaccaagtaggactgatcaggtcttacaattctaaaaccatgacctgttttcaggaattagtgacattcagggatgtggccatagacttctctcggcaggagtgggaatacctggaccctaatcagagggacttatacagggatgtgatgttggagaactatagaaacctggtatcactgggaggacattccatttctaaaccagttgtggttgatttactggagcgaggaaaagagccctggatgattttgagggaagaaacacagttcacagatttggatttacagtgtgagataatcagctacatagaagtacccacttatgaaacagatatatcctctacacaacttcagagcatatataagagagagaaactctatgaatgtaagaaatgtcagaagaaatttagtagtggttatcaacttattctacatcacaggtttcatgtcattgagagaccctatgaatgcaaagagtgtgggaagaactttcgtagtggctatcaacttactctacatcaaagatttcatactggtgagaaaccctatgaatgtacagaatgtgggaagaactttagaagtggttatcagctgactgtgcatcagagatttcatactggtgagaaaacctatgaatgtaggcagtgtgggaaggcctttatatatgcctcacacattgttcaacatgagagaattcacactggtgggaagccgtatgaatgtcaggagtgtgggagggcctttagtcaaggtggacatcttagaattcatcagagagttcatactggcgaaaaaccatataaatgtaaggaatgtgggaagacttttagtaggcgctcaaatcttgttgaacatgggcagtttcatactgatgagaagccatacatatgtgagaaatgtggaaaggcctttagaagaggtcaccagcttactgtacatcagagagttcacactggtaaaaagccatatgagtgtaaagaatgtgggaagggctataccactgcctcatactttcttctacatcagagaattcataaaggtggaaaaccctatgaatgtaaggagtgtaagaaaacctttactttgtatagaaatcttactcggcatcagaatattcatactggtgagaaactttttgaatgcaagcaatgtgggaagacctatactactggttcaaaactctttcaacatcagaaaactcatactggcgagaaaccctatgaatgcaaggaatgcggaaaggcctttagcttgtatggctaccttaaacaacatcagaaaattcatactggcatgaaacactttgaatgtaaggagtgtaaaaaaacctttactttgtatagaaatcttactcgacatcagaatattcacactggtaagaaactttttgaatgtcaggaatgtgggaaggcctatagtactggctcaaaccttattcaacatcggaaaactcatactggtgagaaaccctataaatgtaaggaatgtggcaagacctttagcttgcatggatatcttaatcaacatcagaaaattcatactggtatgaaaccctatgaatgtaaggtatgtagaaaaacctttactttctatagaaatcttactctacatcaaagtattcatactgatgagaaaccttttgaatgtaaggaatgtgggaagacctttagacgtagttcacaccttactgcacatcagagcattcatgctgataaaaaaccctatgaatgtaaagaatgtggaaaggcctttaaaatgtatggctaccttacccaacatcagaaaattcatactggtggaaaaccttatgaatgtaaagaatgtgggaaggccttcagtcgtgcttcaaaccttgttcaacatgagagaattcatactggtgagaaaccctatgtgtgtaagcagtgtgggaaaaccttcagatatggttcagcccttaaagcccatcagagaattcataggagcataaaagtgtaagaccgtaaagagtacgagcgcgccattcatcatcagacagcccacactggtgagaaatgatggaatgttagtcttataggtatggctttagcaattgagagagttcaaaatgcagatcttgccacattagaaagcattcaatgtcagtcctgttttaatggaatatctgactattcaatggtaaattaagaaaaaaaaaaaaaaa

SEQ ID NO: 203036 - DNA, 2443 bp, Homo sapiens
  Payload ID: 20038
  Gene Name: zinc finger protein 573
  ENST ID: ENST00000586155
  CDS Start-End: 65-379
atctatggcttcccttccgttttcgcgtggttcttttgcaagctctggattctctggagtttgaatgtttccagtattggaaccccaccaagtaggactgatcaggtcttacaattctaaaaccatgacctgttttcaggaattagtgacattcagggatgtggccatagacttctctcggcaggagtgggaatacctggaccctaatcagagggacttatacagggatgtgatgttggagaactatagaaacctggtatcactggagatgaggtctcgctctgttgcccgggttggtctcaaactcctggtctcaagtgatcctcccacctcggccttccaaaatgctgggattataggcgtgagccaccatgcctagccaatagtagtattattatgtccagtttatttgccaaattggaataatgagttgaagtcacatggccaaagtcacaaggaggacattccatttctaaaccagttgtggttgatttactggagcgaggaaaagagccctggatgattttgagggaagaaacacagttcacagatttggatttacagtgtgagataatcagctacatagaagtacccacttatgaaacagatatatcctctacacaacttcagagcatatataagagagagaaactctatgaatgtaagaaatgtcagaagaaatttagtagtggttatcaacttattctacatcacaggtttcatgtcattgagagaccctatgaatgcaaagagtgtgggaagaactttcgtagtggctatcaacttactctacatcaaagatttcatactggtgagaaaccctatgaatgtacagaatgtgggaagaactttagaagtggttatcagctgactgtgcatcagagatttcatactggtgagaaaacctatgaatgtaggcagtgtgggaaggcctttatatatgcctcacacattgttcaacatgagagaattcacactggtgggaagccgtatgaatgtcaggagtgtgggagggcctttagtcaaggtggacatcttagaattcatcagagagttcatactggcgaaaaaccatataaatgtaaggaatgtgggaagacttttagtaggcgctcaaatcttgttgaacatgggcagtttcatactgatgagaagccatacatatgtgagaaatgtggaaaggcctttagaagaggtcaccagcttactgtacatcagagagttcacactggtaaaaagccatatgagtgtaaagaatgtgggaagggctataccactgcctcatactttcttctacatcagagaattcataaaggtggaaaaccctatgaatgtaaggagtgtaagaaaacctttactttgtatagaaatcttactcggcatcagaatattcatactggtgagaaactttttgaatgcaagcaatgtgggaagacctatactactggttcaaaactctttcaacatcagaaaactcatactggcgagaaaccctatgaatgcaaggaatgcggaaaggcctttagcttgtatggctaccttaaacaacatcagaaaattcatactggcatgaaacactttgaatgtaaggagtgtaaaaaaacctttactttgtatagaaatcttactcgacatcagaatattcacactggtaagaaactttttgaatgtcaggaatgtgggaaggcctatagtactggctcaaaccttattcaacatcggaaaactcatactggtgagaaaccctataaatgtaaggaatgtggcaagacctttagcttgcatggatatcttaatcaacatcagaaaattcatactggtatgaaaccctatgaatgtaaggtatgtagaaaaacctttactttctatagaaatcttactctacatcaaagtattcatactgatgagaaaccttttgaatgtaaggaatgtgggaagacctttagacgtagttcacaccttactgcacatcagagcattcatgctgataaaaaaccctatgaatgtaaagaatgtggaaaggcctttaaaatgtatggctaccttacccaacatcagaaaattcatactggtggaaaaccttatgaatgtaaagaatgtgggaaggccttcagtcgtgcttcaaaccttgttcaacatgagagaattcatactggtgagaaaccctatgtgtgtaagcagtgtgggaaaaccttcagatatggttcagcccttaaagcccatcagagaattcataggagcataaaagtgtaagaccgtaaagagtacgagcgcgccattcatcatcagacagcccacactggtgagaaatgatggaatgttagtcttataggtatggctttagcaattgagagagttcaaaatgcagatcttgccacattagaaagcattcaatgtcagtcctgttttaatggaatatctgactattcaatggtaaattaag

SEQ ID NO: 203037 - DNA, 861 bp, Homo sapiens
  Payload ID: 20038
  Gene Name: zinc finger protein 573
  ENST ID: ENST00000489148
  CDS Start-End: 17-331
attctctggagtttgaatgtttccagtattggaaccccaccaagtaggactgatcaggtcttacaattctaaaaccatgacctgttttcaggaattagtgacattcagggatgtggccatagacttctctcggcaggagtgggaatacctggaccctaatcagagggacttatacagggatgtgatgttggagaactatagaaacctggtatcactggagatgaggtctcgctctgttgcccgggttggtctcaaactcctggtctcaagtgatcctcccacctcggccttccaaaatgctgggattataggcgtgagccaccatgcctagccaatagtagtattattatgtccagtttatttgccaaattggaataatgagttgaagtcacatggccaaagtcacaaggaggacattccatttctaaaccagttgtggttgatttactggagcgaggaaaagagccctggatgattttgagggaagaaacacagttcacaggtgttgaaaagagggactatgatagagaataggaagcaaagagctgatgttttgacatgagacctcctagatttggatttacagtgtgagataatcagctacatagaagtacccacttatgaaacagatatatcctctacacaacttcagagcatatataagagagagaaactctatgaatgtaagaaatgtcagaagaaatttagtagtggttatcaacttattctacatcacaggtttcatgtcattgagagaccctatgaatgcaaagagtgtgggaagaactttcgtagtggctatcaacttactctacatcaaagatttcatactggtgagaaaccctatgaatgtacagaatg

SEQ ID NO: 203038 - DNA, 578 bp, Homo sapiens
  Payload ID: 20038
  Gene Name: zinc finger protein 573
  ENST ID: ENST00000591516
  CDS Start-End: 33-365
cttttgcaagctctggattctctggagtttgaatgtttccagtattggaaccccaccaagtaggactgatcaggtcttacaattctaaaaccatgacctgttttcaggaattagtgacattcagggatgtggccatagacttctctcggcaggagtgggaatacctggaccctaatcagagggacttatacagggatgtgatgttggagaactatagaaacctggtatcactgggaggacattccatttctaaaccagttgtggttgatttactggagcgaggaaaagagccctggatgattttgagggaagaaacacagttcacagagatgggggtctcactgggttgctcagctggtctctaactcctgggctcaagcagtcctcctgcattggcttcccaaagtgctgaaaatacaggtgcggtggctcacgcctgtaatcccagcactttgggaggccgaggcgggcggatcacgagtgtgagataatcagctacatagaagtacccacttatgaaacagatatatcctctacacaacttcagagcatatataagagagagaaactctatgaat

SEQ ID NO: 203039 - DNA, 453 bp, Homo sapiens
  Payload ID: 20038
  Gene Name: zinc finger protein 573
  ENST ID: ENST00000585724
  CDS Start-End: 43-177
tcgcgtggttcttttgcaagctctggattctctggagtttgaatgtttccagtattggaaccccaccaagtaggactgatcaggtcttacaattctaaaaccatgacctgtgaggacattccatttctaaaccagttgtggttgatttactggagcgaggaaaagagccctggatgattttgagggaagaaacacagttcacagatttggatttacagtgtgagataatcagctacatagaagtacccacttatgaaacagatatatcctctacacaacttcagagcatatataagagagagaaactctatgaatgtaagaaatgtcagaagaaatttagtagtggttatcaacttattctacatcacaggtttcatgtcattgagagaccctatgaatgcaaagagtgtgggaagaactttcgtagtggctatcaacttactctacatcaaa

SEQ ID NO: 203040 - DNA, 2501 bp, Homo sapiens
  Payload ID: 20038
  Gene Name: zinc finger protein 573
  ENST ID: ENST00000589632
  CDS Start-End: 40-417
cgtggttcttttgcaagctctggattctctggagtttgaatgtttccagtattggaaccccaccaagtaggactgatcaggtcttacaattctaaaaccatgacctgtaactggggaagacctttgaagttctgtccaacaaagtatatgaagtttcaggaattagtgacattcagggatgtggccatagacttctctcggcaggagtgggaatacctggaccctaatcagagggacttatacagggatgtgatgttggagaactatagaaacctggtatcactgggaggacattccatttctaaaccagttgtggttgatttactggagcgaggaaaagagccctggatgattttgagggaagaaacacagttcacagagatgggggtctcactgggttgctcagctggtctctaactcctgggctcaagcagtcctcctgcattggcttcccaaagtgctgaaaatacagatggagtcttgctctgtcgcacaggctggagtgcagtggcccgatctcagctcactgcaacctccgcctcccaggttcaagcaattctcctgccacagcctccaagtagctgggattacagatttggatttacagtgtgagataatcagctacatagaagtacccacttatgaaacagatatatcctctacacaacttcagagcatatataagagagagaaactctatgaatgtaagaaatgtcagaagaaatttagtagtggttatcaacttattctacatcacaggtttcatgtcattgagagaccctatgaatgcaaagagtgtgggaagaactttcgtagtggctatcaacttactctacatcaaagatttcatactggtgagaaaccctatgaatgtacagaatgtgggaagaactttagaagtggttatcagctgactgtgcatcagagatttcatactggtgagaaaacctatgaatgtaggcagtgtgggaaggcctttatatatgcctcacacattgttcaacatgagagaattcacactggtgggaagccgtatgaatgtcaggagtgtgggagggcctttagtcaaggtggacatcttagaattcatcagagagttcatactggcgaaaaaccatataaatgtaaggaatgtgggaagacttttagtaggcgctcaaatcttgttgaacatgggcagtttcatactgatgagaagccatacatatgtgagaaatgtggaaaggcctttagaagaggtcaccagcttactgtacatcagagagttcacactggtaaaaagccatatgagtgtaaagaatgtgggaagggctataccactgcctcatactttcttctacatcagagaattcataaaggtggaaaaccctatgaatgtaaggagtgtaagaaaacctttactttgtatagaaatcttactcggcatcagaatattcatactggtgagaaactttttgaatgcaagcaatgtgggaagacctatactactggttcaaaactctttcaacatcagaaaactcatactggcgagaaaccctatgaatgcaaggaatgcggaaaggcctttagcttgtatggctaccttaaacaacatcagaaaattcatactggcatgaaacactttgaatgtaaggagtgtaaaaaaacctttactttgtatagaaatcttactcgacatcagaatattcacactggtaagaaactttttgaatgtcaggaatgtgggaaggcctatagtactggctcaaaccttattcaacatcggaaaactcatactggtgagaaaccctataaatgtaaggaatgtggcaagacctttagcttgcatggatatcttaatcaacatcagaaaattcatactggtatgaaaccctatgaatgtaaggtatgtagaaaaacctttactttctatagaaatcttactctacatcaaagtattcatactgatgagaaaccttttgaatgtaaggaatgtgggaagacctttagacgtagttcacaccttactgcacatcagagcattcatgctgataaaaaaccctatgaatgtaaagaatgtggaaaggcctttaaaatgtatggctaccttacccaacatcagaaaattcatactggtggaaaaccttatgaatgtaaagaatgtgggaaggccttcagtcgtgcttcaaaccttgttcaacatgagagaattcatactggtgagaaaccctatgtgtgtaagcagtgtgggaaaaccttcagatatggttcagcccttaaagcccatcagagaattcataggagcataaaagtgtaagaccgtaaagagtacgagcgcgccattcatcatcagacagcccacactggtgagaaatgatggaatgttagtcttataggtatggctttagcaattgagagagttcaaaatgcagatcttgccacattagaaagcattcaatgtcagtcctgttttaatggaatatctgactattcaatggtaaattaagaaaaaaaaaaaaaaa

SEQ ID NO: 203041 - DNA, 482 bp, Homo sapiens
  Payload ID: 20038
  Gene Name: zinc finger protein 573
  ENST ID: ENST00000588218
  CDS Start-End: 177-482
ctatggcttcccttccgttttcgcgtggttcttttgcaagatgttgggagccattgagctgaatctcattaacgttctcatatttggccgggtgtggtggctcacgcctgtaatcgcaccattttaggaggccaaggcggacggatcacttgagctctggattctctggagtttgaatgtttccagtattggaaccccaccaagtaggactgatcaggtcttacaattctaaaaccatgacctgtaactggggaagacctttgaagttctgtccaacaaagtatatgaagtttcaggaattagtgacattcagggatgtggccatagacttctctcggcaggagtgggaatacctggaccctaatcagagggacttatacagggatgtgatgttggagaactatagaaacctggtatcactgggaggacattccatttctaaaccagttgtggttgatttactggagcgaggaaaagagccc

SEQ ID NO: 203042 - DNA, 3309 bp, Homo sapiens
  Payload ID: 20039
  Gene Name: zinc finger protein 574
  ENST ID: ENST00000222339
  CDS Start-End: 236-3196
agctgaggagggagggactgaggagccgggcacccagagtggatctgggggaaagaggtggaaaagtgacagagggaagacagcctccaagctcagaggcagagagagggaggaggacaggtgagcggaggcacagaatagaaagagaaatggaaagagacctgccgagggagacttggaaagagggaagccagggtggaggagttctgacagagagagggatctaaacagagacatgccgagagcaacctgggctaacagcaaagagagaagttgggcagagtcagagaggggcccaagagacacaggaaatgggggctcaaaagcggaaagacatatccaggagatagagactggacggggtggggacagggccaaggcccaccgcaggcagaggatgaggctcagaggaacagaaagagccagtctgggaccaggacggaggcttggagacagcaggggcacggacatgccaggggcccgggcccagggccttgctgccgccatgactgaggaatcagaggagacagtcctgtacattgagcaccgctatgtctgctctgagtgcaaccagctgtatggatcactggaagaggtgcttatgcaccaaaactcccacgtgccccagcagcactttgagctggtgggcgtggctgatcccggagtcactgtggccacagacacagcttcaggcacgggcctctatcagacccttgtgcaggagagccagtaccagtgcctggagtgtggtcaactgctgatgtcacccagccagctcctggagcaccaggagctgcacctgaagatgatggcaccccaggaggcagtgccagctgagccatcacctaaggcaccacccctgagctccagcaccatccactacgagtgtgtggattgcaaggctctctttgccagccaggagctctggctgaaccaccggcagacgcacctccgggccacacccaccaaggctcctgcccctgttgtcctggggtccccagttgttctagggcctcctgtgggccaggcccgagtggctgtggagcactcataccgaaaggcagaagagggtggggaaggggcgactgtcccatctgccgctgccaccaccactgaggtagtgactgaggtggagctgctcctctacaagtgctctgagtgctcccagctcttccagctgccggcggatttcctggagcaccaggccactcacttccctgctcctgtacccgagtctcaggagcctgccttacagcaggaggtgcaggcctcgtcacctgcagaggtgcctgtgtctcagcctgaccccttgccagcttctgaccacagttacgagctgcgcaatggtgaagccattgggcgggatcgccgggggcgcagggcccggaggaacaacagtggagaagcaggcggggcagccacacaggagctcttctgctcagcctgtgaccagctctttctctcaccccaccagctacagcagcacctgcggagtcaccgggagggcgtctttaagtgccccctgtgcagtcgtgtcttccctagcccttccagtctggaccagcaccttggagaccatagcagcgagtcacacttcctgtgtgtagactgtggcctggccttcggcacagaggccctcctcctggcccaccggcgagcccacaccccgaatcctctgcattcatgtccatgtgggaagacctttgtcaaccttaccaagttcctttatcaccggcgtactcatggggtagggggtgtccctctgcccacaacaccagtcccaccagaggaacctgtcattggtttccctgagccagccccagcagagactggagagccagaggcccctgagccccctgtgtctgaggagacctcagcagggcccgctgccccaggcacctaccgctgcctcctgtgcagccgtgaatttggaaaggccttgcagctgacccggcaccaacgttttgtgcatcggctggagcggcgccataaatgcagcatttgtggcaagatgttcaagaagaagtctcacgtgcgtaaccacctgcgcacacacacaggggagcggcccttcccctgccctgactgctccaagcccttcaactcacctgccaacctggcccgccaccggctcacacacacaggagagcggccctaccggtgtggggactgtggcaaggctttcacgcaaagctccacactgaggcagcaccgcttggtgcatgcccagcacttcccctaccgctgccaggaatgtggggtgcgttttcaccgtccttaccgcctgctcatgcaccgctaccatcacacaggtgaatacccctacaagtgtcgcgagtgcccccgctccttcttgctgcgtcggctgctggaggtgcaccagctcgtggtccatgccgggcgccagccccaccgctgcccatcctgtggggctgccttcccctcctcactgcggctccgggagcaccgctgtgcagccgctgctgcccaggccccacggcgctttgagtgtggcacctgtggcaagaaagtgggctcagctgctcgactgcaggcacacgaggcggcccatgcagctgctgggcctggagaggtcctggctaaggagccccctgcccctcgagccccacgggccactcgtgcaccagttgcctctccagcagcccttggaagcactgctacagcatcccctgcggcccctgcccgccgccggggtctagagtgcagcgagtgcaagaagctgttcagcacagagacgtcactgcaggtgcaccggcgcatccacacaggtgagcggccatacccatgtccagactgtggcaaagcgttccgtcagagtacccacctgaaagaccaccggcgcctgcacacaggtgagcggccctttgcctgtgaagtgtgtggcaaggcctttgccatctccatgcgcctggcagaacatcgccgcatccacacaggcgaacgaccctactcctgccctgactgtggcaagagctaccgctccttctccaacctctggaagcaccgcaagacccatcagcagcagcatcaggcagctgtgcggcagcagctggcagaggcggaggctgccgttggcctggccgtcatggagactgctgtggaggcgctacccctggtggaagccattgagatctaccctctggccgaggctgagggggtccagatcagtggctgactctgcccgacttcctctttggcacctccattccctgttgctgaaggccctccagcatccccttaagcatctgtacatactgtgtcccttcctcttcccatccccaccacctt

SEQ ID NO: 203043 - DNA, 2940 bp, Homo sapiens
  Payload ID: 20039
  Gene Name: zinc finger protein 574
  Uniprot ID: Q6ZN55
  ENST ID: ENST00000359044
  CDS Start-End: 142-2832
gagagcgaggctacggagcaggcgagaggcgacggcgagagctagagcgggcgcagcgttagggtggccgtgcaaggggagccgtggcccgggcccggggcgtgcgagacggcggaagcagcccagggccttgctgccgccatgactgaggaatcagaggagacagtcctgtacattgagcaccgctatgtctgctctgagtgcaaccagctgtatggatcactggaagaggtgcttatgcaccaaaactcccacgtgccccagcagcactttgagctggtgggcgtggctgatcccggagtcactgtggccacagacacagcttcaggcacgggcctctatcagacccttgtgcaggagagccagtaccagtgcctggagtgtggtcaactgctgatgtcacccagccagctcctggagcaccaggagctgcacctgaagatgatggcaccccaggaggcagtgccagctgagccatcacctaaggcaccacccctgagctccagcaccatccactacgagtgtgtggattgcaaggctctctttgccagccaggagctctggctgaaccaccggcagacgcacctccgggccacacccaccaaggctcctgcccctgttgtcctggggtccccagttgttctagggcctcctgtgggccaggcccgagtggctgtggagcactcataccgaaaggcagaagagggtggggaaggggcgactgtcccatctgccgctgccaccaccactgaggtagtgactgaggtggagctgctcctctacaagtgctctgagtgctcccagctcttccagctgccggcggatttcctggagcaccaggccactcacttccctgctcctgtacccgagtctcaggagcctgccttacagcaggaggtgcaggcctcgtcacctgcagaggtgcctgtgtctcagcctgaccccttgccagcttctgaccacagttacgagctgcgcaatggtgaagccattgggcgggatcgccgggggcgcagggcccggaggaacaacagtggagaagcaggcggggcagccacacaggagctcttctgctcagcctgtgaccagctctttctctcaccccaccagctacagcagcacctgcggagtcaccgggagggcgtctttaagtgccccctgtgcagtcgtgtcttccctagcccttccagtctggaccagcaccttggagaccatagcagcgagtcacacttcctgtgtgtagactgtggcctggccttcggcacagaggccctcctcctggcccaccggcgagcccacaccccgaatcctctgcattcatgtccatgtgggaagacctttgtcaaccttaccaagttcctttatcaccggcgtactcatggggtagggggtgtccctctgcccacaacaccagtcccaccagaggaacctgtcattggtttccctgagccagccccagcagagactggagagccagaggcccctgagccccctgtgtctgaggagacctcagcagggcccgctgccccaggcacctaccgctgcctcctgtgcagccgtgaatttggaaaggccttgcagctgacccggcaccaacgttttgtgcatcggctggagcggcgccataaatgcagcatttgtggcaagatgttcaagaagaagtctcacgtgcgtaaccacctgcgcacacacacaggggagcggcccttcccctgccctgactgctccaagcccttcaactcacctgccaacctggcccgccaccggctcacacacacaggagagcggccctaccggtgtggggactgtggcaaggctttcacgcaaagctccacactgaggcagcaccgcttggtgcatgcccagcacttcccctaccgctgccaggaatgtggggtgcgttttcaccgtccttaccgcctgctcatgcaccgctaccatcacacaggtgaatacccctacaagtgtcgcgagtgcccccgctccttcttgctgcgtcggctgctggaggtgcaccagctcgtggtccatgccgggcgccagccccaccgctgcccatcctgtggggctgccttcccctcctcactgcggctccgggagcaccgctgtgcagccgctgctgcccaggccccacggcgctttgagtgtggcacctgtggcaagaaagtgggctcagctgctcgactgcaggcacacgaggcggcccatgcagctgctgggcctggagaggtcctggctaaggagccccctgcccctcgagccccacgggccactcgtgcaccagttgcctctccagcagcccttggaagcactgctacagcatcccctgcggcccctgcccgccgccggggtctagagtgcagcgagtgcaagaagctgttcagcacagagacgtcactgcaggtgcaccggcgcatccacacaggtgagcggccatacccatgtccagactgtggcaaagcgttccgtcagagtacccacctgaaagaccaccggcgcctgcacacaggtgagcggccctttgcctgtgaagtgtgtggcaaggcctttgccatctccatgcgcctggcagaacatcgccgcatccacacaggcgaacgaccctactcctgccctgactgtggcaagagctaccgctccttctccaacctctggaagcaccgcaagacccatcagcagcagcatcaggcagctgtgcggcagcagctggcagaggcggaggctgccgttggcctggccgtcatggagactgctgtggaggcgctacccctggtggaagccattgagatctaccctctggccgaggctgagggggtccagatcagtggctgactctgcccgacttcctctttggcacctccattccctgttgctgaaggccctccagcatccccttaagcatctgtacatactgtgtcccttcctcttcccatccccacc

SEQ ID NO: 203044 - DNA, 3598 bp, Homo sapiens
  Payload ID: 20039
  Gene Name: zinc finger protein 574
  Uniprot ID: Q6ZN55
  ENST ID: ENST00000600245
  CDS Start-End: 656-3346
gatgagaagaaggagctgcattggatggaaggcccacccccgagccaccccctctaccacaccatgccaccgccctgcccaggcagccctgggcacaggagcccacagagatgagaggcaagaagacccagggagaaggccactgagatgaggggagagggctacagagatgaagagaaatgaagagaagagagacagccgtcaagactgtccagagaagtgggctgaggcccacaaaccccacaaggacaaggacaggaaaagcccagggataagaaagaaaggcccatggagacaagggagcagcctacagagacaagcaaaaggacctcggagacaaggggcagtaatgtggacatagagacctcccgcgaaggaaaacgggagaagccagagacacaagagagaggcccctggaaacagaaagcactcctcagatatggggagcggtccacagggcagggagagagccaaggagagccgaagaaggtcacagaaacaagggaggcctacagacaccagggtaccaaaaagacaaggatgtggctcatagacacaagagagccactgaggcaggagctgccagcctggagatgcggggcaagcctcccccaatataaatagctcctatagagcccagggccttgctgccgccatgactgaggaatcagaggagacagtcctgtacattgagcaccgctatgtctgctctgagtgcaaccagctgtatggatcactggaagaggtgcttatgcaccaaaactcccacgtgccccagcagcactttgagctggtgggcgtggctgatcccggagtcactgtggccacagacacagcttcaggcacgggcctctatcagacccttgtgcaggagagccagtaccagtgcctggagtgtggtcaactgctgatgtcacccagccagctcctggagcaccaggagctgcacctgaagatgatggcaccccaggaggcagtgccagctgagccatcacctaaggcaccacccctgagctccagcaccatccactacgagtgtgtggattgcaaggctctctttgccagccaggagctctggctgaaccaccggcagacgcacctccgggccacacccaccaaggctcctgcccctgttgtcctggggtccccagttgttctagggcctcctgtgggccaggcccgagtggctgtggagcactcataccgaaaggcagaagagggtggggaaggggcgactgtcccatctgccgctgccaccaccactgaggtagtgactgaggtggagctgctcctctacaagtgctctgagtgctcccagctcttccagctgccggcggatttcctggagcaccaggccactcacttccctgctcctgtacccgagtctcaggagcctgccttacagcaggaggtgcaggcctcgtcacctgcagaggtgcctgtgtctcagcctgaccccttgccagcttctgaccacagttacgagctgcgcaatggtgaagccattgggcgggatcgccgggggcgcagggcccggaggaacaacagtggagaagcaggcggggcagccacacaggagctcttctgctcagcctgtgaccagctctttctctcaccccaccagctacagcagcacctgcggagtcaccgggagggcgtctttaagtgccccctgtgcagtcgtgtcttccctagcccttccagtctggaccagcaccttggagaccatagcagcgagtcacacttcctgtgtgtagactgtggcctggccttcggcacagaggccctcctcctggcccaccggcgagcccacaccccgaatcctctgcattcatgtccatgtgggaagacctttgtcaaccttaccaagttcctttatcaccggcgtactcatggggtagggggtgtccctctgcccacaacaccagtcccaccagaggaacctgtcattggtttccctgagccagccccagcagagactggagagccagaggcccctgagccccctgtgtctgaggagacctcagcagggcccgctgccccaggcacctaccgctgcctcctgtgcagccgtgaatttggaaaggccttgcagctgacccggcaccaacgttttgtgcatcggctggagcggcgccataaatgcagcatttgtggcaagatgttcaagaagaagtctcacgtgcgtaaccacctgcgcacacacacaggggagcggcccttcccctgccctgactgctccaagcccttcaactcacctgccaacctggcccgccaccggctcacacacacaggagagcggccctaccggtgtggggactgtggcaaggctttcacgcaaagctccacactgaggcagcaccgcttggtgcatgcccagcacttcccctaccgctgccaggaatgtggggtgcgttttcaccgtccttaccgcctgctcatgcaccgctaccatcacacaggtgaatacccctacaagtgtcgcgagtgcccccgctccttcttgctgcgtcggctgctggaggtgcaccagctcgtggtccatgccgggcgccagccccaccgctgcccatcctgtggggctgccttcccctcctcactgcggctccgggagcaccgctgtgcagccgctgctgcccaggccccacggcgctttgagtgtggcacctgtggcaagaaagtgggctcagctgctcgactgcaggcacacgaggcggcccatgcagctgctgggcctggagaggtcctggctaaggagccccctgcccctcgagccccacgggccactcgtgcaccagttgcctctccagcagcccttggaagcactgctacagcatcccctgcggcccctgcccgccgccggggtctagagtgcagcgagtgcaagaagctgttcagcacagagacgtcactgcaggtgcaccggcgcatccacacaggtgagcggccatacccatgtccagactgtggcaaagcgttccgtcagagtacccacctgaaagaccaccggcgcctgcacacaggtgagcggccctttgcctgtgaagtgtgtggcaaggcctttgccatctccatgcgcctggcagaacatcgccgcatccacacaggcgaacgaccctactcctgccctgactgtggcaagagctaccgctccttctccaacctctggaagcaccgcaagacccatcagcagcagcatcaggcagctgtgcggcagcagctggcagaggcggaggctgccgttggcctggccgtcatggagactgctgtggaggcgctacccctggtggaagccattgagatctaccctctggccgaggctgagggggtccagatcagtggctgactctgcccgacttcctctttggcacctccattccctgttgctgaaggccctccagcatccccttaagcatctgtacatactgtgtcccttcctcttcccatccccaccaccttgtaagttctaaattggatttattctctcgtgaggggggtgctctggggtccttgacacacataaaggtgcccccccaccttccacctcttagcactggtgaccccaaaaatgaaaccatcaataaagactgagttgcca

SEQ ID NO: 203045 - DNA, 858 bp, Homo sapiens
  Payload ID: 20039
  Gene Name: zinc finger protein 574
  ENST ID: ENST00000597391
  CDS Start-End: 483-858
aactatacatgcctggtgttagggaatttaatccatgagaaggttaggacatctagtgaccaaatggccatagaattggccccgggtctcactgtgagacgcatcccatagtggcttcagatggagtctcgctctgtcgcccaggcgggagtgcagtggcgtgatctcggctcactgcaacctcggcctcctgggtgcaatcaaatctcgagcctcagcctcccgagttgctggggttacaggcacgagccaccacgcccagctaatgttttgtatttttagtaaagatggtagtttcaccaggttggccaggtgggtctcgaatgcctgacttcaagtgaacccgcctcagcgtcccaaaatgttgggattgcaggcgtgagccaccacgcccagcctggaaacgtttctaacagtactggggcaactccctcccaaggccctgaggggcgcaggaacgagcccagggccttgctgccgccatgactgaggaatcagaggagacagtcctgtacattgagcaccgctatgtctgctctgagtgcaaccagctgtatggatcactggaagaggtgcttatgcaccaaaactcccacgtgccccagcagcactttgagctggtgggcgtggctgatcccggagtcactgtggccacagacacagcttcaggcacgggcctctatcagacccttgtgcaggagagccagtaccagtgcctggagtgtggtcaactgctgatgtcacccagccagctcctggagcaccaggagctgcacctgaagatgatggcaccccaggaggcagtgccagctgagccatcacctaaggcaccacccctgagctccagcaccatccact

SEQ ID NO: 203046 - DNA, 3070 bp, Homo sapiens
  Payload ID: 20039
  Gene Name: zinc finger protein 574
  ENST ID: ENST00000613064
  CDS Start-End: 1292-2926
gcgacggcgagagctagagcgggcgcagcgttagggtggccgtgcaaggggagccgtggcccgggcccggggcgtgcgagacggcggaagcagcccagggccttgctgccgccatgactgaggaatcagaggagacagtcctgtacattgagcaccgctatgtctgctctgagtgcaaccagctgtatggatcactggaagaggtgcttatgcaccaaaactcccacgtgccccagcagcactttgagctggtgggcgtggctgatcccggagtcactgtggccacagacacagcttcaggcacgggcctctatcagacccttgtgcaggagagccagtaccagtgcctggagtgtggtcaactgctgatgtcacccagccagctcctggagcaccaggagctgcacctgaagatgatggcaccccaggaggcagtgccagctgagccatcacctaaggcaccacccctgagctccagcaccatccactacgagtgtgtggattgcaaggctctctttgccagccaggagctctggctgaaccaccggcagacgcacctccgggccacacccaccaaggctcctgcccctgttgtcctggggtccccagttgttctagggcctcctgtgggccaggcccgagtggctgtggagcactcataccgaaaggcagaagagggtggggaaggggcgactgtcccatctgccgctgccaccaccactgaggtagtgactgaggtggagctgctcctctacaagtgctctgagtgctcccagctcttccagctgccggcggatttcctggagcaccaggccactcacttccctgctcctgtacccgagtctcaggagcctgccttacagcaggaggtgcaggcctcgtcacctgcagaggtgcctgtgtctcagcctgaccccttgccagcttctgaccacagttacgagctgcgcaatggtgaagccattgggcgggatcgccgggggcgcagggcccggaggaacaacagtggagaagcaggcggggcagccacacaggagctcttctgctcagcctgtgaccagctctttctctcaccccaccagctacagcagcacctgcggagtcaccgggagggcgtctttaagtgccccctgtgcagtcgtgtcttccctagcccttccagtctggaccagcaccttggagaccatagcagcgagtcacacttcctgtgtgtagactgtggcctggccttcggcacagaggccctcctcctggcccaccggcgagcccacaccccgaatcctctgcattcatgtccatgtgggaagacctttgtcaaccttaccaagttcctttatcaccggcgtactcatggggtagggggtgtcccctgcccacaacaccagtcccaccagaggaacctgtcattggtttccctgagccagccccagcagagactggagagccagaggcccctgagccccctgtgtctgaggagacctcagcagggcccgctgccccaggcacctaccgctgcctcctgtgcagccgtgaatttggaaaggccttgcagctgacccggcaccaacgttttgtgcatcggctggagcggcgccataaatgcagcatttgtggcaagatgttcaagaagaagtctcacgtgcgtaaccacctgcgcacacacacaggggagcggcccttcccctgccctgactgctccaagcccttcaactcacctgccaacctggcccgccaccggctcacacacacaggagagcggccctaccggtgtggggactgtggcaaggctttcacgcaaagctccacactgaggcagcaccgcttggtgcatgcccagcacttcccctaccgctgccaggaatgtggggtgcgttttcaccgtccttaccgcctgctcatgcaccgctaccatcacacaggtgaatacccctacaagtgtcgcgagtgcccccgctccttcttgctgcgtcggctgctggaggtgcaccagctcgtggtccatgccgggcgccagccccaccgctgcccatcctgtggggctgccttcccctcctcactgcggctccgggagcaccgctgtgcagccgctgctgcccaggccccacggcgctttgagtgtggcacctgtggcaagaaagtgggctcagctgctcgactgcaggcacacgaggcggcccatgcagctgctgggcctggagaggtcctggctaaggagccccctgcccctcgagccccacgggccactcgtgcaccagttgcctctccagcagcccttggaagcactgctacagcatcccctgcggcccctgcccgccgccggggtctagagtgcagcgagtgcaagaagctgttcagcacagagacgtcactgcaggtgcaccggcgcatccacacaggtgagcggccatacccatgtccagactgtggcaaagcgttccgtcagagtacccacctgaaagacaccggcgcctgcacacaggtgagcggccctttgcctgtgaagtgtgtggcaaggcctttgccatctccatgcgcctggcagaacatcgccgcatccacacaggcgaacgaccctactcctgccctgactgtggcaagagctaccgctccttctccaacctctggaagcaccgcaagacccatcagcagcagcatcaggcagctgtgcggcagcagctggcagaggcggaggctgccgttggcctggccgtcatggagactgctgtggaggcgctacccctggtggaagccattgagatctaccctctggccgaggctgagggggtccagatcagtggctgactctgcccgacttcctctttggcacctccattccctgttgctgaaggccctccagcatccccttaagcatctgtacatactgtgtcccttcctcttcccatccccaccaccttgtaagttctaaattggatttattctctcgtgaggggggtgctctggggtccttgacacacataaaggtgcccccccaccttccacctcttagcactggtgaccccaaaaatgaaaccatcaataaagactgagttgccagcagtgtgtagagtgg

SEQ ID NO: 203047 - DNA, 1298 bp, Homo sapiens
  Payload ID: 20040
  Gene Name: zinc finger protein 575
  Uniprot ID: Q86XF7
  ENST ID: ENST00000314228
  CDS Start-End: 513-1250
acgaacttgcctgcctggctggcgcacccagcccctccttccattccttcttccccctctctgcagcctctgccagcccgcactgcgcatgctttctgacgccccctttggtccagcgtgggaggaggggatggaaatgaggttgggctaagcagcttgcgcgcgctcccttgcctgccctcccccgacgccggacgcgcgccgggcggggcagctccgctggtccgagggcagtgcagcagcggcgacagcggctgcggccgtggccgtggcgggaggagccggaagccccgcccccggggaggggccgtcctgcaggtcccccctctatcctccacggccccatccaagccagggatgaaatttaacggcaagaagggcgcagttgacgcggcgtcaatgaactgagactaagtcaaaagccgggccctccaaccctatccccatcagcctggtcatcaccggcgtcacccccgccccgcgccctgcccctaggttcctgtgccagcaagatgctggagcgaggcgcggagtccgcggccggggctaccgatcctagtcccactggcaaggaaccagtgaccaaagaagctccccaccagggcccaccgcagaagcccagccagtcagctccagggcccaccgcgtccgcgggctcgcctccccggcctcgccggcggcccccgccccagcgcccgcaccgctgccccgactgtgacaaggccttctcgtacccgtccaagctggccacgcaccgcttagcacacggaggcgcccgaccccacccatgcccagactgccccaaggccttctcctacccctccaagctggcagcccaccgcctcacgcacagcggcgcccgcccgcacccgtgcccacactgcccgaagtcctttggccaccgctccaagctggcggctcacctctggacccacgcacccacccgcccctacccgtgccccgactgccccaagtccttctgctacccttccaagctggcggcccaccgccacacgcaccacgccaccgacgcccgcccctatccttgcccgcattgccccaaggctttctcatttccctccaagctggccgcccatcgcctatgtcacgaccccccaaccgcgcccggcagccaggcgactgcctggcaccgatgctccagctgcggccaggcctttggccagagacgcttactgctccttcatcaacgcagccaccaccaggtggagcacaagggggagagagactgagccctcccttggctcactgtccccttctgccgccagccctagccagta

SEQ ID NO: 203048 - DNA, 2285 bp, Homo sapiens
  Payload ID: 20040
  Gene Name: zinc finger protein 575
  ENST ID: ENST00000458714
  CDS Start-End: 808-1842
agctgtttccctctctctgagggcaactcccctggccctccctccttcggcctggttgcaattctggccggaaacccgctggtgcctgtggcaaataaagtgaggaaggcaggaacctttagacttcccagtgtgaggcaacggcagggctaggactagggtgaggctgttggtgcaagatttaaggaggcgctcactcacaggtgcggaccctgcacttacaggaccctgagagcgagtgcctccttaaatgttgcactccagggtcctcaccgtccttttcctagtcctgggctccgggttctaagcacccagatgctccttcctcaaacggaggtttccgcaagacaggactgggtctctttccttctcagccctgccctcagaattccagcccctaatcaacttttatggagatgcatgccaggccaaagggctgcccctaagctttaggaaggaaactccttaaatgctgttgacttaggagttccgccagtgccccacctgcccagagcctcttgccccagtgccccacctgggtttatggtgcccccctcccagaaatatgagctcaggggtcagaaacccaggtcctgaggtccctcctccccaaggactcaggatcccaggcccccagtcccctcttcccttaagtttaagaagtccaggccaccaccctcttggggacccagcacccaactcacgaagcgcccgaagcggatggagtctccatcctcaatgtactcaggagttctgggccccagcttcccattccactgacgctgcagcccagccccgctgggatccatgagtttggtccccggactgaccagcatagagcagccgcagccccagctccttgatcagctgggcatcccgaggcgctgtttccaggactgggtcgatcagaacggcctcccgggactctctgtcacccagcagatacggggtatcactctgttgcgcaggctggaatgcagtaacacaatcatagctcattgcagacatgaactcctgggccctccaaccctatccccatcagcctggtcatcaccggcgtcacccccgccccgcgccctgcccctaggttcctgtgccagcaagatgctggagcgaggcgcggagtccgcggccggggctaccgatcctagtcccactggcaaggaaccagtgaccaaagaagctccccaccagggcccaccgcagaagcccagccagtcagctccagggcccaccgcgtccgcgggctcgcctccccggcctcgccggcggcccccgccccagcgcccgcaccgctgccccgactgtgacaaggccttctcgtacccgtccaagctggccacgcaccgcttagcacacggaggcgcccgaccccacccatgcccagactgccccaaggccttctcctacccctccaagctggcagcccaccgcctcacgcacagcggcgcccgcccgcacccgtgcccacactgcccgaagtcctttggccaccgctccaagctggcggctcacctctggacccacgcacccacccgcccctacccgtgccccgactgccccaagtccttctgctacccttccaagctggcggcccaccgccacacgcaccacgccaccgacgcccgcccctatccttgcccgcattgccccaaggctttctcatttccctccaagctggccgcccatcgcctatgtcacgaccccccaaccgcgcccggcagccaggcgactgcctggcaccgatgctccagctgcggccaggcctttggccagagacgcttactgctccttcatcaacgcagccaccaccaggtggagcacaagggggagagagactgagccctcccttggctcactgtccccttctgccgccagccctagccagtaagaggtgggatttctaagaccgactgtatgagctcgcctcttccagatagctggcagagggcagggcaagggattggccatttatactgggctcgagctcagaagcccgaggaactctttgctcccctgctttggggagatctcaaaccatggacgtggagctgtggtttgacagcgctggctctgcttctccccacacacttacatggcaaaggtaaaaagtctgctactatcgtgggttgatgaggattgtgggcaaacaggctctcttgttaaaagtttaaactggtgtctccactttggccatatgacggtatctaagaaattgaaaatacatacatgcttgtctcaactcttccacttgtaggaatttattctataaactcatgaatgtg

SEQ ID NO: 203049 - DNA, 536 bp, Homo sapiens
  Payload ID: 20040
  Gene Name: zinc finger protein 575
  ENST ID: ENST00000598080
  CDS Start-End: 234-536
agactttttgcaaacgccttgaagggtagaattagcagcgagctcttgaaactgcctctggagatggaactcagcggaattctcgaaaagaagagggacattaaaaagacgggtgcatgcactgatttccaagcgcagtttgtccatgccctccaaccctatccccatcagcctggtcatcaccggcgtcacccccgccccgcgccctgcccctaggttcctgtgccagcaagatgctggagcgaggcgcggagtccgcggccggggctaccgatcctagtcccactggcaaggaaccagtgaccaaagaagctccccaccagggcccaccgcagaagcccagccagtcagctccagggcccaccgcgtccgcgggctcgcctccccggcctcgccggcggcccccgccccagcgcccgcaccgctgccccgactgtgacaaggccttctcgtacccgtccaagctggccacgcaccgcttagcacacggaggcgcccgaccccacccatgcccagactgccccaaggccttctcc

SEQ ID NO: 203050 - DNA, 1086 bp, Homo sapiens
  Payload ID: 20040
  Gene Name: zinc finger protein 575
  Uniprot ID: Q86XF7
  ENST ID: ENST00000601282
  CDS Start-End: 235-972
ggcagctccgctggtccgagggcagtgcagcagcggcgacagcggctgcggccgtggccgtggcgggaggagccggaagccccgcccccggggaggggccgtcctgcaggtcccccctctatcctccacggccccatccaagccagggatgaaatttaacggcaagaagggcgcagttgacgcggcgtcaatgaactgagactaagtcaaaagccgggttcctgtgccagcaagatgctggagcgaggcgcggagtccgcggccggggctaccgatcctagtcccactggcaaggaaccagtgaccaaagaagctccccaccagggcccaccgcagaagcccagccagtcagctccagggcccaccgcgtccgcgggctcgcctccccggcctcgccggcggcccccgccccagcgcccgcaccgctgccccgactgtgacaaggccttctcgtacccgtccaagctggccacgcaccgcttagcacacggaggcgcccgaccccacccatgcccagactgccccaaggccttctcctacccctccaagctggcagcccaccgcctcacgcacagcggcgcccgcccgcacccgtgcccacactgcccgaagtcctttggccaccgctccaagctggcggctcacctctggacccacgcacccacccgcccctacccgtgccccgactgccccaagtccttctgctacccttccaagctggcggcccaccgccacacgcaccacgccaccgacgcccgcccctatccttgcccgcattgccccaaggctttctcatttccctccaagctggccgcccatcgcctatgtcacgaccccccaaccgcgcccggcagccaggcgactgcctggcaccgatgctccagctgcggccaggcctttggccagagacgcttactgctccttcatcaacgcagccaccaccaggtggagcacaagggggagagagactgagccctcccttggctcactgtccccttctgccgccagccctagccagtaagaggtgggatttctaagaccgactgtatgagctcgcctcttccagatagctggcagagggcaggg

SEQ ID NO: 203051 - DNA, 2566 bp, Homo sapiens
  Payload ID: 20041
  Gene Name: zinc finger protein 576
  Uniprot ID: Q9H609
  ENST ID: ENST00000336564
  CDS Start-End: 155-667
cctgggagcaggaacctgtaggcagcgcttgagggtagcgggatagcagctgcaagcgcgcgtgggaggcgggggctctgggcggaacaaaaatcacaggatgtcagaggatgtttcccgggaagaactgggataaaggaagggtcccagcaccatggaggacccgaaccctgaagagaacatgaagcagcaggattcacccaaggagagaagtccccagagcccaggaggcaacatctgccacctgggggccccgaagtgcacccgctgcctcatcaccttcgcagattccaagttccaggagcgtcacatgaagcgggagcacccagcggacttcgtggcccagaagctgcagggggtcctcttcatctgcttcacctgcgcccgctccttcccctcctccaaagccctaatcacccaccagcgcagccacggtccagccgccaagcccaccctgccggttgcaaccactactgcccagcccaccttcccttgtcctgactgtggcaagacctttgggcaggctgtttctctgaggcggcaccgccagatgcatgaggtccgtgcccctcctggcaccttcgcctgcacagagtgcggtcaggactttgctcaggaagcagggctgcatcaacactacattcggcatgcccggggggagctctgagtgcagcttaagcctctccacggtgacgggtggctctgtggctggtaggactcacccatgatatggggtgcaggaactctgggggccctgaaggatttgcttccctcccctgggaaggcagagggctcttaataaagaggacccagaagattcttatttagagcttcagtctttggagcacacagggccttcgtgagacagtgaaatcagataataatgagatcttttgttaaaaaaaaaaaatgggaagggagtgcgggagagaaatggtttgtgtctcccttattcccagttaaatacctagctgcagattgtgccatcacccttcattcttcccagatggatgccatgggctatgggagcaaattgccctggacctttgcctgaatgggggcaggaaaggtgaggtgttgctggcctgtaatgccaccaggtgagttccagatgtggagcaacttgggcttttggggatggggcagcaaagttgggagctggaccccaattgagtgggggtagcaattggagtccttgtgtctcttttccaccccctgccatcctcacttagaggggccatggcactagatggcactagtcccccgataatttatgtctcgttgaaataattttgtatatcattctagtcctgaaatatttttttcatatgtgtaggtgaaatggtatgaataagctaacaggaatagtatctaaaaacagaaaacatccatattaaaatgtctaaacagggagctctggcttttgagtgggaatttccagagaacataagggtgtgggcaggtgggggaactcaggccagagttggcctcgctttgtggggaaactggtttggaatcaaacagagataccttctgtttcgggttttatttggccaacactgggagatttcccattaagatcctattttcagctctcttgaaaggcccaacctaggctgacattgtcagcaggggcaggacagaagttacaacaggctggagggagcagtgggtgtcaccctcaactggagatgagtcccaccaggccagttttacccccttagttacctgccctgcacctgcagacaatggtcgatgccttgcatataatacttatagactctgtttatgttgagggatgtttttaaagcccacaggtgaggtggatgtggtagactgatcactgtctctgtttttagctaggcacacagtagctgaaaagactgcatttcccagattcctttgcagctagatgtggccttgtgactgatttctggctaaattcctgggtagaacagtcaagcttaagaaagggacggctgggcacagtggctcacgcctgtaatcccagcactttgtgaggctgaggccggtggatcacctgaggtcaggagtttgagaccagcctggccaacatggtgaaaccctgtctctaccaaaaatacaaaaattagccgggtgtggtggcatatgcctgtaatcccagctacttgggaggctgaggcaggagaattgcttgaacctgggagacaggttgcagtgagccaagatcgtgccattgcacttcagcctgggtgacagagtgagactgtttaaaaaaaaagaaaagaaagggacataccttttttccaccttcctaactgtaatacggaaatggtatccagccatctcagaccataaggataagagcaacacgtgggaagacagagcaacaagataggagcctgggtctctcgtcaatttcaaggagcacagccaccataccagcccacttccatattgctatctaagaaagaaacttctatcttatttaagccaccattattttgggtctctgtcacatgcaacagaatttacagcctaagacaggggtctgcaaactatggccaactctagcctgctgcct

SEQ ID NO: 203052 - DNA, 1468 bp, Homo sapiens
  Payload ID: 20041
  Gene Name: zinc finger protein 576
  Uniprot ID: Q9H609
  ENST ID: ENST00000391965
  CDS Start-End: 210-722
attttgaggaccgggctggtgcgactatactactgccggatggcaaatccgggatctcggctccgagaggctcatctggcaaaagggcgcggaaaccacgggggccctgagactgagtggtccctatcccacttctctctggggcggcgctgtagccagcggctgacaggcgcagcgaaaggcagccctctgctaagggtcccagcaccatggaggacccgaaccctgaagagaacatgaagcagcaggattcacccaaggagagaagtccccagagcccaggaggcaacatctgccacctgggggccccgaagtgcacccgctgcctcatcaccttcgcagattccaagttccaggagcgtcacatgaagcgggagcacccagcggacttcgtggcccagaagctgcagggggtcctcttcatctgcttcacctgcgcccgctccttcccctcctccaaagccctaatcacccaccagcgcagccacggtccagccgccaagcccaccctgccggttgcaaccactactgcccagcccaccttcccttgtcctgactgtggcaagacctttgggcaggctgtttctctgaggcggcaccgccagatgcatgaggtccgtgcccctcctggcaccttcgcctgcacagagtgcggtcaggactttgctcaggaagcagggctgcatcaacactacattcggcatgcccggggggagctctgagtgcagcttaagcctctccacggtgacgggtggctctgtggctggtaggactcacccatgatatggggtgcaggaactctgggggccctgaaggatttgcttccctcccctgggaaggcagagggctcttaataaagaggacccagaagattcttatttagagcttcagtctttggagcacacagggccttcgtgagacagtgaaatcagataataatgagatcttttgttaaaaaaaaaaaatgggaagggagtgcgggagagaaatggtttgtgtctcccttattcccagttaaatacctagctgcagattgtgccatcacccttcattcttcccagatggatgccatgggctatgggagcaaattgccctggacctttgcctgaatgggggcaggaaaggtgaggtgttgctggcctgtaatgccaccaggtgagttccagatgtggagcaacttgggcttttggggatggggcagcaaagttgggagctggaccccaattgagtgggggtagcaattggagtccttgtgtctcttttccaccccctgccatcctcacttagaggggccatggcactagatggcactagtcccccgataatttatgtctcgttgaaataattttgtatatcattctagtcctgaaatatttttttcatatgtgtaggtgaaatggtatgaataagctaacaggaatagtatctaaaaacagaaaacatccatattaaaatgtctaaacaggga

SEQ ID NO: 203053 - DNA, 830 bp, Homo sapiens
  Payload ID: 20041
  Gene Name: zinc finger protein 576
  Uniprot ID: Q9H609
  ENST ID: ENST00000529930
  CDS Start-End: 162-674
aaaactgaggcctgggagcaggaacctgtaggcagcgcttgagggtagcgggatagcagctgcaagcgcgcgtgggaggcgggggctctgggcggaacaaaaatcacaggatgtcagaggatgtttcccgggaagaactgggataaaggggtcccagcaccatggaggacccgaaccctgaagagaacatgaagcagcaggattcacccaaggagagaagtccccagagcccaggaggcaacatctgccacctgggggccccgaagtgcacccgctgcctcatcaccttcgcagattccaagttccaggagcgtcacatgaagcgggagcacccagcggacttcgtggcccagaagctgcagggggtcctcttcatctgcttcacctgcgcccgctccttcccctcctccaaagccctaatcacccaccagcgcagccacggtccagccgccaagcccaccctgccggttgcaaccactactgcccagcccaccttcccttgtcctgactgtggcaagacctttgggcaggctgtttctctgaggcggcaccgccagatgcatgaggtccgtgcccctcctggcaccttcgcctgcacagagtgcggtcaggactttgctcaggaagcagggctgcatcaacactacattcggcatgcccggggggagctctgagtgcagcttaagcctctccacggtgacgggtggctctgtggctggtaggactcacccatgatatggggtgcaggaactctgggggccctgaaggatttgcttccctcccctgggaaggcagagggctcttaataaagaggacccagaagattctta

SEQ ID NO: 203054 - DNA, 867 bp, Homo sapiens
  Payload ID: 20041
  Gene Name: zinc finger protein 576
  Uniprot ID: Q9H609
  ENST ID: ENST00000533118
  CDS Start-End: 119-631
gcggaaaccacgggggccctgagactgagtggtccctatcccacttctctctggggcggcgctgtagccagcggctgacaggcgcagcgaaaggcagccctctgctggtcccagcaccatggaggacccgaaccctgaagagaacatgaagcagcaggattcacccaaggagagaagtccccagagcccaggaggcaacatctgccacctgggggccccgaagtgcacccgctgcctcatcaccttcgcagattccaagttccaggagcgtcacatgaagcgggagcacccagcggacttcgtggcccagaagctgcagggggtcctcttcatctgcttcacctgcgcccgctccttcccctcctccaaagccctaatcacccaccagcgcagccacggtccagccgccaagcccaccctgccggttgcaaccactactgcccagcccaccttcccttgtcctgactgtggcaagacctttgggcaggctgtttctctgaggcggcaccgccagatgcatgaggtccgtgcccctcctggcaccttcgcctgcacagagtgcggtcaggactttgctcaggaagcagggctgcatcaacactacattcggcatgcccggggggagctctgagtgcagcttaagcctctccacggtgacgggtggctctgtggctggtaggactcacccatgatatggggtgcaggaactctgggggccctgaaggatttgcttccctcccctgggaaggcagagggctcttaataaagaggacccagaagattcttatttagagcttcagtctttggagcacacagggccttcgtgagacagtgaaatcagataataatgagatcttttgttaaaaa

SEQ ID NO: 203055 - DNA, 859 bp, Homo sapiens
  Payload ID: 20041
  Gene Name: zinc finger protein 576
  Uniprot ID: Q9H609
  ENST ID: ENST00000528387
  CDS Start-End: 80-592
agccctctgctgtaaggaggaaaactgaggcctgggagcaggaacctgtaggcagcgcttgaggaagggtcccagcaccatggaggacccgaaccctgaagagaacatgaagcagcaggattcacccaaggagagaagtccccagagcccaggaggcaacatctgccacctgggggccccgaagtgcacccgctgcctcatcaccttcgcagattccaagttccaggagcgtcacatgaagcgggagcacccagcggacttcgtggcccagaagctgcagggggtcctcttcatctgcttcacctgcgcccgctccttcccctcctccaaagccctaatcacccaccagcgcagccacggtccagccgccaagcccaccctgccggttgcaaccactactgcccagcccaccttcccttgtcctgactgtggcaagacctttgggcaggctgtttctctgaggcggcaccgccagatgcatgaggtccgtgcccctcctggcaccttcgcctgcacagagtgcggtcaggactttgctcaggaagcagggctgcatcaacactacattcggcatgcccggggggagctctgagtgcagcttaagcctctccacggtgacgggtggctctgtggctggtaggactcacccatgatatggggtgcaggaactctgggggccctgaaggatttgcttccctcccctgggaaggcagagggctcttaataaagaggacccagaagattcttatttagagcttcagtctttggagcacacagggccttcgtgagacagtgaaatcagataataatgagatcttttgttaaaaaaaaaaaatgggaagggagtgcgggagagaaa

SEQ ID NO: 203056 - DNA, 2327 bp, Homo sapiens
  Payload ID: 20041
  Gene Name: zinc finger protein 576
  Uniprot ID: Q9H609
  ENST ID: ENST00000525771
  CDS Start-End: 703-1215
ctggtgcgactatactactgccggatggcaaatccgggatctcggctccgagaggctcatctggcaaaagggcgcggaaaccacgggggccctgagactgagtggtccctatcccacttctctctggggcggcgctgtagccagcggctgacaggcgcagcgaaaggcagccctctgctgtaaggaggaaaactgaggcctgggagcaggaacctgtaggcagcgcttgagggtagcgggatagcagctgcaagcgcgcgtgggaggcgggggctctgggcggaacaaaaatcacaggatgtcagaggatgtttcccgggaagaactgggataaagggtgggtatcactacctgccccaagacacttgagattgggatgacgctggtgtcaaagatcaaggcttccacgctgagttcagggagttagtttgatgcagcaggtcataggtcacaccagtgagaagactctaggggagtcccaaacccaggaaatccagtcctttgggaggtttgaagcttcttttagcaagaactccatcaattagagttcaaggagatagtatgtcgtaggggtcaaaggcaggcaaggagagcctctggcgatgtcaaaggtcatagacttagggtgccctctaagactggtaacagatgaacagcttcacttatgcacgctcctctcctgactagaagggtcccagcaccatggaggacccgaaccctgaagagaacatgaagcagcaggattcacccaaggagagaagtccccagagcccaggaggcaacatctgccacctgggggccccgaagtgcacccgctgcctcatcaccttcgcagattccaagttccaggagcgtcacatgaagcgggagcacccagcggacttcgtggcccagaagctgcagggggtcctcttcatctgcttcacctgcgcccgctccttcccctcctccaaagccctaatcacccaccagcgcagccacggtccagccgccaagcccaccctgccggttgcaaccactactgcccagcccaccttcccttgtcctgactgtggcaagacctttgggcaggctgtttctctgaggcggcaccgccagatgcatgaggtccgtgcccctcctggcaccttcgcctgcacagagtgcggtcaggactttgctcaggaagcagggctgcatcaacactacattcggcatgcccggggggagctctgagtgcagcttaagcctctccacggtgacgggtggctctgtggctggtaggactcacccatgatatggggtgcaggaactctgggggccctgaaggatttgcttccctcccctgggaaggcagagggctcttaataaagaggacccagaagattcttatttagagcttcagtctttggagcacacagggccttcgtgagacagtgaaatcagataataatgagatcttttgttaaaaaaaaaaaatgggaagggagtgcgggagagaaatggtttgtgtctcccttattcccagttaaatacctagctgcagattgtgccatcacccttcattcttcccagatggatgccatgggctatgggagcaaattgccctggacctttgcctgaatgggggcaggaaaggtgaggtgttgctggcctgtaatgccaccaggtgagttccagatgtggagcaacttgggcttttggggatggggcagcaaagttgggagctggaccccaattgagtgggggtagcaattggagtccttgtgtctcttttccaccccctgccatcctcacttagaggggccatggcactagatggcactagtcccccgataatttatgtctcgttgaaataattttgtatatcattctagtcctgaaatatttttttcatatgtgtaggtgaaatggtatgaataagctaacaggaatagtatctaaaaacagaaaacatccatattaaaatgtctaaacagggagctctggcttttgagtgggaatttccagagaacataagggtgtgggcaggtgggggaactcaggccagagttggcctcgctttgtggggaaactggtttggaatcaaacagagataccttctgtttcgggttttatttggccaacactgggagatttcccattaagatcctattttcagctctcttgaaaggcccaacctaggctgacattgtcagcaggggcaggacagaagttacaacaggctggagggagcagtgggtgtcaccctcaactggagatgagtcccaccaggccagttttacccccttagttacctgccctgcacctgcagacaatggtcgatgccttgcatataatacttatag

SEQ ID NO: 203057 - DNA, 3074 bp, Homo sapiens
  Payload ID: 20042
  Gene Name: zinc finger protein 577
  Uniprot ID: Q9BSK1
  ENST ID: ENST00000301399
  CDS Start-End: 367-1824
gaaacttgcgagtgtcgcgtctgcagtgtgtggggttcgcggggcggcgggtagagttgagcatttttgtcatctgcaaataattttagccaggtggcaagtgtatggactgtggagtaagaagtacctgcctctgcctctgacttgggttctggcctataggaacaagacattttcagtaatggaagaaggagcttccaggctggggaagatcatcatttccagtggtagcttgacctgagatgatacctgaccaccacttctgggaaggcccagaatagacagaagagagagaacatactagagttgctagcccctaagagttgaacgaaatgggcaaggcccagctgaaataacaggaaacacatgaaaaatgccacgattgtaatgtctgtgaggagagagcaaggcagttcttcaggggaggggtcattgtcattcgaagatgtggctgtgggcttcaccagggaggagtggcagtttttggaccagtctcagaaggtcttgtacaaggaagtaatgttggagaactacatcaacctagtatcaatagggtatcgaggcaccaagccagattcgctcttcaagttggagcaaggagaacccccagggatagcagaaggagcagcccacagtcaaatctgtccaggttttgtaatccagagtagaagatatgcaggaaaagattctgatgcatttggtggatatgggagatcatgcctccatatcaagcgtgacaaaactcttactggagttaaataccatagatgtgttaaacccagcagccctaaatcacagctcaatgacctacaaaaaatttgtgcaggagggaaaccacatgaatgcagtgtgtgcgggagagccttctccaggaaagcacagcttattcaacatcagagaactgaaagaggagagaaaccccatggatgtggtgaatgtgggaaaacattcatgaggaagattcagctcactgagcatcagagaactcacacaggagagaagccccatgaatgtagtgaatgtggaaaagccttctccagaaagtcacagctcatggtccatcagagaacccatacaggagagaaaccctacagatgcagcaaatgcggaaaagccttcagccggaagtgccggctcaatagacatcagcgatcacatactggagagaaactctatgggtgcagtgtgtgtgggaaagccttttctcagaaggcatacctcactgcacaccagagacttcacacaggagataagccttataaatgcagtgattgtggaagaaccttctattttaagtcagacctgaccagacatcagaggattcatacgggagagaaaccttatgaatgtagtgagtgtgaaaaagcctttagaagcaagtcgaagctcattcagcatcagcgtactcacactggagagagaccatattcatgcagagaatgtggcaaagcctttgcccacatgtcagtcctcattaaacatgagaaaactcacataagagagacagccataaattcactgacggtggagaaaccttcctcaaggagtcatacctccttatacatgagcgaactcatacaagagcaaaagactgtgaacacagtacctatagaaatgccttcctcaggaaccccgccattgttaaacaagagtgagcgcctagtgggcagaaatgtagtgattgtggaacaaccttttccaagaaatcaagcctttgtagttaatcaggaatttgaacagagaataagcctcacaaatgaagtgaatgtggccccatcagtaataaattatatcttgtatcttacagatattgtatcagaataaatcttctgataccagaaaggtgggaaaatctttagtaggaatcctccagccattatatcccagagagctcatttagggctgaaacactgtggaggcagtggttgtggaggacatttctgtgagaagtcaaacctgttaaacaccattgaaatcatgttgggtagaaatgcagctgttatgaggaagtctttacctggagatgatatctcaattggtatcaaaagaattcttacaggaatatttatgaaagattgtgatggtgcttttagcgctaaattgtgcctcgtgtgccaaagaaacatagacaactgtagaggcaatggatatggaaaacatttttcgtaaaatatgggagaatttgtagaaaagaaaaactcttgaaagtaagaaatgatggcaactcaccaaattaactcatgtatcatacttttatgtcttgagagtcttggagggacgtgtttaatgaaatcttgaaccccaggaatagtattatgtaatgaaaacctatgaatataacaaatatggaagtaaaattgtgttagttttttatgagtgttgcaccaaactaacacaaatttaatggcttaaaacaacacaaaatcattatcttacagttctggaggactgaagtccaaatgcatctcacggggctacatcaagctgttgacagggctgcttttctttttggaggctctaggggagcgtctttctttgcccttccagcttctagaagctgcccaaattctgtggtttggggcctcctttcaaaaccagcaatggccaatcagtcttacatcactcaaacacttgagtgttctgtctccctcttccatgtttgaggacccttgtgattacactgtgaaaacccagataagccaggataatctccctatcttattatgaggcaagtatgttaagattttattctataatcagagaatcttatgctatgattgttatatgtgagcattatagatgctcttgaaatgttaaaatcacatcagcactggaaaataactcctaaatgtccaaaaagaacatgagatttatggtgcttgaaatgttgctaaacgtaaatttgtatctattctgaaattatataaattaacctacctggccaggcacagtggctcacacctgtaatctcagcactttgggaggccaaggcaggaagatcacttgagcccgcaagtttgagaccaccctgggcaacatagcgagactacctctacaaaaaaaaaaaaaaataa

SEQ ID NO: 203058 - DNA, 1771 bp, Homo sapiens
  Payload ID: 20042
  Gene Name: zinc finger protein 577
  Uniprot ID: Q9BSK1
  ENST ID: ENST00000451628
  CDS Start-End: 416-1696
cgcgtctgcagtgtgtggggttcgcggggcggcgggtagaggcgagtgtttagagacttcgggtccctgactcgcctccagcagtggagacaggtcatcggtctgttgagcatttttgtcatctgcaaataattttagccaggtggcaagtgtatggactgtggagtaagaagtacctgcctctgcctctgacttgggttctggcctataggaacaagacattttcagtaatggaagaaggagcttccaggctggggaagatcatcatttccagtggtagcttgacctgagatgatacctgaccaccacttctgggaaggcccagaatagacagaagagagagaacatactagagttgctagcccctaagagttgaacgaaatgggcaaggcccagctgaaataacaggaaacacatgaaaaatgccacgattgtaatgtctgtgaggagagagcaaggcagttcttcaggggaggggtcattgtcattcgaagatgtggctgtgggcttcaccagggaggagtggcagtttttggaccagtctcagaaggtcttgtacaaggaagtaatgttggagaactacatcaacctagtatcaatagggtatcgaggcaccaagccagattcgctcttcaagttggagcaaggagaacccccagggatagcagaaggagcagcccacagtcaaatctgtccaggagggaaaccacatgaatgcagtgtgtgcgggagagccttctccaggaaagcacagcttattcaacatcagagaactgaaagaggagagaaaccccatggatgtggtgaatgtgggaaaacattcatgaggaagattcagctcactgagcatcagagaactcacacaggagagaagccccatgaatgtagtgaatgtggaaaagccttctccagaaagtcacagctcatggtccatcagagaacccatacaggagagaaaccctacagatgcagcaaatgcggaaaagccttcagccggaagtgccggctcaatagacatcagcgatcacatactggagagaaactctatgggtgcagtgtgtgtgggaaagccttttctcagaaggcatacctcactgcacaccagagacttcacacaggagataagccttataaatgcagtgattgtggaagaaccttctattttaagtcagacctgaccagacatcagaggattcatacgggagagaaaccttatgaatgtagtgagtgtgaaaaagcctttagaagcaagtcgaagctcattcagcatcagcgtactcacactggagagagaccatattcatgcagagaatgtggcaaagcctttgcccacatgtcagtcctcattaaacatgagaaaactcacataagagagacagccataaattcactgacggtggagaaaccttcctcaaggagtcatacctccttatacatgagcgaactcatacaagagcaaaagactgtgaacacagtacctatagaaatgccttcctcaggaaccccgccattgttaaacaagagtgagcgcctagtgggcagaaatgtagtgattgtggaacaaccttttccaagaaatcaagcctttgtagttaatcaggaatttgaacagagaataagcctcacaaatgaagtgaatgtggccccatcagtaataaattatatcttgtatcttacagatattgtatcagaataaatcttctgataccagaaaggtgggaaaatctttagtaggaatcctccagccattatatcccagagagctcattta

SEQ ID NO: 203059 - DNA, 1865 bp, Homo sapiens
  Payload ID: 20042
  Gene Name: zinc finger protein 577
  ENST ID: ENST00000412216
  CDS Start-End: 1350-1685
gaaacttgcgagtgtcgcgtctgcagtgtgtggggttcgcggggcggcgggtagaggcgagtgtttagagacttcgggtccctgactcgcctccagcagtggagacaggtcatcggtctggtctgcgtgggcttctgggaatgtttcaggggcagggagagcgcgcttttttttttctgttgttcgctagcgcgtgaggtccgtgttgcggggagctctcggggagtcctcgctcggagttcgtttcgcagtcgtgttggagttcccagagtctgggagcccatggtctccgcattggaaccagtgcttgggaggtcttcgttgcacagtagcgctagggcgtcgtggtggggaagcgaatcgtgtcagtgttggagactgctctgggcagttcgtgttcattgcttatcacatgcgtacttaaaaaggggtctgctggtccccttgcttccctgctgctgtatattctgtagaaaatgggttttcaggttcattgcgacccaagtaataacatccccatcattttaaatactcctccagaaaataactctggtttagtgtatttcatgtttaatgttgggatcaggtgtctaggtattggtataattttattcgtctttaataacatcttgtcaacttcgtattcccatattacatgctctttgagagttttttaaattgctgcagtttcatcaagtggttgctttaatttgggtagaattgatgtagatctagatacaacactttcaggaacatgtgatggatttctattaacccaatatttttatttgtttgactatctgtagtgtttttccatacgtatcttggacatttctggttatgcttatttctacatagttaatactttttgttgtaaatcgtgactttttttttgcataagacccctccccctttccttttttgttcctaattttacttagttgacaagaacagaagttaaaaatatatatgtttattctgtcacttcattgtactcatgtcattacatataacttataaattgacgtcttttttctagttgagcatttttgtcatctgcaaataattttagccaggtggcaagtgtatggactgtggagtaagaagtacctgcctctgcctctgacttgggttctggcctataggaacaagacattttcagtaatggaagaaggagcttccaggctggggaagatcatcatttccagtggtagcttgacctgagatgatacctgaccaccacttctgggaaggcccagaatagacagaagagagagaacatactagagttgctagcccctaagagttgaacgaaatgggcaaggcccagctgaaataacaggaaacacatgaaaaatgccacgattgtaatgtctgtgaggagagagcaaggcagttcttcaggggaggggtcattgtcattcgaagatgtggctgtgggcttcaccagggaggagtggcagtttttggaccagtctcagaaggtcttgtacaaggaagtaatgttggagaactacatcaacctagtatcaatagggtatcgaggcaccaagccagattcgctcttcaagttggagcaaggagaacccccagggatagcagaaggagcagcccacagtcaaatctgtccagggtattcattcaggagaaggaccctacagatggagggaatgcaggaaagctaagaagaatcacacctcattgcagatctgcattaccgttggaaaacagcagcctcagaaccacagtagccatgaagaccatcagccttcaaccaccacccttgtatcagaggagacaaataagcttggaaatcctcaaaaagcctcatcctcagagcaatgtcattatatatcttgtcttac

SEQ ID NO: 203060 - DNA, 2758 bp, Homo sapiens
  Payload ID: 20042
  Gene Name: zinc finger protein 577
  ENST ID: ENST00000458390
  CDS Start-End: 1319-2758
ggggttcgcggggcggcgggtagaggcgagtgtttagagacttcgggtccctgactcgcctccagcagtggagacaggtcatcggtctggtctgcgtgggcttctgggaatgtttcaggggcagggagagcgcgcttttttttttctgttgttcgctagcgcgtgaggtccgtgttgcggggagctctcggggagtcctcgctcggagttcgtttcgcagtcgtgttggagttcccagagtctgggagcccatggtctccgcattggaaccagtgcttgggaggtcttcgttgcacagtagcgctagggcgtcgtggtggggaagcgaatcgtgtcagtgttggagactgctctgggcagttcgtgttcattgcttatcacatgcgtacttaaaaaggggtctgctggtccccttgcttccctgctgctgtatattctgtagaaaatgggttttcaggttcattgcgacccaagtaataacatccccatcattttaaatactcctccagaaaataactctggtttagtgtatttcatgtttaatgttgggatcaggtgtctaggtattggtataattttattcgtctttaataacatcttgtcaacttcgtattcccatattacatgctctttgagagttttttaaattgctgcagtttcatcaagtggttgctttaatttgggtagaattgatgtagatctagatacaacactttcaggaacatgtgatggatttctattaacccaatatttttatttgtttgactatctgtagtgtttttccatacgtatcttggacatttctggttatgcttatttctacatagttaatactttttgttgtaaatcgtgactttttttttgcataagacccctccccctttccttttttgttcctaattttacttagttgacaagaacagaagttaaaaatatatatgtttattctgtcacttcattgtactcatgtcattacatataacttataaattgacgtcttttttctagttgagcatttttgtcatctgcaaataattttagccaggtggcaagtgtatggactgtggagtaagaagtacctgcctctgcctctgacttgggttctggcctataggaacaagacattttcagtaatggaagaaggagcttccaggctggggaagatcatcatttccagtggtagcttgacctgagatgatacctgaccaccacttctgggaaggcccagaatagacagaagagagagaacatactagagttgctagcccctaagagttgaacgaaatgggcaaggcccagctgaaataacaggaaacacatgaaaaatgccacgattgtaatgtctgtgaggagagagcaaggcagttcttcaggggaggggtcattgtcattcgaagatgtggctgtgggcttcaccagggaggagtggcagtttttggaccagtctcagaaggtcttgtacaaggaagtaatgttggagaactacatcaacctagtatcaatagggtatcgaggcaccaagccagattcgctcttcaagttggagcaaggagaacccccagggatagcagaaggagcagcccacagtcaaatctgtccaggttttgtaatccagagtagaagatatgcaggaaaagattctgatgcatttggtggatatgggagatcatgcctccatatcaagcgtgacaaaactcttactggagttaaataccatagatgtgttaaacccagcagccctaaatcacagctcaatgacctacaaaaaatttgtgcaggagggaaaccacatgaatgcagtgtgtgcgggagagccttctccaggaaagcacagcttattcaacatcagagaactgaaagaggagagaaaccccatggatgtggtgaatgtgggaaaacattcatgaggaagattcagctcactgagcatcagagaactcacacaggagagaagccccatgaatgtagtgaatgtggaaaagccttctccagaaagtcacagctcatggtccatcagagaacccatacaggagagaaaccctacagatgcagcaaatgcggaaaagccttcagccggaagtgccggctcaatagacatcagcgatcacatactggagagaaactctatgggtgcagtgtgtgtgggaaagccttttctcagaaggcatacctcactgcacaccagagacttcacacaggagataagccttataaatgcagtgattgtggaagaaccttctattttaagtcagacctgaccagacatcagaggattcatacgggagagaaaccttatgaatgtagtgagtgtgaaaaagcctttagaagcaagtcgaagctcattcagcatcagcgtactcacactggagagagaccatattcatgcagagaatgtggcaaagcctttgcccacatgtcagtcctcattaaacatgagaaaactcacataagagagacagccataaattcactgacggtggagaaaccttcctcaaggagtcatacctccttatacatgagcgaactcatacaagagcaaaagactgtgaacacagtacctatagaaatgccttcctcaggaaccccgccattgttaaacaagagtgagcgcctagtgggcagaaatgtagtgattgtggaacaaccttttccaagaaatcaagcctttgtagttaatcaggaatttgaacagagaataagcctcacaaatgaagtgaatgtggccccatcagtaataaattatatcttgtatcttaca

SEQ ID NO: 203061 - DNA, 512 bp, Homo sapiens
  Payload ID: 20042
  Gene Name: zinc finger protein 577
  ENST ID: ENST00000419138
  CDS Start-End: 380-512
atggccctcgccggccgccatccccgaaacttgcgagtgtcgcgtctgcagtgtgtggggttcgcggggcggcgggtagagttgagcatttttgtcatctgcaaataattttagccaggtggcaagtgtatggactgtggagtaagaagtacctgcctctgcctctgacttgggttctggcctataggaacaagacattttcagtaatggaagaaggagcttccaggctggggaagatcatcatttccagtggtagcttgacctgagatgatacctgaccaccacttctgggaaggcccagaatagacagaagagagagaacatactagagttgctagcccctaagagttgaacgaaatgggcaaggcccaggaaacacatgaaaaatgccacgattgtaatgtctgtgaggagagagcaaggcagttcttcaggggaggggtcattgtcattcgaagatgtggctgtgggcttcaccagggaggagtggcagtttttggaccagtctcaga

SEQ ID NO: 203062 - DNA, 3148 bp, Homo sapiens
  Payload ID: 20042
  Gene Name: zinc finger protein 577
  Uniprot ID: Q9BSK1
  ENST ID: ENST00000420592
  CDS Start-End: 1335-2615
cgcgtctgcagtgtgtggggttcgcggggcggcgggtagaggcgagtgtttagagacttcgggtccctgactcgcctccagcagtggagacaggtcatcggtctggtctgcgtgggcttctgggaatgtttcaggggcagggagagcgcgcttttttttttctgttgttcgctagcgcgtgaggtccgtgttgcggggagctctcggggagtcctcgctcggagttcgtttcgcagtcgtgttggagttcccagagtctgggagcccatggtctccgcattggaaccagtgcttgggaggtcttcgttgcacagtagcgctagggcgtcgtggtggggaagcgaatcgtgtcagtgttggagactgctctgggcagttcgtgttcattgcttatcacatgcgtacttaaaaaggggtctgctggtccccttgcttccctgctgctgtatattctgtagaaaatgggttttcaggttcattgcgacccaagtaataacatccccatcattttaaatactcctccagaaaataactctggtttagtgtatttcatgtttaatgttgggatcaggtgtctaggtattggtataattttattcgtctttaataacatcttgtcaacttcgtattcccatattacatgctctttgagagttttttaaattgctgcagtttcatcaagtggttgctttaatttgggtagaattgatgtagatctagatacaacactttcaggaacatgtgatggatttctattaacccaatatttttatttgtttgactatctgtagtgtttttccatacgtatcttggacatttctggttatgcttatttctacatagttaatactttttgttgtaaatcgtgactttttttttgcataagacccctccccctttccttttttgttcctaattttacttagttgacaagaacagaagttaaaaatatatatgtttattctgtcacttcattgtactcatgtcattacatataacttataaattgacgtcttttttctagttgagcatttttgtcatctgcaaataattttagccaggtggcaagtgtatggactgtggagtaagaagtacctgcctctgcctctgacttgggttctggcctataggaacaagacattttcagtaatggaagaaggagcttccaggctggggaagatcatcatttccagtggtagcttgacctgagatgatacctgaccaccacttctgggaaggcccagaatagacagaagagagagaacatactagagttgctagcccctaagagttgaacgaaatgggcaaggcccagctgaaataacaggaaacacatgaaaaatgccacgattgtaatgtctgtgaggagagagcaaggcagttcttcaggggaggggtcattgtcattcgaagatgtggctgtgggcttcaccagggaggagtggcagtttttggaccagtctcagaaggtcttgtacaaggaagtaatgttggagaactacatcaacctagtatcaatagggtatcgaggcaccaagccagattcgctcttcaagttggagcaaggagaacccccagggatagcagaaggagcagcccacagtcaaatctgtccaggagggaaaccacatgaatgcagtgtgtgcgggagagccttctccaggaaagcacagcttattcaacatcagagaactgaaagaggagagaaaccccatggatgtggtgaatgtgggaaaacattcatgaggaagattcagctcactgagcatcagagaactcacacaggagagaagccccatgaatgtagtgaatgtggaaaagccttctccagaaagtcacagctcatggtccatcagagaacccatacaggagagaaaccctacagatgcagcaaatgcggaaaagccttcagccggaagtgccggctcaatagacatcagcgatcacatactggagagaaactctatgggtgcagtgtgtgtgggaaagccttttctcagaaggcatacctcactgcacaccagagacttcacacaggagataagccttataaatgcagtgattgtggaagaaccttctattttaagtcagacctgaccagacatcagaggattcatacgggagagaaaccttatgaatgtagtgagtgtgaaaaagcctttagaagcaagtcgaagctcattcagcatcagcgtactcacactggagagagaccatattcatgcagagaatgtggcaaagcctttgcccacatgtcagtcctcattaaacatgagaaaactcacataagagagacagccataaattcactgacggtggagaaaccttcctcaaggagtcatacctccttatacatgagcgaactcatacaagagcaaaagactgtgaacacagtacctatagaaatgccttcctcaggaaccccgccattgttaaacaagagtgagcgcctagtgggcagaaatgtagtgattgtggaacaaccttttccaagaaatcaagcctttgtagttaatcaggaatttgaacagagaataagcctcacaaatgaagtgaatgtggccccatcagtaataaattatatcttgtatcttacagatattgtatcagaataaatcttctgataccagaaaggtgggaaaatctttagtaggaatcctccagccattatatcccagagagctcatttagggctgaaacactgtggaggcagtggttgtggaggacatttctgtgagaagtcaaacctgttaaacaccattgaaatcatgttgggtagaaatgcagctgttatgaggaagtctttacctggagatgatatctcaattggtatcaaaagaattcttacaggaatatttatgaaagattgtgatggtgcttttagcgctaaattgtgcctcgtgtgccaaagaaacatagacaactgtagaggcaatggatatggaaaacatttttcgtaaaatatgggagaatttgtagaaaagaaaaactcttgaaagtaagaaatgatggcaactcaccaaattaactcatgtatcatacttttatgtcttgagagtcttggagggacgtgtttaatgaaatcttgaaccccaggaatagtattatgtaatgaaaacctatgaatataacaaatatggaagtaaaa

SEQ ID NO: 203063 - DNA, 523 bp, Homo sapiens
  Payload ID: 20042
  Gene Name: zinc finger protein 577
  ENST ID: ENST00000453272
  CDS Start-End: 337-523
cactcaggagagaaaccctataaatgcagtgactgtgggaaagccttccttacaaagacaatgctcattgtacatcacagaactcacacgggagagagaccctatggctgtgatgagtgttctggcctataggaacaagacattttcagtaatggaagaaggagcttccaggctggggaagatcatcatttccagtggtagcttgacctgagatgatacctgaccaccacttctgggaaggcccagaatagacagaagagagagaacatactagagttgctagcccctaagagttgaacgaaatgggcaaggcccagctgaaataacaggaaacacatgaaaaatgccacgattgtaatgtctgtgaggagagagcaaggcagttcttcaggggaggggtcattgtcattcgaagatgtggctgtgggcttcaccagggaggagtggcagtttttggaccagtctcagaaggtcttgtacaaggaagtaatgttggagaactacatcaacctagtatcaatag

SEQ ID NO: 203064 - DNA, 573 bp, Homo sapiens
  Payload ID: 20042
  Gene Name: zinc finger protein 577
  ENST ID: ENST00000446514
  CDS Start-End: 399-573
gtttagagacttcgggtccctgactcgcctccagcagtggagacaggtcatcggtctgttgagcatttttgtcatctgcaaataattttagccaggtggcaagtgtatggactgtggagtaagaagtacctgcctctgcctctgacttggaagccctcatcttctctctcctctccaaaggttctggcctataggaacaagacattttcagtaatggaagaaggagcttccaggctggggaagatcatcatttccagtggtagcttgacctgagatgatacctgaccaccacttctgggaaggcccagaatagacagaagagagagaacatactagagttgctagcccctaagagttgaacgaaatgggcaaggcccagctgaaataacaggaaacacatgaaaaatgccacgattgtaatgtctgtgaggagagagcaaggcagttcttcaggggaggggtcattgtcattcgaagatgtggctgtgggcttcaccagggaggagtggcagtttttggaccagtctcagaaggtcttgtacaaggaagtaatgttggagaactacatcaacc

SEQ ID NO: 203065 - DNA, 444 bp, Homo sapiens
  Payload ID: 20042
  Gene Name: zinc finger protein 577
  ENST ID: ENST00000592321
  CDS Start-End: 266-444
gagtgtcgcgtctgcagtgtgtggggttcgcggggcggcgggtagaggttctggcctataggaacaagacattttcagtaatggaagaaggagcttccaggctggggaagatcatcatttccagtggtagcttgacctgagatgatacctgaccaccacttctgggaaggcccagaatagacagaagagagagaacatactagagttgctagcccctaagagttgaacgaaatgggcaaggcccagctgaaataacaggaaacacatgaaaaatgccacgattgtaatgtctgtgaggagagagcaaggcagttcttcaggggaggggtcattgtcattcgaagatgtggctgtgggcttcaccagggaggagtggcagtttttggaccagtctcagaaggtcttgtacaaggaagtaatgttggagaactacatcaacctagt

SEQ ID NO: 203066 - DNA, 453 bp, Homo sapiens
  Payload ID: 20042
  Gene Name: zinc finger protein 577
  ENST ID: ENST00000591320
  CDS Start-End: 410-453
gagtgtcgcgtctgcagtgtgtggggttcgcggggcggcgggtagaggcgagtgtttagagacttcgggtccctgactcgcctccagcagtggagacagttgagcatttttgtcatctgcaaataattttagccaggtggcaagtgtatggactgtggagtaagaagtacctgcctctgcctctgacttgggttctggcctataggaacaagacattttcagtaatggaagaaggagcttccaggctggggaagatcatcatttccagtggtagcttgacctgagatgatacctgaccaccacttctgggaaggcccagaatagacagaagagagagaacatactagagttgctagcccctaagagttgaacgaaatgggcaaggcccagctgaaataacaggaaacacatgaaaaatgccacgattgtaatgtctgtgaggagagagcaagg

SEQ ID NO: 203067 - DNA, 2017 bp, Homo sapiens
  Payload ID: 20043
  Gene Name: zinc finger protein 578
  Uniprot ID: Q96N58
  ENST ID: ENST00000421239
  CDS Start-End: 245-2017
gatcgcgtggggagccggtcttggagcagcgggattagcttctaaagtctctttcatctctcctaaggaagaagcctagaagaggaggaagaggaaagaaaaggagtcaggaatgcctcttagatatctcttccaaatgcatgatgaaaaaggtgggaagattacttgagccagggagttgaaggctgcagtgagccctgtttttgccaccacactccagcttgggattgatttctaaagactcatgttacatgaggaagcagctcagaagaggaaaggaaaggagccaggcatggctcttcctcagggacgcttgactttcagggatgtggctatagaattctcattggcagagtggaaattcctgaaccctgcgcagagggctttgtacagggaagtgatgttggagaactacaggaacctggaggctgtggatatctcttccaaacgcatgatgaaggaggtcttgtcaacagggcaaggcaatacagaagtgatccacacagggatgttgcaaagacatgaaagttatcacactggagatttttgcttccaggaaattgaaaaagatattcatgactttgagtttcagtcacaaaaagatgaaagaaatggccatgaagcatccatgccaaaaatcaaagagttgatgggtagcacagaccgacatgatcaaaggcatgctggaaacaagcctattaaagatcagcttggattaagctttcatttgcatcttcctgaactccacatatttcagcccgaagagaaaattgctaatcaagtggagaagtctgtcaacgatgcttcctcaatttcaacatcccaaagaatttcttgtaggcctgaaacacatactcctaataactatgggaataattttttccattcatcattactcacacaaaaacaggaagtacacatgagagaaaaatctttccaatgtaatgagactggcgaagcctttaattgtagctcatttgtaaggaaacatcagataatccatttaggagaaaaacaatataaatttgatatatgtggcaaagtctttaatgagaagcgataccttgcacgccatcgtagatgtcacactagtgagaaaccttacaagtgtaatgaatgtggaaagtccttcagttacaagtcatccctgacatgccatcgtagatgtcacactggtgagaaaccttacaagtgtaatgaatgtggaaagtccttcagttacaagtcatcccttacatgccatcataggtgtcacactggtgagaaaccttacaagtgtaatgaatgtggaaagtccttcagttacaagtcatcccttagatgccatcgtagacttcatactggaataaaaccttacaagtgtaatgagtgtggcaagatgtttggtcaaaattcaacccttgtaattcataaggcaattcatactggagagaaaccttacaagtgtaatgaatgtggcaaggcttttaatcaacaatcacacctttcacgtcatcatagacttcatactggagagaaaccttacaagtgtaatgactgtggtaaggcttttattcatcagtcaagccttgcacgtcatcatagacttcatactggagagaaatcttacaaatgtgaagaatgtgacagagttttcagtcagaaatcaaaccttgagagacacaagataattcatactggagagaaaccttacaagtgtaatgagtgtcacaagaccttcagtcacaggtcatctcttccatgccatcgtagacttcatagtggtgagaaaccttacaagtgtaatgaatgtgggaagacttttaatgtacagtcacacctttcacgtcatcatagacttcatactggagagaaaccttacaaatgtaaggtttgtgacaaggctttcatgtgccattcttatctggcaaaccatactagaattcatagcggagagaaaccttacaagtgtaatgagtgtggtaaggctcacaatcacttgattgattcatcaatcaagccttgcatgtcatcatag

SEQ ID NO: 203068 - DNA, 814 bp, Homo sapiens
  Payload ID: 20043
  Gene Name: zinc finger protein 578
  ENST ID: ENST00000601120
  CDS Start-End: 54-814
cgtatcgcttggagtgaaggtcctaccgcggcatgattgatttctaaagactcatgttacatgaggaagcagctcagaagaggaaaggaaaggagccaggcatggctcttcctcagggacgcttgactttcagggatgtggctatagaattctcattggcagagtggaaattcctgaaccctgcgcagagggctttgtacagggaagtgatgttggagaactacaggaacctggaggctgtggatatctcttccaaacgcatgatgaaggaggtcttgtcaacagggcaaggcaatacagaagtgatccacacagggatgttgcaaagacatgaaagttatcacactggagatttttgcttccaggaaattgaaaaagatattcatgactttgagtttcagtcacaaaaagatgaaagaaatggccatgaagcatccatgccaaaaatcaaagagttgatgggtagcacagaccgacatgatcaaaggcatgctggaaacaagcctattaaagatcagcttggattaagctttcatttgcatcttcctgaactccacatatttcagcccgaagagaaaattgctaatcaagtggagaagtctgtcaacgatgcttcctcaatttcaacatcccaaagaatttcttgtaggcctgaaacacatactcctaataactatgggaataattttttccattcatcattactcacacaaaaacaggaagtacacatgagagaaaaatctttccaatgtaatgagactggcgaagcctttaattgtagctcatttgtaaggaaacatcagataatccattt

SEQ ID NO: 203069 - DNA, 2899 bp, Homo sapiens
  Payload ID: 20044
  Gene Name: zinc finger protein 579
  Uniprot ID: Q8NAF0
  ENST ID: ENST00000325421
  CDS Start-End: 30-1718
aaggaagaaaggagccaaggaggcgaggcatggatccgcagcctcctccacccgcccagggcagcccacctcaccgtggccgaggccggggccgtggccgaggccgtggtcggggccgtggccgtggcagggggggcgctggagcccctagggcgcccctgccctgccccacctgcggccgcctcttccgtttcccctactacctctcccggcaccggctgagccactcggggctccggccccacgcctgcccgctgtgccccaaggccttccgccggccggcccacctttcccgccacctgcgcggccacgggccccagcccccgctgcgctgcgccgcctgcccccgcaccttcccagaaccggcccagctcaggcgccacctggctcaggagcacgcgggcggcgaggtcgagctggccatcgagagggtggccaaggagacggccgaacccagctggggcccgcaggacgagggctcggagccgcccaccaccgctgcagcaggggccacggaggaggaggcggtcgcagcgtggcctgagacgtggcctgcgggggagccttccacgctggctgcgcccaccagcgccgcggagccccgggagtcggagtcggaggaggccgaggccggggcagcagagctgagggccgagctggcgctggcggccgggcggcaggaggagaaacaggtcctgctccaggcagactggacgctgctgtgtctgcgctgccgcgaagccttcgccaccaagggcgagctcaaggcgcacccgtgtctgcgccccgagggcgaacaggaaggggaaggggggcccccgccacgccccaagcgacaccagtgctccatctgcctcaaggccttcgccaggccctggtccctgtcgcgccaccggctggtccactccaccgaccgccctttcgtgtgcccagactgcggcctggccttccgcctcgcctcctacctccgccagcaccgccgcgtccacggccccctcagcctgctggccccgctgcccgcggcgggcaagaaggacgacaaggcctcgggtgcacggaactcagccaaggggccggaggggggcgagggggcggagtgcgggggtgcctcggaagggggagaagggcagaacggaggcgacgccgccccggctcggccccccgccggggagccccgcttctggtgcccagagtgcggcaaaggtttcaggcgccgggcgcacctgcggcagcacggggtgacccactcgggagcgcgccccttccagtgcgtgcgctgccagcgggagttcaagcgcctggccgacctggcgcgccacgcacaggtgcacgcggggggcccagccccgcacccgtgcccccgctgcccgcgccgcttctcgcgcgcctacagcctcctgcgccaccagcgctgccaccgcgcagagctggagagggccgccgcgctgcaggcactgcaggcccaggccccgacgtcgccgccaccgcccccgccgcccctgaaggccgagcaggaggaagaagggctcccgctgcccctcgcaaacattaaggaagagccgccctctccggggaccccaccccagtccccgccggctccccctgtcttcctcagcgcctcctgtttcgacagccaagaccactcagccttcgagatggaggaggaagaggtagacagcaaggctcacctgcgcgggctggggggcctggcctcctgaccttcgccgccctgccctccgccgctccgcctgagctccccggtttgcagaatggaggagggaagttgaaggagccacctcctctgtctacccacccgtccccttcacgcccttgacactaaggagtggggggccctggactgccccttcctcccccatcgcccgcccccagaacccctgatgctggttaggaaccgctcaccccaacatgtgtcttaaggcaggacgacttggaaaaaaaggcggcggacagttggccagagggatggagactggtggggacgcccccgcctccctgtcccccgtttcacacactggacaccatcacctctttggaactgccagaccctgggggtccccagtgagcaaaggtctgtccttgtccctttgtctgtctgtgaataaatgtgagttcgtgaaatccaagagagcgaggtgttctgtggaggtggggcaggctgggggcgctggggcgagtcaggatttgtccagccaactctgaacttgggttcagagcaggaaggacacagatgcatcagaaaatatgtggccctcaaccaagcaagaagccggtgaaggctgggttgagaagaaacaggaatgtgagaagatagatcatcgtcaccgctgccctgtggaagctccgcgcgattatcctcaccactgccctgtggaagctccgcgccttactcagtcaatctctaccacacccttactctgtgtcagcggtggtactaggcactgaggaggagtccaataccttcctctgaaagagctggaattctagccctgcattgtccaacataactttttttttttctcagaaaagtttccataatctttcttccctcactctgttgcccaagctgcagtgccgtggtgcagtcatagctcactgcagtctcaaactcccagacccaagcaatcctcttagcctctcaaggagctaggactacaggtgcatgccaccacacccagctgattgtttcatttcttgcagagacggagtcttgctatcttgcccagtctgggagaactttttgtgatgatgggatattctacatcttcactgtccaatatgatatccagcagacacacgtggctatttccgtttaaatttagaatatggaaatgtaaagacattaagatgaaataaatgtaaaagttcggttcctcagtca

SEQ ID NO: 203070 - DNA, 497 bp, Homo sapiens
  Payload ID: 20044
  Gene Name: zinc finger protein 579
  ENST ID: ENST00000592239
  CDS Start-End: 452-497
gtccgcgtttggccggccgtggggaaggaagaaaggagccaaggaggcgagtctctttgtttcctcttctctgtgtctctgtctctctgctgggtgttcctcactctcctctgtctcttctctgctctgcctttcaccatcctgtctttctgcgactcctggtctctgtctgtccatccccacttctctgtgtctcccatctctgccttctcctgtctctattccctgctctgtcgctctgtctctgatctctctcctcctgtctctccatctctggcctcccctcggtgtctctcatctttgtctctgtctcatatctctctcctggctaaatacctgaccctctctgcctctccatctctgactgtctctgcttctctttctgccacaccccacgcacctctttttatctctgccccgcttcccatctctcccctctctccccacaggcatggatccgcagcctcctccacccgcccagggcagcccacctcacc

SEQ ID NO: 203071 - DNA, 1261 bp, Homo sapiens
  Payload ID: 20045
  Gene Name: zinc finger protein 580
  Uniprot ID: Q9UK33
  ENST ID: ENST00000325333
  CDS Start-End: 301-819
acgcctccggtcccctccccgcagggcgctccgcagaggcgaggggtgggagcgccggctccaggcggcggaacctccgcactgggctcgcgcgcttccggccggcgccttttcccagggactccgccaacccctcgcacccccgcgcccccagtccccgcgtccccggcgccgccggcccggagctgcccggaagtctcggttccgccgccggcgctcgccaggggaagcccggggccgcccgggacctcggcccgttcctccggacccgagaggccgccgcacgggctgccgctccagatgctgctgctgccgccgcggccaccccaccctcggtcctcctctccggaggccatggacccaccgccccccaaggctccccctttccccaaggcggaaggcccctcctccactccttcctcggcggcggggccccgacccccgcggctgggccgccacctcctcatcgacgccaatggggtcccctacacatacacggtgcagctggaggaggagccccggggcccgccccagcgcgaggcgcccccaggagagcccggccctcgcaagggctacagctgcccggagtgcgcccgtgtctttgccagccctctgcggctgcagagccaccgcgtgtcgcactcggacctcaagcccttcacgtgcggcgcctgcggcaaggccttcaagcgctccagccacctgtcgcggcatcgcgccacgcaccgcgcccgcgccgggccgccgcacacctgcccgctctgcccacgccgcttccaggacgccgcggagctggcgcagcacgtgcgcctccactaagctcgagacccggcctgtgctgccctgcccgtctcagggccaccaagtctgacccacacagcgtcactcactcccacacacaccccctggctctgctgaggttactgccttaccctgggcctcagtttccccaccttccaaagggaggagcatcattccttccttaccccctttctagctgtgtgatgtagaccaaagtcgttgcccctccctgggcctgggaaccagtcggaactgggttccagtccagctgtgctgtgtgagcctgtgcaagtgacatgacctctctaaaccttggttttctgctctctggagcggtgaaccggtggttgtctgcggggaagagatgataaagagcacgggcacggtctggttcatttctgtatctaccccccttccgcccacgcccccgaccctttgctcaataaacattccgcactcc

SEQ ID NO: 203072 - DNA, 1707 bp, Homo sapiens
  Payload ID: 20045
  Gene Name: zinc finger protein 580
  Uniprot ID: Q9UK33
  ENST ID: ENST00000543039
  CDS Start-End: 747-1265
ggaaggcatttgagccattttggggtgtatagatgtagtaagacgatgggttccgtagtggggagaggtgactagacttcgaggtgctaagtgtaggaacaggatggaaaagccctagtgaaatgtggggaattgggttagtggggctctggggaggtacctagagaggaagtgagggaggccacggaatatgaagatggggaggccctgcggcatgtagtggggacggagggccaggaggccgatacgggggccggtgggggggtagggggcggcaaagggaggggaagtaaactgaactggggctgggcaacaggaaaaaagaagaaaccacagattagagaaatctcggcggtcaggaggcccggggtctaagatgtaaagaggtaaacagatttagggattgattgtctgctggggtgggttgagaggagaaaagggaagaaaagtcgggggactacgtcctcagacctgacctgagtggtgagaggtggacccaggaggagtggcaggtggtggcggggttttgcagagctcagttggaggccctctccgaggcagcttgatggaacgtgggagagccgggctggagtcacagtttttattttgctagggaggtagtcagtggcgcacaaagggtaacaagcagtgatagtggggatgctttccattttaggaaacttttcctaaaaggaagtggcaattttaactaatctcccctccgccgctcccagctgccgctccagatgctgctgctgccgccgcggccaccccaccctcggtcctcctctccggaggccatggacccaccgccccccaaggctccccctttccccaaggcggaaggcccctcctccactccttcctcggcggcggggccccgacccccgcggctgggccgccacctcctcatcgacgccaatggggtcccctacacatacacggtgcagctggaggaggagccccggggcccgccccagcgcgaggcgcccccaggagagcccggccctcgcaagggctacagctgcccggagtgcgcccgtgtctttgccagccctctgcggctgcagagccaccgcgtgtcgcactcggacctcaagcccttcacgtgcggcgcctgcggcaaggccttcaagcgctccagccacctgtcgcggcatcgcgccacgcaccgcgcccgcgccgggccgccgcacacctgcccgctctgcccacgccgcttccaggacgccgcggagctggcgcagcacgtgcgcctccactaagctcgagacccggcctgtgctgccctgcccgtctcagggccaccaagtctgacccacacagcgtcactcactcccacacacaccccctggctctgctgaggttactgccttaccctgggcctcagtttccccaccttccaaagggaggagcatcattccttccttaccccctttctagctgtgtgatgtagaccaaagtcgttgcccctccctgggcctgggaaccagtcggaactgggttccagtccagctgtgctgtgtgagcctgtgcaagtgacatgacctctctaaaccttggttttctgctctctggagcggtgaaccggtggttgtctgcggggaagagatgataaagagcacgggcacggtctggttcatttctgtatctaccccccttccgcccacgcccccgaccctttgctcaataaacattccgcactcc

SEQ ID NO: 203073 - DNA, 1025 bp, Homo sapiens
  Payload ID: 20045
  Gene Name: zinc finger protein 580
  Uniprot ID: Q9UK33
  ENST ID: ENST00000545125
  CDS Start-End: 65-583
agattagagaaatctcggcggtcaggaggcccggggtctaagatgtaaagagctgccgctccagatgctgctgctgccgccgcggccaccccaccctcggtcctcctctccggaggccatggacccaccgccccccaaggctccccctttccccaaggcggaaggcccctcctccactccttcctcggcggcggggccccgacccccgcggctgggccgccacctcctcatcgacgccaatggggtcccctacacatacacggtgcagctggaggaggagccccggggcccgccccagcgcgaggcgcccccaggagagcccggccctcgcaagggctacagctgcccggagtgcgcccgtgtctttgccagccctctgcggctgcagagccaccgcgtgtcgcactcggacctcaagcccttcacgtgcggcgcctgcggcaaggccttcaagcgctccagccacctgtcgcggcatcgcgccacgcaccgcgcccgcgccgggccgccgcacacctgcccgctctgcccacgccgcttccaggacgccgcggagctggcgcagcacgtgcgcctccactaagctcgagacccggcctgtgctgccctgcccgtctcagggccaccaagtctgacccacacagcgtcactcactcccacacacaccccctggctctgctgaggttactgccttaccctgggcctcagtttccccaccttccaaagggaggagcatcattccttccttaccccctttctagctgtgtgatgtagaccaaagtcgttgcccctccctgggcctgggaaccagtcggaactgggttccagtccagctgtgctgtgtgagcctgtgcaagtgacatgacctctctaaaccttggttttctgctctctggagcggtgaaccggtggttgtctgcggggaagagatgataaagagcacgggcacggtctggttcatttctgtatctaccccccttccgcccacgcccccgaccctttgctcaataaacattccgcactcc

SEQ ID NO: 203074 - DNA, 335 bp, Homo sapiens
  Payload ID: 20045
  Gene Name: zinc finger protein 580
  ENST ID: ENST00000590190
  CDS Start-End: 270-335
gcgcgcttccggccggcgccttttcccagggactccgccaacccctcgcacccccgcgcccccagtccccgcgtccccggcgccgccggcccggagctgcccggaagtctcggttccgccgccggcgctcgccaggggaagcccggggccgcccgggacctcggcccgttcctccggacccgagaggccgccgcacggggaaacttttcctaaaaggaagtggcaattttaactaatctcccctccgccgctcccagctgccgctccagatgctgctgctgccgccgcggccaccccaccctcggtcctcctctccggaggccatggacccaccg

SEQ ID NO: 203075 - DNA, 377 bp, Homo sapiens
  Payload ID: 20045
  Gene Name: zinc finger protein 580
  ENST ID: ENST00000592461
  CDS Start-End: 65-377
agattagagaaatctcggcggtcaggaggcccggggtctaagatgtaaagagctgccgctccagatgctgctgctgccgccgcggccaccccaccctcggtcctcctctccggaggccatggacccaccgccccccaaggctccccctttccccaaggcggaaggcccctcctccactccttcctcggcggcggggccccgacccccgcggctgggccgccacctcctcatcgacgccaatggggtcccctacacatacacggtgcagctggaggaggagccccggggcccgccccagcgcgaggcgcccccaggagagcccggccctcgcaagggctacagctgcccggagtgcgcccgtgtctttgccagccctc

SEQ ID NO: 203076 - DNA, 1019 bp, Homo sapiens
  Payload ID: 20045
  Gene Name: zinc finger protein 580
  ENST ID: ENST00000592881
  CDS Start-End: 710-1019
ccggacgtgaaagtttgctgcgtagggatagggagaccgggccggattgcggggagtgagcaggttcagcagtgacggcattcttaagagtcctgcccaagtgagggacttggggtgtgggacagagtggcccccagggcagtgggcgttggaaactgagaggccctgcgaaggaggcttggggaggggctacggtgaccaggggacgaggtataggaagaggagggcggaaagccttgagggtgggcttcttggatcccaattgccccagaggcacaggcctgggcatcactgtattatttcccgaggggagaaggggctatttcccatgggaagacaaagtgggatgaatagtggaccttgagaagagggggtggccaggaaaaggttcctgaaggaggcaggacccagactgcaggctggggagggtttgggcagccagagggaggtgagggtgctggagcgggggtcaatcggtcactccggccggagatctgagtggcctctgccccctctgcgctgtggagtgcatctgattgccagcctcgctggaccgttgagaggattcatcgagaccctggatatgaatatgcagtgtgaactgaagtttggggacatgagtaatcagtcacagtggcccaagatttgaggtgtaaatggagaagtcagaatgattcgctgcagctgtctggaacagctgccgctccagatgctgctgctgccgccgcggccaccccaccctcggtcctcctctccggaggccatggacccaccgccccccaaggctccccctttccccaaggcggaaggcccctcctccactccttcctcggcggcggggccccgacccccgcggctgggccgccacctcctcatcgacgccaatggggtcccctacacatacacggtgcagctggaggaggagccccggggcccgccccagcgcgaggcgcccccaggagagcccggccctcgcaagggctacagctgcccggagtgcgcccgtgtctttgccagcc

SEQ ID NO: 203077 - DNA, 1298 bp, Homo sapiens
  Payload ID: 20046
  Gene Name: zinc finger protein 581
  Uniprot ID: Q9P0T4
  ENST ID: ENST00000270451
  CDS Start-End: 248-841
tttcctctcggtgtgtgtttctggccggagccgtttcgcgacggcccgggcgccccgccccaaccttccttccctagaccctcttctctcccttcggcttctctctttcggccggcgccgccagttcctggggcacacccagaggtccccttctcgccgccgcctgcaactgcgagggtagcccggggccgcttggagtcgcccggacctgagaggctgctgcactgggcctcagccagccctccggatgctggtgctgccatccccctgccctcagcctctggcattttcctccgttgagaccatggagggccctccccgtcggacttgccgctccccagaacctggaccttcctcctccatcggatctccccaggcttcatctcctccaaggcccaaccactacctgcttattgacactcagggtgtcccctacacagtgctggtggacgaggagtcacagagggagccaggggccagtggggctccaggccagaaaaagtgctacagctgccccgtgtgctcaagggtcttcgagtacatgtcctaccttcagcgacacagcatcacccactcggaggtaaagcccttcgagtgtgacatctgtgggaaggcattcaagcgcgccagccacttggcacggcaccattccattcacctggcgggtggtgggcggccccacggctgcccgctctgccctcgccgcttccgggatgcgggtgagctggcccagcacagccgggtgcactctggggaacgcccgtttcagtgtccacactgccctcgccgctttatggagcagaacacactgcagaaacacacgcggtggaagcatccatgagccgggctgccgggtgccccaggtaccacaggactttgcagggagcctggactcctgtccagacacctggtgagagcctgaggctggtgttcagggccctggacacagacacagagcagccgcatctcaaaggcagagccctgcctgaaggaggaatccgtgagtaatcttcaggtcctccgtgttctggagctgagatgggaatgagcccctacacagaatggagtcctctagcctaaagatatcagctgttccatggcagagccttgactggatggaggtggggagtgtggtgtgtaaagtctctggcctcataaaaggtggctgtgggtcgtcaggaatctgcgccatcttcctggggcttctgcgctgttgttggggaagggaccccagtcctgccttccaccccccaaccaggcctgagactgatcaaacaataaacacgtttcccactctg

SEQ ID NO: 203078 - DNA, 1324 bp, Homo sapiens
  Payload ID: 20046
  Gene Name: zinc finger protein 581
  Uniprot ID: Q9P0T4
  ENST ID: ENST00000587252
  CDS Start-End: 274-867
gggaggtgagggtgctggagcgggggtcaatcggtcactccggccggagatctgagtggcctctgccccctctgcgctgtggagtgcatctgattgccagcctcgctggaccgttgagaggattcatcgagaccctggatatgaatatgcagtgtgaactgaagtttggggacatgagtaatcagtcacagtggcccaagatttgaggtgtaaatggagaagtcagaatgattcgctgcagctgtctggaacaggcctcagccagccctccggatgctggtgctgccatccccctgccctcagcctctggcattttcctccgttgagaccatggagggccctccccgtcggacttgccgctccccagaacctggaccttcctcctccatcggatctccccaggcttcatctcctccaaggcccaaccactacctgcttattgacactcagggtgtcccctacacagtgctggtggacgaggagtcacagagggagccaggggccagtggggctccaggccagaaaaagtgctacagctgccccgtgtgctcaagggtcttcgagtacatgtcctaccttcagcgacacagcatcacccactcggaggtaaagcccttcgagtgtgacatctgtgggaaggcattcaagcgcgccagccacttggcacggcaccattccattcacctggcgggtggtgggcggccccacggctgcccgctctgccctcgccgcttccgggatgcgggtgagctggcccagcacagccgggtgcactctggggaacgcccgtttcagtgtccacactgccctcgccgctttatggagcagaacacactgcagaaacacacgcggtggaagcatccatgagccgggctgccgggtgccccaggtaccacaggactttgcagggagcctggactcctgtccagacacctggtgagagcctgaggctggtgttcagggccctggacacagacacagagcagccgcatctcaaaggcagagccctgcctgaaggaggaatccgtgagtaatcttcaggtcctccgtgttctggagctgagatgggaatgagcccctacacagaatggagtcctctagcctaaagatatcagctgttccatggcagagccttgactggatggaggtggggagtgtggtgtgtaaagtctctggcctcataaaaggtggctgtgggtcgtcaggaatctgcgccatcttcctggggcttctgcgctgttgttggggaagggaccccagtcctgccttccaccccccaaccaggcctgagactgatcaaacaataaacacgtttcccactctg

SEQ ID NO: 203079 - DNA, 591 bp, Homo sapiens
  Payload ID: 20046
  Gene Name: zinc finger protein 581
  ENST ID: ENST00000585995
  CDS Start-End: 173-591
cgcacccccgcgcccccagtccccgcgtccccggcgccgccggcccggagctgcccggaagtctcggttccgccgccggcgctcgccaggggaagcccggggccgcccgggacctcggcccgttcctccggacccgagaggccgccgcacggggcctcagccagccctccggatgctggtgctgccatccccctgccctcagcctctggcattttcctccgttgagaccatggagggccctccccgtcggacttgccgctccccagaacctggaccttcctcctccatcggatctccccaggcttcatctcctccaaggcccaaccactacctgcttattgacactcagggtgtcccctacacagtgctggtggacgaggagtcacagagggagccaggggccagtggggctccaggccagaaaaagtgctacagctgccccgtgtgctcaagggtcttcgagtacatgtcctaccttcagcgacacagcatcacccactcggaggtaaagcccttcgagtgtgacatctgtgggaaggcattcaagcgcgccagccacttggcacggcaccattccattcacctggcggg

SEQ ID NO: 203080 - DNA, 1100 bp, Homo sapiens
  Payload ID: 20046
  Gene Name: zinc finger protein 581
  Uniprot ID: Q9P0T4
  ENST ID: ENST00000588537
  CDS Start-End: 51-644
gggcggcgggaggggctggaccgcgtggagggcctcagccagccctccggatgctggtgctgccatccccctgccctcagcctctggcattttcctccgttgagaccatggagggccctccccgtcggacttgccgctccccagaacctggaccttcctcctccatcggatctccccaggcttcatctcctccaaggcccaaccactacctgcttattgacactcagggtgtcccctacacagtgctggtggacgaggagtcacagagggagccaggggccagtggggctccaggccagaaaaagtgctacagctgccccgtgtgctcaagggtcttcgagtacatgtcctaccttcagcgacacagcatcacccactcggaggtaaagcccttcgagtgtgacatctgtgggaaggcattcaagcgcgccagccacttggcacggcaccattccattcacctggcgggtggtgggcggccccacggctgcccgctctgccctcgccgcttccgggatgcgggtgagctggcccagcacagccgggtgcactctggggaacgcccgtttcagtgtccacactgccctcgccgctttatggagcagaacacactgcagaaacacacgcggtggaagcatccatgagccgggctgccgggtgccccaggtaccacaggactttgcagggagcctggactcctgtccagacacctggtgagagcctgaggctggtgttcagggccctggacacagacacagagcagccgcatctcaaaggcagagccctgcctgaaggaggaatccgtgagtaatcttcaggtcctccgtgttctggagctgagatgggaatgagcccctacacagaatggagtcctctagcctaaagatatcagctgttccatggcagagccttgactggatggaggtggggagtgtggtgtgtaaagtctctggcctcataaaaggtggctgtgggtcgtcaggaatctgcgccatcttcctggggcttctgcgctgttgttggggaagggaccccagtcctgccttccaccccccaaccaggcctgagactgatcaaacaataaacacgtttcccactct

SEQ ID NO: 203081 - DNA, 2824 bp, Homo sapiens
  Payload ID: 20047
  Gene Name: zinc finger protein 582
  Uniprot ID: Q96NG8
  ENST ID: ENST00000301310
  CDS Start-End: 160-1713
caccggtaccgtggtggaagcgcgccctgggctgccgggggcgcggccgcggtggcacttggacccgaggaggcggcagctctaccgtcgcaggactctgcccttccccaagagaggaaccagaaggaggacctatcagcccttgaaattctaaaagtcatgtcccttgggtcagaattgttcagggatgtggccatagtcttctcccaagaagaatggcagtggttggcacctgctcagagggatttgtacagagacgtgatgttggagacctacagcaacctggtctcactgggtcttgccgtttccaaacctgatgtgatctccttcctagagcaaggcaaagagccctggatggtggagagagtggtgtctggaggcctgtgtccagtattggagtccagatatgataccaaggaattatttccaaagcagcatgtttatgaagtcgaatcaccccaatgggagataatggaaagccttacaagttatggtcttgagtgttcaagtttccaagatgattgggaatgcagaaaccagtttgacagacaacagggaaatccagacagacatttccatcagatgatcatcagacatgaagaaatgcccacttttgaccagcatgcatcccttactttttatcagaaaattcatactagagaaaaaccttttgggtataataaatgtagaaaagacttctggcaaaaggaactccttattaatcatcaaggaatttatactaatgagaaaccctataaatgtaaggaatgtgggaaggcctttaaatatggctcacgactaattcaacatgagaatattcattctggtaagaaaccatatgaatgtaaggaatgtggaaaggccttcaattctggttcaaattttatacaacatcagagagttcatactggtgagaaaccgtatgaatgtaaagattgtgagaaggcctttagtcgaagctcacagttgattgaacatcagcgaactcacacaggcgagaaaccctatcagtgtaaggaatgtggcaaggccttcaatcggatctcacatcttaaagtacattatagaattcatactggtgaaaaaccctatgcatgcaaggaatgtgggaaaacctttagtcatcgttctcagttgattcaacatcagactgttcatactggcaggaaactctatgaatgtaaggaatgtgggaaggcttttaatcaaggctcaactcttatacgacatcagagaattcataccggtgagaaaccctatgagtgcaaagtatgtggaaaggcctttagagtgagctcacaactcaagcaacatcagagaattcacactggagagaaaccctaccaatgtaaggtatgtggtagggccttcaaacgggtctcacatcttactgtacattacagaattcatacaggtgaaaagccatatgaatgtaaggaatgtgggaaggcttttagtcattgctcacaattgattcatcatcaggttattcacactgagaaaaagccctatgaatataaggaatgtgagaagaccttgagtcatgattcaactaccgttcaacctcagagaatgcataatagagaaacacatgtgaatataataaatgtagaaaagccttccatcagcagttaccccttactaatcatcagagaatttatgttggcaagcaaccatatgaatggaagtaatggggaaagcccattagcctaggctaattgtgactgtgacttacttctccctcttggagaaagacttgaagaatgtaatgccagtgacaatgccttcattcagaggtaagcctttatcctaagtctgaaaattcatatcaaagaaaattttatggatgtaaattgttcagatcataattgtcaaaaatgctgggaaaggttgggagaaattttatttctaacacattccagaaccacattttctaaccacagtgtagtaattttatcaagagcaaaagttatagttttcttacaagttaaaaaaacagccagattatcatttgcttaacaaagaaatcatgcaattaccataaatggtaatgaaaagaatgaattgagagtttaacatgccaagagatgtgaaatgtggccaaagagatgtgagggtaaggggaaagccaaagctacactggaggaatttttatagcctttgaatgcatgcatatacatgaaaatctgaaagataaactcatatgcactaaacatgctattcaagtctaccaaacatccaggcagtgaaagaagaaagtaacagaaaatgatgaaataaagagaccatcttacaataatctcagtttttgtttctttctgatccagaaataatctaaatttaggagaatatttcttaatttccacattgttacattgttttatgtgactggcacagacaaccattggttgtcatcccagcagccatacccaattccccttgttattggcagcatctgtgtcttgccttggactctgagaatatcagatgctaattttccagtctcctgtgcagcacagtatggccagtatctcccagtgttgctcagtggaatctgccggggcttctgggaaagattttcctcattcagaagagacaggtttatcatgaagacttcctcctctctcacttcctgcttttaaacatttttatataagaacatgatgcctgaagctgctgcagctgtcttggaaccaagaagagaaaaaagtggacctcagagaagctgacccagagcctgagaagactcagctactaggccaattctggaactgcctttttgatgccttgttatctgagaaaaataaaacttgattgctcagtt

SEQ ID NO: 203082 - DNA, 2053 bp, Homo sapiens
  Payload ID: 20047
  Gene Name: zinc finger protein 582
  Uniprot ID: Q96NG8
  ENST ID: ENST00000586929
  CDS Start-End: 407-1960
atcttccggctgcgcacggcgaatccaccggtaccgtggtggaagcgcgccctgggctgccgggggcgcggccgcggtggcacttggacccgaggaggcggcaggtgagaggttccggagctttccaggcgctctggggtccagcaggagctggtgcccgggccggttgggtctcaggcctgagaagaacgcagacgtctcgcctcatcgtcgctctgtggctttaccggcgtgagactacatttcccgccggccctcgcggcgtgcgctttctggcgccccctttctgcttccagcctcatagcccaggtgcatggaccccttagctctaccgtcgcaggactctgcccttccccaagagaggaaccagaaggaggacctatcagcccttgaaattctaaaagtcatgtcccttgggtcagaattgttcagggatgtggccatagtcttctcccaagaagaatggcagtggttggcacctgctcagagggatttgtacagagacgtgatgttggagacctacagcaacctggtctcactgggtcttgccgtttccaaacctgatgtgatctccttcctagagcaaggcaaagagccctggatggtggagagagtggtgtctggaggcctgtgtccagtattggagtccagatatgataccaaggaattatttccaaagcagcatgtttatgaagtcgaatcaccccaatgggagataatggaaagccttacaagttatggtcttgagtgttcaagtttccaagatgattgggaatgcagaaaccagtttgacagacaacagggaaatccagacagacatttccatcagatgatcatcagacatgaagaaatgcccacttttgaccagcatgcatcccttactttttatcagaaaattcatactagagaaaaaccttttgggtataataaatgtagaaaagacttctggcaaaaggaactccttattaatcatcaaggaatttatactaatgagaaaccctataaatgtaaggaatgtgggaaggcctttaaatatggctcacgactaattcaacatgagaatattcattctggtaagaaaccatatgaatgtaaggaatgtggaaaggccttcaattctggttcaaattttatacaacatcagagagttcatactggtgagaaaccgtatgaatgtaaagattgtgagaaggcctttagtcgaagctcacagttgattgaacatcagcgaactcacacaggcgagaaaccctatcagtgtaaggaatgtggcaaggccttcaatcggatctcacatcttaaagtacattatagaattcatactggtgaaaaaccctatgcatgcaaggaatgtgggaaaacctttagtcatcgttctcagttgattcaacatcagactgttcatactggcaggaaactctatgaatgtaaggaatgtgggaaggcttttaatcaaggctcaactcttatacgacatcagagaattcataccggtgagaaaccctatgagtgcaaagtatgtggaaaggcctttagagtgagctcacaactcaagcaacatcagagaattcacactggagagaaaccctaccaatgtaaggtatgtggtagggccttcaaacgggtctcacatcttactgtacattacagaattcatacaggtgaaaagccatatgaatgtaaggaatgtgggaaggcttttagtcattgctcacaattgattcatcatcaggttattcacactgagaaaaagccctatgaatataaggaatgtgagaagaccttgagtcatgattcaactaccgttcaacctcagagaatgcataatagagaaacacatgtgaatataataaatgtagaaaagccttccatcagcagttaccccttactaatcatcagagaatttatgttggcaagcaaccatatgaatggaagtaatggggaaagcccattagcctaggctaattgtgactgtgacttacttctccctcttggagaaagacttgaagaatgtaatgccagtgacaatgccttcattcagaggtaagccttt

SEQ ID NO: 203083 - DNA, 509 bp, Homo sapiens
  Payload ID: 20047
  Gene Name: zinc finger protein 582
  ENST ID: ENST00000589895
  CDS Start-End: 275-509
cggagctttccaggcgctctggggtccagcaggagctggtgcccgggccggttgggtctcaggcctgagaagaacgcagacgtctcgcctcatcgtcgctctgtggctttaccggcgtgagactacatttcccgccggccctcgcggcgtgcgctttctggcgccccctttctgcttccagcctcatagcccagctctaccgtcgcaggactctgcccttccccaagagaggaaccagaaggaggacctatcagcccttgaaattctaaaagtcatgtcccttgggtcagaattgttcagggatgtggccatagtcttctcccaagaagaatggcagtggttggcacctgctcagagggatttgtacagagacgtgatgttggagacctacagcaacctggtctcactgggtcttgccgtttccaaacctgatgtgatctccttcctagagcaaggcaaagagccctggatggtggagagagtggtgtctggaggcctgtgtccaggtg

SEQ ID NO: 203084 - DNA, 712 bp, Homo sapiens
  Payload ID: 20047
  Gene Name: zinc finger protein 582
  ENST ID: ENST00000593145
  CDS Start-End: 178-712
ggctgcgcacggcgaatccaccggtaccgtggtggaagcgcgccctgggctgccgggggcgcggccgcggtggcacttggacccgaggaggcggcagctctaccgtcgcaggactctgcccttccccaagagaggaaccagaaggaggacctatcagcccttgaaattctaaaagtcatgtcccttgggtcagaattgttcagggatgtggccatagtcttctcccaagaagaatggcagtggttggcacctgctcagagggatttgtacagagacgtgatgttggagacctacagcaacctggtctcactgggtcttgccgtttccaaacctgatgtgatctccttcctagagcaaggcaaagagccctggatggtggagagagtggtgtctggaggcctgtgtccagtattggagtccagatatgataccaaggaattatttccaaagcagcatgtttatgaagtcgaatcaccccaatgggagataatggaaagccttacaagttatggtcttgagtgttcaagtttccaagatgattgggaatgcagaaaccagtttgacagacaacagggaaatccagacagacatttccatcagatgatcatcagacatgaagaaatgcccacttttgaccagcatgcatcccttactttttatcagaaaattcatactagagaaaaaccttttgggtataataaatgtagaaaag

SEQ ID NO: 203085 - DNA, 733 bp, Homo sapiens
  Payload ID: 20047
  Gene Name: zinc finger protein 582
  ENST ID: ENST00000587778
  CDS Start-End: 190-733
gtggctttaccggcgtgagactacatttcccgccggccctcgcggcgtgcgctttctggcgccccctttctgcttccagcctcatagcccaggtgcatggaccccttagctctaccgtcgcaggactctgcccttccccaagagaggaaccagaaggaggacctatcagcccttgaaattctaaaagtcatgtcccttgggtcagaattgttcagggatgtggccatagtcttctcccaagaagaatggcagtggttggcacctgctcagagggatttgtacagagacgtgatgttggagacctacagcaacctggtctcactgggtcttgccgtttccaaacctgatgtgatctccttcctagagcaaggcaaagagccctggatggtggagagagtggtgtctggaggcctgtgtccagtattggagtccagatatgataccaaggaattatttccaaagcagcatgtttatgaagtcgaatcaccccaatgggagataatggaaagccttacaagttatggtcttgagtgttcaagtttccaagatgattgggaatgcagaaaccagtttgacagacaacagggaaatccagacagacatttccatcagatgatcatcagacatgaagaaatgcccacttttgaccagcatgcatcccttactttttatcagaaaattcatactagagaaaaaccttttgggtataataaatgtagaaaagacttctggc

SEQ ID NO: 203086 - DNA, 625 bp, Homo sapiens
  Payload ID: 20047
  Gene Name: zinc finger protein 582
  ENST ID: ENST00000589143
  CDS Start-End: 118-427
gcggccgcggtggcacttggacccgaggaggcggcagctctaccgtcgcaggactctgcccttccccaagagaggaaccagaaggaggacctatcagcccttgaaattctaaaagtcatgtcccttgggtcagaattgttcagggatgtggccatagtcttctcccaagaagaatggcagtggttggcacctgctcagagggatttgtacagagacgtgatgttggagacctacagcaacctggtctcactgggtcttgccgtttccaaacctgatgtgatctccttcctagagcaaggcaaagagccctggatggtggagagagtggtgtctggaggcctgtgtccaggagctaaagggcagaggggcagagatgctggctgtgcttgctgtaaaagaacagaacagaaccccggtcaattatggaaaatgactgagtctggcctgtttttcatgcactaaacatgtgggaatcccactgttttttccagattatactgtgtatgtagacagtggagagggctaacctcattaagggtgcaagaggggctggttttacagggggcctctactacgaaggcctaatggttttgaaaatgaactcaaataaaagattattaccaaa

SEQ ID NO: 203087 - DNA, 2297 bp, Homo sapiens
  Payload ID: 20047
  Gene Name: zinc finger protein 582
  Uniprot ID: Q96NG8
  ENST ID: ENST00000619584
  CDS Start-End: 160-1713
caccggtaccgtggtggaagcgcgccctgggctgccgggggcgcggccgcggtggcacttggacccgaggaggcggcagctctaccgtcgcaggactctgcccttccccaagagaggaaccagaaggaggacctatcagcccttgaaattctaaaagtcatgtcccttgggtcagaattgttcagggatgtggccatagtcttctcccaagaagaatggcagtggttggcacctgctcagagggatttgtacagagacgtgatgttggagacctacagcaacctggtctcactgggtcttgccgtttccaaacctgatgtgatctccttcctagagcaaggcaaagagccctggatggtggagagagtggtgtctggaggcctgtgtccagtattggagtccagatatgataccaaggaattatttccaaagcagcatgtttatgaagtcgaatcaccccaatgggagataatggaaagccttacaagttatggtcttgagtgttcaagtttccaagatgattgggaatgcagaaaccagtttgacagacaacagggaaatccagacagacatttccatcagatgatcatcagacatgaagaaatgcccacttttgaccagcatgcatcccttactttttatcagaaaattcatactagagaaaaaccttttgggtataataaatgtagaaaagacttctggcaaaaggaactccttattaatcatcaaggaatttatactaatgagaaaccctataaatgtaaggaatgtgggaaggcctttaaatatggctcacgactaattcaacatgagaatattcattctggtaagaaaccatatgaatgtaaggaatgtggaaaggccttcaattctggttcaaattttatacaacatcagagagttcatactggtgagaaaccgtatgaatgtaaagattgtgagaaggcctttagtcgaagctcacagttgattgaacatcagcgaactcacacaggcgagaaaccctatcagtgtaaggaatgtggcaaggccttcaatcggatctcacatcttaaagtacattatagaattcatactggtgaaaaaccctatgcatgcaaggaatgtgggaaaacctttagtcatcgttctcagttgattcaacatcagactgttcatactggcaggaaactctatgaatgtaaggaatgtgggaaggcttttaatcaaggctcaactcttatacgacatcagagaattcataccggtgagaaaccctatgagtgcaaagtatgtggaaaggcctttagagtgagctcacaactcaagcaacatcagagaattcacactggagagaaaccctaccaatgtaaggtatgtggtagggccttcaaacgggtctcacatcttactgtacattacagaattcatacaggtgaaaagccatatgaatgtaaggaatgtgggaaggcttttagtcattgctcacaattgattcatcatcaggttattcacactgagaaaaagccctatgaatataaggaatgtgagaagaccttgagtcatgattcaactaccgttcaacctcagagaatgcataatagagaaacacatgtgaatataataaatgtagaaaagccttccatcagcagttaccccttactaatcatcagagaatttatgttggcaagcaaccatatgaatggaagtaatggggaaagcccattagcctaggctaattgtgactgtgacttacttctccctcttggagaaagacttgaagaatgtaatgccagtgacaatgccttcattcagaggtaagcctttatcctaagtctgaaaattcatatcaaagaaaattttatggatgtaaattgttcagatcataattgtcaaaaatgctgggaaaggttgggagaaattttatttctaacacattccagaaccacattttctaaccacagtgtagtaattttatcaagagcaaaagttatagttttcttacaagttaaaaaaacagccagattatcatttgcttaacaaagaaatcatgcaattaccataaatggtaatgaaaagaatgaattgagagtttaacatgccaagagatgtgaaatgtggccaaagagatgtgagggtaaggggaaagccaaagctacactggaggaatttttatagcctttgaatgcatgcatatacatgaaaatctgaaagataaactcatatgcactaaacatgctattcaagtctaccaaacatccaggcagtgaaagaagaaagtaacagaaaatgatgaaataaagagaccatcttacaat

SEQ ID NO: 203088 - DNA, 2538 bp, Homo sapiens
  Payload ID: 20048
  Gene Name: zinc finger protein 583
  Uniprot ID: Q96ND8
  ENST ID: ENST00000291598
  CDS Start-End: 166-1875
actgcgcgtgcgcctcaccgcgctggcaccccggcctggcagcctttggggacctgaaccagctgcgcctgcgcagctcgactttctcaggatactgtccctctcccacagaggagctgaaggagtaggacagaagaactgtcaaattctggaatccttaaagccatgtccaaggatttggtgacatttggggatgtggctgtaaatttctctcaagaggaatgggaatggctgaaccctgctcagaggaatttgtacaggaaagtgatgttggagaactacaggagcttggtatcattgggagtttctgtttctaagccagatgtgatctcattattggagcaaggaaaagagccctggatggtgaagaaggagggaacaagaggcccatgccctgattgggagtatgtatttaaaaacagtgaattttcatcaaagcaagagacatatgaagaatcatccaaagttgtgacagtgggagcaagacatcttagttatagccttgactatcccagtttgagagaagactgtcaaagtgaggactggtataagaaccagctgggaagtcaagaggtacatcttagtcaattaatcatcactcataaagaaatccttccagaagttcaaaataaagaatataacaaatcttggcaaacattccaccaggatacaatctttgatatacaacagagttttcccaccaaagaaaaagcacataagcatgaaccacaaaagaaaagttaccgaaaaaaatctgttgaaatgaaacataggaaagtctatgtagaaaagaaacttttgaaatgtaatgattgtgagaaagtcttcaaccagagctcatcccttactcttcatcagagaattcatactggagagaaaccctatgcatgtgttgaatgtgggaaaacgttcagccagagtgcaaacttggcgcaacataagagaatacatactggagagaaaccctatgaatgtaaagaatgtaggaaagccttcagccagaatgcacacctggcccaacatcagagagttcatactggagagaaaccttatcagtgtaaagaatgtaaaaaagccttcagccagattgcacacctgactcagcatcagagagttcatactggagagagacctttcgaatgtattgaatgtggaaaggcctttagtaatggttcatttcttgctcagcatcagagaattcatacaggagagaaaccttatgtgtgtaatgtgtgtgggaaagcctttagccatcgtggatacctaattgtacatcagagaattcatactggagagagaccctacgaatgtaaggaatgtaggaaagccttcagccagtatgcacaccttgctcaacatcagagagttcatactggagaaaaaccttatgaatgtaaagtatgtaggaaagccttcagccaaattgcataccttgatcaacatcagagggttcatactggagagaaaccctatgaatgtattgaatgtgggaaggcctttagcaatagttcatcacttgcacaacatcagagaagtcatactggagaaaaaccctatatgtgtaaggaatgtaggaaaacatttagccagaatgcaggccttgctcaacatcagagaattcatactggagagaaaccttatgaatgtaatgtttgtgggaaagcatttagctatagtggatctcttactctacatcagagaattcatactggagaaagaccctatgaatgtaaagattgcaggaaatctttcaggcagcgtgcacatcttgctcatcatgagagaattcatactatggagtcattcttgactctttcctctccctcaccctccacatcaaatcagttgccaagacctgtaggtttcatctcctgaatatttctggaatccacctcttgaatccatttccatcccatcatccttgtccaatgcacattaatatatttgacatgggatactcgagtagctttctaattggtctccttgtactcaccattgtctctgtcagatgtccacattgcaaccaaatttgtatttttaaaaatatgtttaatctcatttctccctcattaaaatccctcagtggcatcccatggtttttaagttaaagcacacattcttcaaaatagcctaaaaacctagcctctaacaccttgttccaggttaccttccaaagtttctatcttgtgtcactatccatctcattctctgaatacttatccaggattaagatacatattccaggatcaaaaagacctgggttccaatctttgcacttccatttcctgccctctaatttgggggcagcagtttgtgctttgtaagcttcagtcttatttatagtgtgggaataataatggttctacctcagaagttaatagaagaatgaaataatgcatgtaaattgctcagcagcgtgcctagcataaagtaattactcaaaccataatgtaaagtaaaaagataaccatactatacatagaaagccaatcatctcagccatgattatctcagaaataaaaagagatgcagcagctc

SEQ ID NO: 203089 - DNA, 582 bp, Homo sapiens
  Payload ID: 20048
  Gene Name: zinc finger protein 583
  ENST ID: ENST00000391778
  CDS Start-End: 171-582
gtgagcgcggccgccggccaggatcgagccctggcccgggccctggcccagccccggcctccaaggaccgcgccgaaggagctcgactttctcaggatactgtccctctcccacagaggagctgaaggagtaggacagaagaactgtcaaattctggaatccttaaagccatgtccaaggatttggtgacatttggggatgtggctgtaaatttctctcaagaggaatgggaatggctgaaccctgctcagaggaatttgtacaggaaagtgatgttggagaactacaggagcttggtatcattgggagtttctgtttctaagccagatgtgatctcattattggagcaaggaaaagagccctggatggtgaagaaggagggaacaagaggcccatgccctgattgggagtatgtatttaaaaacagtgaattttcatcaaagcaagagacatatgaagaatcatccaaagttgtgacagtgggagcaagacatcttagttatagccttgactatcccagtttgagagaagactgtcaaagtgaggactggtataagaaccagctgggaagtcaagaggtac

SEQ ID NO: 203090 - DNA, 4916 bp, Homo sapiens
  Payload ID: 20048
  Gene Name: zinc finger protein 583
  Uniprot ID: Q96ND8
  ENST ID: ENST00000333201
  CDS Start-End: 211-1920
agggctgcggcgcctttgtgagcgcggccgccggccaggatcgagccctggcccgggccctggcccagccccggcctccaaggaccgcgccgaaggaggtgcccactggagggaggaggcgctcgactttctcaggatactgtccctctcccacagaggagctgaaggagtaggacagaagaactgtcaaattctggaatccttaaagccatgtccaaggatttggtgacatttggggatgtggctgtaaatttctctcaagaggaatgggaatggctgaaccctgctcagaggaatttgtacaggaaagtgatgttggagaactacaggagcttggtatcattgggagtttctgtttctaagccagatgtgatctcattattggagcaaggaaaagagccctggatggtgaagaaggagggaacaagaggcccatgccctgattgggagtatgtatttaaaaacagtgaattttcatcaaagcaagagacatatgaagaatcatccaaagttgtgacagtgggagcaagacatcttagttatagccttgactatcccagtttgagagaagactgtcaaagtgaggactggtataagaaccagctgggaagtcaagaggtacatcttagtcaattaatcatcactcataaagaaatccttccagaagttcaaaataaagaatataacaaatcttggcaaacattccaccaggatacaatctttgatatacaacagagttttcccaccaaagaaaaagcacataagcatgaaccacaaaagaaaagttaccgaaaaaaatctgttgaaatgaaacataggaaagtctatgtagaaaagaaacttttgaaatgtaatgattgtgagaaagtcttcaaccagagctcatcccttactcttcatcagagaattcatactggagagaaaccctatgcatgtgttgaatgtgggaaaacgttcagccagagtgcaaacttggcgcaacataagagaatacatactggagagaaaccctatgaatgtaaagaatgtaggaaagccttcagccagaatgcacacctggcccaacatcagagagttcatactggagagaaaccttatcagtgtaaagaatgtaaaaaagccttcagccagattgcacacctgactcagcatcagagagttcatactggagagagacctttcgaatgtattgaatgtggaaaggcctttagtaatggttcatttcttgctcagcatcagagaattcatacaggagagaaaccttatgtgtgtaatgtgtgtgggaaagcctttagccatcgtggatacctaattgtacatcagagaattcatactggagagagaccctacgaatgtaaggaatgtaggaaagccttcagccagtatgcacaccttgctcaacatcagagagttcatactggagaaaaaccttatgaatgtaaagtatgtaggaaagccttcagccaaattgcataccttgatcaacatcagagggttcatactggagagaaaccctatgaatgtattgaatgtgggaaggcctttagcaatagttcatcacttgcacaacatcagagaagtcatactggagaaaaaccctatatgtgtaaggaatgtaggaaaacatttagccagaatgcaggccttgctcaacatcagagaattcatactggagagaaaccttatgaatgtaatgtttgtgggaaagcatttagctatagtggatctcttactctacatcagagaattcatactggagaaagaccctatgaatgtaaagattgcaggaaatctttcaggcagcgtgcacatcttgctcatcatgagagaattcatactatggagtcattcttgactctttcctctccctcaccctccacatcaaatcagttgccaagacctgtaggtttcatctcctgaatatttctggaatccacctcttgaatccatttccatcccatcatccttgtccaatgcacattaatatatttgacatgggatactcgagtagctttctaattggtctccttgtactcaccattgtctctgtcagatgtccacattgcaaccaaatttgtatttttaaaaatatgtttaatctcatttctccctcattaaaatccctcagtggcatcccatggtttttaagttaaagcacacattcttcaaaatagcctaaaaacctagcctctaacaccttgttccaggttaccttccaaagtttctatcttgtgtcactatccatctcattctctgaatacttatccaggattaagatacatattccaggatcaaaaagacctgggttccaatctttgcacttccatttcctgccctctaatttgggggcagcagtttgtgctttgtaagcttcagtcttatttatagtgtgggaataataatggttctacctcagaagttaatagaagaatgaaataatgcatgtaaattgctcagcagcgtgcctagcataaagtaattactcaaaccataatgtaaagtaaaaagataaccatactatacatagaaagccaatcatctcagccatgattatctcagaaataaaaagagatgcagcagctcaggactgagagattgtgaagtttttttttttttaggaatggtaggcatttttctaaaagtaggtgaggagggtatctaacagtaggatttacattagagtccatgatatagggtaagatggtggcttgtatcagcattcactggatatttaacagttctaagatgctaatgtcttattttaaaagtctttttttttgagatggagtcttgctctgttgctcaggcttgagtgcagtagtgcaatcttggctcactgcaacctccgcctcctgtgttcaagtgattctcctgcctcagcctcctgagtagctgggattacaggcctgcaccaccacgcccagctaatttttgtatttttagtagagagagggttttgacatgtcggccaggcttttctctaactcctgacgtccggtgatccgcctgccttggcctcccaaagtgctgggattacatgcgtgagctaccgtgcctggcctaaaaagtcatttttaataagacagtttactgagatgtattcatcatttacatgtaaacaaaggcaaaatcgaaattaaaaagaaatcttgaaacaagtcagtaaccaatgatgagtagaaaataaagtataagtttgaacccctgttctaaatctgggtgaatgaattatatcaaatctatgtcatttaaaataataaaggttgttaaattactaaaatttcaaaactagtgaagaaaagaaaccaaaactgtaggtcagttctcataaactggcccacaaacatgtttgattctgtatgcattaagtttaaaatacatatgaataccttcagcagaccatgtgttttccctttctccaacattcaaaccactccctgattctttacatctgacctcttttaatattacttcctgaccccagaattcttttggcatataatcaatgcagtgatcaattcacatgtgactatagatacaaacagaatgacgaaagtttaatggaggatgaaaaagaagacaaataaatattttatcctttatatggtaagacagattcactatcatactgatgtcagtagcccatgaattaatttacagattctacctaacaaaattctaataaattttgtaaggttttaacatgtatgtgtgaacatacatattcatgctgttacacatataaagaaaattataacaaaagtgacctataccatcagtggtttaacagttttggaaaaatttatcgtgctctatacaacaattcattccatatgtgaaagttactttcaagtgctttatctaaatgtggaacaaacagtgattagaggagtctgtgacacactctaatcatggaatgagactggccttcctaaacatgagattcagaagcctccccacctcctgtcaacaagtcatagatttgactgtataagaactttataaagcttttatatgatcaaagatagtaaaagatacaatattttttaaacctaagaatgggagaaaattattgcagcacatataaactatggaattcatatccttaacataaaattgctcataaaaatcccttaggaaatgacgcttttctccagctcatagtcaaaggatatgaagaggcaacaggtgaccaataaatatgtggtaagtactaaatctccctaggatcagaagaaatacagtttaggccaatgaaatactatttttttcaatatcagattaataaaactgcattgaaagcatacaaaaagagatactatgcactaatttaaaagagcatgagtttgtacaaactctggtaggcaatttgtcaacttcagaattttaattgggaaaagtagaattttattttgaagttcaaaaactcggcacacaatgtctttccctccagattctattatacacatagaacaatgtaaatgattcttaaaaaaaaaaaaaaggtgaggcttttgagtggatgaaataattttgtaaaaggcaaaacagggaagagtgttcatgaattgtagcagaagatgctgcatgttatatgcgaatgaccgaagggttttaaaaatggaatctagtctgcccaaaggatccctagagaagttcaggcttggagttggcttatgtacaggctgtggcttctaagaagacatgatgaaaagcctcttgaagcctttgtatgtgaaagttatgtcagtagcccttgccaaaagcctcctcactctcccctctcttgtataagtaaattgaatgggatccttatttcacaccattaacaagtataagttctaactgaataaaaatctaaatgtaaattactaaagcaaaagtattagaaaaaatatagtgggatatgttaacga

SEQ ID NO: 203091 - DNA, 554 bp, Homo sapiens
  Payload ID: 20048
  Gene Name: zinc finger protein 583
  ENST ID: ENST00000537943
  CDS Start-End: 166-554
actgcgcgtgcgcctcaccgcgctggcaccccggcctggcagcctttggggacctgaaccagctgcgcctgcgcagctcgactttctcaggatactgtccctctcccacagaggagctgaaggagtaggacagaagaactgtcaaattctggaatccttaaagccatgtccaaggatttggtgacatttggggatgtggctgtaaatttctctcaagaggaatgggaatggctgaaccctgctcagaggaatttgtacaggaaagtgatgttggagaactacaggagcttggtatcattgggagtttctgtttctaagccagatgtgatctcattattggagcaaggaaaagagccctggatggtgaagaaggagggaacaagaggcccatgccctgattgggagtatgtatttaaaaacagtgaattttcatcaaagcaagagacatatgaagaatcatccaaagttgtgacagtgggagcaagacatcttagttatagccttgactatcccagtttgagagaagactgtcaaagtgaggactggtataagaa

SEQ ID NO: 203092 - DNA, 2332 bp, Homo sapiens
  Payload ID: 20049
  Gene Name: zinc finger protein 584
  Uniprot ID: Q8IVC4
  ENST ID: ENST00000306910
  CDS Start-End: 524-1789
gagctagcggcgccctcccttatcgccttggcaacgacccagccgcgccgcgaggagagccgggaatggaggtcgtggcgtgaggggcgccgagcgaggggaggcgcgggccacgggagttccgggagttccggcgttgcccggcagtccgcagtcctcggcgggaaggctgtcccggcgcctcaggcagctctgcgtgggccggggtgacttcctcgcgatcccctgcgcgaggtgaagggcagggacctttgccgcgccttccacgcgccgtgccccaccggcgagtggctccatcttcctcagacttatcgctcgcggacaggcgccgtgggtctcccgggcctccgtaccgtcctccttcccagcggctccgggaagcggttccctgtcttcggacgcatttcacccgcgcggggagagcttcccgggaaggttccacggcggccgagggtttccgcgcccgggacgcgtttcggctgaggccgtgggtccagtccacgggttctgcccgcacggtccaatggccggggaggcggaggctcagttggacccatcattgcagggcttggtgatgtttgaggatgtgacggtatatttctccagggaggagtgggggctccttaatgtgacccagaagggcctataccgggatgtgatgctggagaactttgcactcgttagctcactgggacttgcaccttcgagatcccctgtgtttacccagctggaggatgatgaacagtcgtgggtgcccagctgggtggatgtgactccagtcagcagagcagaagccaggagaggttttggtcttgatggtttgtgtagagtggaggatgagagagcccatcctgagcatctaaagagctacagagtcatccagcaccaggacactcatagtgaggggaaaccaagaaggcacactgagcatggggcagctttcccacctggttccagttgtgggcaacagcaagaagtccatgtggcagagaagctgttcaaatgcagtgactgtgggaaggtgttcttaaaggcctttgccctccttgaccatctgataacgcattctgaagagagacccttcagatgcccaacaggcagaagtgctttcaagaagtcagctcatattaacccccgaaaaattcacactggagaaacagcccatgtgtgtaatgaatgtgggaaggccttcagttacccgtctaagctgaggaaacaccagaaggttcacacaggcataaaaccttttaagtgtagtgactgtggtaaaaccttcaaccgcaaagacgcacttgttctacaccagaggattcacactggagaaaggccttacgagtgcagcaaatgtggtaaaaccttcagtgttctgtctaccctcattcggcaccggaaagtgcacattggagaaaggccctatgagtgtacagaatgtgggaagttctttaaatacaataatagcttcattcttcaccagagagttcacactggagaaaggccttttgaatgcaagcaatgtgggaaaggctacgtgacccgttcaggcctctatcagcactggaaagtccacactggggaacggccctatgaatgtagcctgtgtgggaaaaccttcactaccagatcctaccgcaatcggcaccagcagttccacactgaagagaggtcttatgaatgtacagagtgtgggaaggccttcaaacatagttccaccctccttcagcacaagaaagtccatactccagaaaggcgtcaggaggacagggcacatgggaaggtcgttagctgctagcaccgtgttcatcaggaaaggtcttattccagaaaggaggttaaggagagtggccgtgagagtgccatccgaaagaagctaaaccttgcacatcccaacacccaccccagggagagttcccgtgtgtgcctggtgtgtgggacgctttcgggagccacattgcactctgacttgcctggggctgttggcagtgtcacatcactgagtttatccaccgccatccacctctatccaccccataaggtccctacagcaagtgggacagcagaccttgtgctccttgctctaaacagtagagaatcgttaatagtggagcccaaaacaggcctcattccctacccttgactggtttagctgtggacatgacccacctctggccggaggagctgagctggtatctgctgggggcttcctgggaaggtttaccattttcatggaaatggttgacattacacatggtatttgtcatgccctagcatggactgtctcatactgctctggactatgtggtaataaaggctttattgtttaagccgcttaaaa

SEQ ID NO: 203093 - DNA, 1042 bp, Homo sapiens
  Payload ID: 20049
  Gene Name: zinc finger protein 584
  ENST ID: ENST00000322834
  CDS Start-End: 372-809
agtcctcggcgggaaggctgtcccggcgcctcaggcagctctgcgtgggccggggtgacttcctcgcgatcccctgcgcgaggtgaagggcagggacctttgccgcgccttccacgcgccgtgccccaccggcgagtggctccatcttcctcagacttatcgctcgcggacaggcgccgtgggtctcccgggcctccgtaccgtcctccttcccagcggctccgggaagcggttccctgtcttcggacgcatttcacccgcgcggggagagcttcccgggaaggttccacggcggccgagggtttccgcgcccgggacgcgtttcggctgaggccgtgggtccagtccacgggttctgcccgcacggtccaatggccggggaggcggagggcttggtgatgtttgaggatgtgacggtatatttctccagggaggagtgggggctccttaatgtgacccagaagggcctataccgggatgtgatgctggagaactttgcactcgttagctcactgggacttgcaccttcgagatcccctgtgtttacccagctggaggatgatgaacagtcgtgggtgcccagctgggtggatgtgactccagtcagcagagcagaagccaggagaggttttggtcttggccccgcatgttcctgcctctctggcctgcgtctcctcattgcccttctctgtatctgtgcagagctgtctactgttggcgactcagtgcgtgtcttgaaatgtgcacatatccttaaacagatggtttgtgtagagtggaggatgagagagcccatcctgagcatctaaagagctacagagtcatccagcaccaggacactcatagtgaggggaaaccaagaaggcacactgagcatggggcagctttcccacctggttccagttgtgggcaacagcaagaagtccatgtggcagagaagctgttcaaatgcagtgactgtgggaaggtgttcttaaaggcctttgccctccttgaccatctgataacgcattctgaagagagacccttcagatgcccaaca

SEQ ID NO: 203094 - DNA, 2288 bp, Homo sapiens
  Payload ID: 20049
  Gene Name: zinc finger protein 584
  ENST ID: ENST00000599238
  CDS Start-End: 467-748
gttccggcgttgcccggcagtccgcagtcctcggcgggaaggctgtcccggcgcctcaggcagctctgcgtgggccggggtgacttcctcgcgatcccctgcgcgaggtgaagggcagggacctttgccgcgccttccacgcgccgtgccccaccggcgagtggctccatcttcctcagacttatcgctcgcggacaggcgccgtgggtctcccgggcctccgtaccgtcctccttcccagcggctccgggaagcggttccctgtcttcggacgcatttcacccgcgcggggagagcttcccgggaaggttccacggcggccgagggtttccgcgcccgggacgcgtttcggctgaggccgtgggtccagtccacgggttctgcccgcacggtccaatggccggggaggcggagggaggagtgggggctccttaatgtgacccagaagggcctataccgggatgtgatgctggagaactttgcactcgttagctcactgggacttgcaccttcgagatcccctgtgtttacccagctggaggatgatgaacagtcgtgggtgcccagctgggtggatgtgactccagtcagcagagcagaagccaggagaggttttggtcttgtctgccatctctaccatgattttcaggccccgcatgttcctgcctctctggcctgcgtctcctcattgcccttctctgtatctgtgcagagctgtctactgttggcgactcagtgcgtgtcttgaaatgtgcacatatccttaaacagatggtttgtgtagagtggaggatgagagagcccatcctgagcatctaaagagctacagagtcatccagcaccaggacactcatagtgaggggaaaccaagaaggcacactgagcatggggcagctttcccacctggttccagttgtgggcaacagcaagaagtccatgtggcagagaagctgttcaaatgcagtgactgtgggaaggtgttcttaaaggcctttgccctccttgaccatctgataacgcattctgaagagagacccttcagatgcccaacaggcagaagtgctttcaagaagtcagctcatattaacccccgaaaaattcacactggagaaacagcccatgtgtgtaatgaatgtgggaaggccttcagttacccgtctaagctgaggaaacaccagaaggttcacacaggcataaaaccttttaagtgtagtgactgtggtaaaaccttcaaccgcaaagacgcacttgttctacaccagaggattcacactggagaaaggccttacgagtgcagcaaatgtggtaaaaccttcagtgttctgtctaccctcattcggcaccggaaagtgcacattggagaaaggccctatgagtgtacagaatgtgggaagttctttaaatacaataatagcttcattcttcaccagagagttcacactggagaaaggccttttgaatgcaagcaatgtgggaaaggctacgtgacccgttcaggcctctatcagcactggaaagtccacactggggaacggccctatgaatgtagcctgtgtgggaaaaccttcactaccagatcctaccgcaatcggcaccagcagttccacactgaagagaggtcttatgaatgtacagagtgtgggaaggccttcaaacatagttccaccctccttcagcacaagaaagtccatactccagaaaggcgtcaggaggacagggcacatgggaaggtcgttagctgctagcaccgtgttcatcaggaaaggtcttattccagaaaggaggttaaggagagtggccgtgagagtgccatccgaaagaagctaaaccttgcacatcccaacacccaccccagggagagttcccgtgtgtgcctggtgtgtgggacgctttcgggagccacattgcactctgacttgcctggggctgttggcagtgtcacatcactgagtttatccaccgccatccacctctatccaccccataaggtccctacagcaagtgggacagcagaccttgtgctccttgctctaaacagtagagaatcgttaatagtggagcccaaaacaggcctcattccctacccttgactggtttagctgtggacatgacccacctctggccggaggagctgagctggtatctgctgggggcttcctgggaaggtttaccattttcatggaaatggttgacattacacatggtatttgtcatgccctagcatggactgtctcatactgctctggactatgtggtaataaaggctttattgtttaagccgcttaaaa

SEQ ID NO: 203095 - DNA, 2187 bp, Homo sapiens
  Payload ID: 20049
  Gene Name: zinc finger protein 584
  ENST ID: ENST00000593920
  CDS Start-End: 531-1661
gaatggaggtcgtggcgtgaggggcgccgagcgaggggaggcgcgggccacgggagttccgggagttccggcgttgcccggcagtccgcagtcctcggcgggaaggctgtcccggcgcctcaggcagctctgcgtgggccggggtgacttcctcgcgatcccctgcgcgaggtgaagggcagggacctttgccgcgccttccacgcgccgtgccccaccggcgagtggctccatcttcctcagacttatcgctcgcggacaggcgccgtgggtctcccgggcctccgtaccgtcctccttcccagcggctccgggaagcggttccctgtcttcggacgcatttcacccgcgcggggagagcttcccgggaaggttccacggcggccgagggtttccgcgcccgggacgcgtttcggctgaggccgtgggtccagtccacgggttctgcccgcacggtccaatggccggggaggcggagggaggagtgggggctccttaatgtgacccagaagggcctataccgggatgtgatgctggagaactttgcactcgttagctcactgggacttgcaccttcgagatcccctgtgtttacccagctggaggatgatgaacagtcgtgggtgcccagctgggtggatgtgactccagtcagcagagcagaagccaggagaggttttggtcttgatggtttgtgtagagtggaggatgagagagcccatcctgagcatctaaagagctacagagtcatccagcaccaggacactcatagtgaggggaaaccaagaaggcacactgagcatggggcagctttcccacctggttccagttgtgggcaacagcaagaagtccatgtggcagagaagctgttcaaatgcagtgactgtgggaaggtgttcttaaaggcctttgccctccttgaccatctgataacgcattctgaagagagacccttcagatgcccaacaggcagaagtgctttcaagaagtcagctcatattaacccccgaaaaattcacactggagaaacagcccatgtgtgtaatgaatgtgggaaggccttcagttacccgtctaagctgaggaaacaccagaaggttcacacaggcataaaaccttttaagtgtagtgactgtggtaaaaccttcaaccgcaaagacgcacttgttctacaccagaggattcacactggagaaaggccttacgagtgcagcaaatgtggtaaaaccttcagtgttctgtctaccctcattcggcaccggaaagtgcacattggagaaaggccctatgagtgtacagaatgtgggaagttctttaaatacaataatagcttcattcttcaccagagagttcacactggagaaaggccttttgaatgcaagcaatgtgggaaaggctacgtgacccgttcaggcctctatcagcactggaaagtccacactggggaacggccctatgaatgtagcctgtgtgggaaaaccttcactaccagatcctaccgcaatcggcaccagcagttccacactgaagagaggtcttatgaatgtacagagtgtgggaaggccttcaaacatagttccaccctccttcagcacaagaaagtccatactccagaaaggcgtcaggaggacagggcacatgggaaggtcgttagctgctagcaccgtgttcatcaggaaaggtcttattccagaaaggaggttaaggagagtggccgtgagagtgccatccgaaagaagctaaaccttgcacatcccaacacccaccccagggagagttcccgtgtgtgcctggtgtgtgggacgctttcgggagccacattgcactctgacttgcctggggctgttggcagtgtcacatcactgagtttatccaccgccatccacctctatccaccccataaggtccctacagcaagtgggacagcagaccttgtgctccttgctctaaacagtagagaatcgttaatagtggagcccaaaacaggcctcattccctacccttgactggtttagctgtggacatgacccacctctggccggaggagctgagctggtatctgctgggggcttcctgggaaggtttaccattttcatggaaatggttgacattacacatggtatttgtcatgccctagcatggactgtctcatactgctctggactatgtggtaataaaggctttatt

SEQ ID NO: 203096 - DNA, 575 bp, Homo sapiens
  Payload ID: 20049
  Gene Name: zinc finger protein 584
  ENST ID: ENST00000596281
  CDS Start-End: 460-558
aatggaggtcgtggcgtgaggggcgccgagcgaggggaggcgcgggccacgggagttccgggagttccggcgttgcccggcagtccgcagtcctcggcgggaaggctgtcccggcgcctcaggcagctctgcgtgggccggggtgacttcctcgcgatcccctgcgcgaggtgaagggcagggacctttgccgcgccttccacgcgccgtgccccaccggcgagtggctccatcttcctcagacttatcgctcgcggacaggcgccgtgggtctcccgggcctccgtaccgtcctccttcccagcggctccgggaagcggttccctgtcttcggacgcatttcacccgcgcggggagagcttcccgggaaggttccacggcggccgagggtttccgcgcccgggacgcgtttcggctgaggccgtgggtccagtccacgggttctgcccgcacggtccaatggccggggaggcggaggacttgcaccttcgagatcccctgtgtttacccagctggaggatgatgaacagtcgtgggtgcccagctgggtggatgtgactccagtcagcagagca

SEQ ID NO: 203097 - DNA, 562 bp, Homo sapiens
  Payload ID: 20049
  Gene Name: zinc finger protein 584
  ENST ID: ENST00000598901
  CDS Start-End: 475-562
gcgaggagagccgggaatggaggtcgtggcgtgaggggcgccgagcgaggggaggcgcgggccacgggagttccgggagttccggcgttgcccggcagtccgcagtcctcggcgggaaggctgtcccggcgcctcaggcagctctgcgtgggccggggtgacttcctcgcgatcccctgcgcgaggtgaagggcagggacctttgccgcgccttccacgcgccgtgccccaccggcgagtggctccatcttcctcagacttatcgctcgcggacaggcgccgtgggtctcccgggcctccgtaccgtcctccttcccagcggctccgggaagcggttccctgtcttcggacgcatttcacccgcgcggggagagcttcccgggaaggttccacggcggccgagggtttccgcgcccgggacgcgtttcggctgaggccgtgggtccagtccacgggttctgcccgcacggtccaatggccggggaggcggaggtgagcagaggatgcctccgaggaatgagggggcccaccaggacttgcaccttcgagatcccctgtgttt

SEQ ID NO: 203098 - DNA, 8618 bp, Homo sapiens
  Payload ID: 20050
  Gene Name: zinc finger protein 585A
  Uniprot ID: Q6P3V2
  ENST ID: ENST00000292841
  CDS Start-End: 260-2569
agcctacaaaggggaggtgctagaagtcggaccggaagtggaagtggtcttccaaggcttttttgccgctggtgtcaggagtattttcatattccaataccgataaatctttgaggtttctgggtgtctctggggagcccctgggccagattttcctctagactccagcccatctcttcagagcagctctgcttgagttcacagatgactgccaagcttcagacaccctacagaaaaagggttgagacccagtgtggccatgccagctaattggacctcacctcagaaatcctcagccctggctccagaggatcatggcagctcctatgagggatcagtgtccttcagggatgtggctatcgatttcagcagagaggaatggcggcacctggacccttctcagagaaacctgtaccgggatgtgatgctggagacctacagccacctgctctcagtaggatatcaagttcctgaagcagaggtggtcatgttggagcaaggaaaggaaccatgggcactgcagggtgagaggccacgtcagagctgcccaggagagaaattatgggaccataatcaatgtagaaaaatcctcagttataaacaagtatcctctcaacctcaaaaaatgtatcctggggagaaagcttatgaatgcgccaaatttgaaaagatattcacccagaagtcacagctcaaagtacacctgaaagttcttgcaggagaaaagctctatgtatgcattgaatgtgggaaggcttttgtacagaagccagaatttattatacaccagaaaacccatatgagagagaaaccctttaaatgcaatgaatgtggaaaatccttttttcaagtgtcgtccctcttcaggcatcagagaattcataccggagagaaactctatgaatgcagccagtgtgggaaaggcttctcttataactcagatctcagtatacatgagaaaattcatactggagagagacaccatgaatgcactgactgtggcaaagcattcacacaaaagtccacactcaagatgcatcagaaaatccatacaggcgagagatcctacatctgtattgaatgcggacaggccttcatccagaagacccatttgattgcacaccgaagaattcatactggagaaaaaccatatgagtgcagtaactgtggcaaatccttcatttccaagtcacaacttcaggtacatcaacgtgttcacacaagagtgaagccctatatatgtaccgaatatgggaaggtcttcagcaataattccaacctcgttacacataagaaagttcaaagtagagagaaatcttccatatgtactgagtgtgggaaggcctttacctacaggtcagagttgattattcatcagagaattcacactggagagaaaccttatgaatgcagtgactgtgggaaagccttcactcagaagtcagcactcacagtgcatcagagaattcatacaggagaaaaatcgtatatatgcatgaaatgtggactggccttcattcagaaggcacacttgattgcacatcaaataattcatactggagagaaacctcataaatgtggtcactgtgggaaattgtttacctccaagtcgcaactccatgttcataaacgaattcacacaggagaaaagccctatatgtgcaataaatgtgggaaggcattcaccaaccggtcaaatctcattacacatcagaaaactcatacaggagagaaatcttatatatgttccaaatgtggaaaggccttcacccagaggtcagacttgattacacatcagagaatccatactggggagaagccttatgaatgcaatacttgtggaaaagccttcactcagaagtcacacctcaatatacatcagaaaattcacactggagagagacagtatgaatgccacgaatgtgggaaagccttcaaccagaaatcaatactcattgttcatcagaaaattcatacaggagagaaaccctatgtatgcactgagtgtggaagagctttcatccgcaagtcaaactttattactcatcaaagaattcatactggagagaagccttatgaatgcagtgactgtgggaagtcctttacctccaagtctcagctcctggtgcatcagccagttcacacaggagagaaaccctatgtgtgtgccgagtgcgggaaggcctttagtggcaggtcaaatctcagtaagcaccagaaaactcataccggagaaaagccctacatttgttctgaatgtgggaagacctttcgacagaagtcagagttgattacacatcacagaattcatactggagagaaaccttatgagtgcagtgactgtgggaagtctttcactaaaaaatcacagctccaagtgcatcagcgaattcacactggagagaagccttacgtgtgtgctgagtgtgggaaggcctttactgacaggtccaatttgaataaacatcagacaacacacactggagacaaaccctacaagtgtggcatctgtgggaaaggcttcgttcagaaatcagtgttcagcgtccatcagagcagccacgcttgagagaaacagtgtgagaaaacccccctgagggttgggtctgattgtacactgttgcacgcatgcagcagaaaaatatgtatattattgtaaatagaaatgaccacagcagaatgtcacacatggctgttctggagagggcctctgagaaggcactgaatgaggcgagggacccttcctacattgtcaccatccccagtaaaccttgggtcattattcatactgacaaggaaccgagtcaatttggtgaataggaaaagccttctcatgaaaactacaatagaatactgttaccaaattcttcctaagaaagatcgtattaagttaacgataatcctgtttactgtggattaggtatagtgccaacaaattgaatgataaaacaacataatacgtagttattttgatagtgatgaatcctaagttatgtgagttgttcgttgtggaacacattgtgtaacagactcctgggtgtttttctttctcattcgaatctaccacagttggtcatatccaaccctcattcagtatttctatcaagaaagagatgctacaaaaaaaaaaagaaaaaacctttatgtatacagacgtaaacctcagaatgtatgttgagtccccactgtcatctaccaagacttgcacccccctcattatctaccatgactgtctctcagcctcacgggccctcagcactttgtgttttgacccccagcaccgtgtcttgtgaactcccatcaccttcaagaaagcttccgaggtaagaattttatggtcatctgggacaacttaaatctcccttctgctgtcatagttcttccaactcagttgcctttttttttttttcgtactcatcactgacttgaagcttagtatctggcttccttaaggatgtaactttcatgtaacagattaataacttatatgaaaaccaacacaaccatatgtttagggctggaaagggccatgacgcctggccatttttcctgttttaccttactcttatgtgtgtcacacttcatcaattccggaaacagtttctggagatctcctcattacctcttttacaatcacctcactccagcatggtgtctgttacctcttcccacttgtgacaatgtctagtaaggtccactctccattctgtgtgatgaccacttattacaaccctcagaataggggacagtggtgtgccccctgcaatacaatggtttctatctcctgatacttttattacacctctagcaggatgtcttgtgatcctccttattgatttttccctcacgatgatgaacaattatctcccgttactcacctagcagtatctaactgtccctaacacagcatgtgggaatgccctcaatacggtggatgctgttaactttcttccttcccctcaggcaatggcggtgacttacaatgaaccataatgtccacatttcccaactgtattttggagcctcttctgtccccttctttctaggaccccagttaaaaaaaaaaaaaacaaaaactagcccaatgtctgttgatgcccattaatcactaacacagtgtctgacccctccattaaattttgatggtatctcttggctccccattgtcccgttaacccaatgtctgctgattcccaatttcccacattgcttcatgcggttccttagtcacccttggctactgtacttcccccaagattgcatctccatgtttgcatggtcatgatccctggaagatggtgatgaggatgaggtcccagcctcatagaccttttcctctgagttccccccaaggcacaatggaatgatggacccagggtgggccagggatgatctggagatctcaggagaccacaagctgggcttcctgtctactacatgagtatggtgtgagcagaacagtgaaagctgtctatgttggttcaaattctggtgccaacactgatccacttagggaccctcagcctgcccagaaacctcctctgggcctcaattttctcacttgtaaaatgggattatgggagaatgaagtgactttttttgggtcacatgatggatgggatccaagccagcagggcccaatgacagcatcctgttaatattagtcatcagtcaacataagcatctgactatcctctgtatgcccaagcctcatgaagggaaacaatttattgtaaatgacttttgattatttctcttatatatttattgtaacaatattataatacttacgtatatgtatatgcatatacccgtatatacggaaggctttattttttagagtagttttaggttcaaagcaaaattgggtagaaattacagaggtttcccatatatcccctaatccacatatgcatagcctcccacattatcagcattcctctcagagtagtatatttgttacaattggtgaacctccactgacactcattaccaccccaagtctataggttatattagggttcatccttggtgtaacaccatagaatgtgtcttgtactttctgcttgttggagcaagtggatcatggcatgtttccactgttatacacagagtagtttcactgccctaaaaatcctctgtgttctgcctgtcatcccttcatctcctctaatcctggcaacattttttctgtctccatagttttacctttgatcttttatatcatatagttgaaattatacagtgtgtagccttttcaaattgacttctttcacttagtaatgtggatttcagtttcctccatgtcttttcatggcttgataatgcatttctttttagagccaaattatgttccatcgtctggatgtttatttattcacctactgaaggactgttggatgcttccttttggcaattatgaggaaagctgttataaatatctgtgcaggctttttgtgtggacataactgaaatatttttaaagttatatttattgaggtataatttacattcagtaatagtcacactttttagtgtagagttctgagttttgacagttgtatctaatcatgcaatcaacaccacaatcaagatgaagaacaggcccctcacttccctaacttctttcctatccctttttagtcccttttcccactcccagcccttggcaatcaccagtctgtttccgtctctatagttctgccttttccataatattgtataagtggagtccttgtgtgtgtgtgtgtgtgtgtgtgtgttttgtacgtgtatgtatatctccttttgagtcggagtgctttcatttaatgtgatgtatctgagattcatccatatggttctatgaaaaacaaatggaaaataaggtgatgaaaagatgctcaacatctttaattatcaggaaaatgtaaatcaaaccacaatgagatactactatagaatggcttttagaatggctaaaaatgaaaacgtgccataaattggcaagaatacagaccaatggaaattttcatgcattgcttgtaggattgtaaaacggtctgtccactatgcacaaaagtttggcagcttcttatactattaaccatacatttatcatatgactcagcaactccacacttaggtatttaccctagatgaaagaaaaattctgtttacatgaaaacctatactcagatgttcacagcaattgtataattgcccaaattaggaagtaacacaaatgtacatcagtggatgagtgattaaacaaattgtgtacaccaatactatggagggctgctcagacataaagaaatgatttattgacacttactacaacatggatgaatctcaaaagtgctgttgtattttaggtaaaccatgtgataacttgaattacatttgataaaagatttataagtgtaaaaactagatttatatattttaattttatatgtgcctgtcattacatactatagaaaattgtgtctacagtatgttatatagcatattgtaatatttattactgtatattccttgtgacaataaaatagtttgtattttatataatagtacctgttttatagtatatgttttattttatatgattacctaattttaatattttacatatcaaactttcacataatattttggttatttctactttcacgtagttgcatttaatgtttgtagtgtaaagatataactacaataaaagaggccagagagtctgcagttggagttagtcaacatttttatttgtcaggcatctcaattctggctgttttaacatcaaggatcttttctctggctttgggcctttgcaccgactgttctgagagtgctctgcttctccagtgcccgtgcatcttgctttcctcttccacctttgcagtgcctccatccccatcttatcctgccattgaagtaacacatctgtagagctcacttgctgctcccttattttgtatgatatttgcattgcaaatactattactatctgacctgattcaatattcctttttttggtttctcatccctcttccccactggaccatcagcctcatgagaaccagactttgtctgtcctgtttctgctgtataccaggcgcccagcacggtgccagctcaaagcagatgctcagtacaagcttgttaaatggatgaatgaataatagcaataatatcgaggttgaccagatgccccgcacagattggtaacatgtgtggggaagttggtggggtgggtttgggtcctctaattcaagatttaatgcctcctcccaccatggtccagcacacccagctctaactccatgtcagggcagtaccaaactgagtatcctacctacatacattccacactgtttacaagatctaacttagcctcctcctggtcacagtggcaggtcacatagagggggaaaggggcaggagtgggggatccataggcagggggccactcccatcagcatctagcctagcactttctatcctgcaccccattgtcagtgtcacctgccccacctcctccactggagcagccactggaaaatatagaaccccaggagcaagaggaatgtggcagggctgagggttctggggctcaggcaccttgttggataatggatgtgatgcagtgtggcagacattgaccccgtggccaaagtcagcttaaagccaaggttgtcatggacacttcccataatgccaggatgaatcacaccctccaccctcagctctcaaatgggctactagtgccaatgtgactattttttatttttattttttttgagatggagtctcactctgttgccaggctggagtgcagtggtgtgatcttggctcactgcaacctctgcctcccgggttcaagtgattctcctgcctcagcctccgagtagctgcgattacaggcacccaccaccacacccagctaattttttgtatttttagtagagatggggtttcaccatgttggccaggatggtctcaatctcctgacctcacgatttgcccacctcggccacccaaagcattgggattacaggcctgagccacctcgcccaacccagtgtgactatttatggtatatcctacacctccccaccacactctactccacattcctcataccgtaccataccgtacaccatgccatagcataccacttacagttttacttaattctataattatattgtttctattaatggttttaaatataatcaacacaattatactttataacaaatatcagaatccttgtcattattatatgcctctaaattattaagatatcataaataacaacatatcaattctgatgctaagaaatcctctgtctctgctagtttctgccaccttcaggtgtttgtattatataaacacagtagtcccacccctgggctgatgttttccaccctctgtgaaatcagcacaattaggttacatccttagtgattttattatggtgttattttaatatttattataacaaggaatgctgctattaaaacaaaaaattgtgctctctgtttacatttgtgaaataggacaatataagaagcacattagtacaatcatttgagttatattaagtttgtgcctataataaatgccaatcctgaaaa

SEQ ID NO: 203099 - DNA, 6822 bp, Homo sapiens
  Payload ID: 20050
  Gene Name: zinc finger protein 585A
  ENST ID: ENST00000356958
  CDS Start-End: 527-2671
agcctacaaaggggaggtgctagaagtcggaccggaagtggaagtggtcttccaaggcttttttgccgctggtgtcaggagtattttcatattccaataccgataaatctttgaggtttctgggtgtctctggggagcccctgggccagattttcctctagactccagcccatctcttcagagcagctctgcttgagttcacagatgactgccaagcttcagacaccctacagaaaaagggttgagacccagtgtggccatgccagctaattggacctcacctcagaaatcctcagccctggctccagaggatcatggcagctcctatgagtgttaaccttgatgcctgaaagaactggaaattatgaagatagattcagaagtcaaatatgttaactaactgcattgaagagtagaagaaaacaatagcctaggatcagtgtccttcagggatgtggctatcgatttcagcagagaggaatggcggcacctggacccttctcagagaaacctgtaccgggatgtgatgctggagacctacagccacctgctctcagtaggatatcaagttcctgaagcagaggtggtcatgttggagcaaggaaaggaaccatgggcactgcagggtgagaggccacgtcagagctgcccaggagagaaattatgggaccataatcaatgtagaaaaatcctcagttataaacaagtatcctctcaacctcaaaaaatgtatcctggggagaaagcttatgaatgcgccaaatttgaaaagatattcacccagaagtcacagctcaaagtacacctgaaagttcttgcaggagaaaagctctatgtatgcattgaatgtgggaaggcttttgtacagaagccagaatttattatacaccagaaaacccatatgagagagaaaccctttaaatgcaatgaatgtggaaaatccttttttcaagtgtcgtccctcttcaggcatcagagaattcataccggagagaaactctatgaatgcagccagtgtgggaaaggcttctcttataactcagatctcagtatacatgagaaaattcatactggagagagacaccatgaatgcactgactgtggcaaagcattcacacaaaagtccacactcaagatgcatcagaaaatccatacaggcgagagatcctacatctgtattgaatgcggacaggccttcatccagaagacccatttgattgcacaccgaagaattcatactggagaaaaaccatatgagtgcagtaactgtggcaaatccttcatttccaagtcacaacttcaggtacatcaacgtgttcacacaagagtgaagccctatatatgtaccgaatatgggaaggtcttcagcaataattccaacctcgttacacataagaaagttcaaagtagagagaaatcttccatatgtactgagtgtgggaaggcctttacctacaggtcagagttgattattcatcagagaattcacactggagagaaaccttatgaatgcagtgactgtgggaaagccttcactcagaagtcagcactcacagtgcatcagagaattcatacaggagaaaaatcgtatatatgcatgaaatgtggactggccttcattcagaaggcacacttgattgcacatcaaataattcatactggagagaaacctcataaatgtggtcactgtgggaaattgtttacctccaagtcgcaactccatgttcataaacgaattcacacaggagaaaagccctatatgtgcaataaatgtgggaaggcattcaccaaccggtcaaatctcattacacatcagaaaactcatacaggagagaaatcttatatatgttccaaatgtggaaaggccttcacccagaggtcagacttgattacacatcagagaatccatactggggagaagccttatgaatgcaatacttgtggaaaagccttcactcagaagtcacacctcaatatacatcagaaaattcacactggagagagacagtatgaatgccacgaatgtgggaaagccttcaaccagaaatcaatactcattgttcatcagaaaattcatacaggagagaaaccctatgtatgcactgagtgtggaagagctttcatccgcaagtcaaactttattactcatcaaagaattcatactggagagaagccttatgaatgcagtgactgtgggaagtcctttacctccaagtctcagctcctggtgcatcagccagttcacacaggagagaaaccctatgtgtgtgccgagtgcgggaaggcctttagtggcaggtcaaatctcagtaagcaccagaaaactcataccggagaaaagccctacatttgttctgaatgtgggaagacctttcgacagaagtcagagttgattacacatcacagaattcatactggagagaaaccttatgagtgcagtgactgtgggaagtctttcactaaaaaatcacagctccaagtgcatcagcgaattcacactggagagaagccttacgtgtgtgctgagtgtgggaaggcctttactgacaggtccaatttgaataaacatcagacaacacacactggagacaaaccctacaagtgtggcatctgtgggaaaggcttcgttcagaaatcagtgttcagcgtccatcagagcagccacgcttgagagaaacagtgtgagaaaacccccctgagggttgggtctgattgtacactgttgcacgcatgcagcagaaaaatatgtatattattgtaaatagaaatgaccacagcagaatgtcacacatggctgttctggagagggcctctgagaaggcactgaatgaggcgagggacccttcctacattgtcaccatccccagtaaaccttgggtcattattcatactgacaaggaaccgagtcaatttggtgaataggaaaagccttctcatgaaaactacaatagaatactgttaccaaattcttcctaagaaagatcgtattaagttaacgataatcctgtttactgtggattaggtatagtgccaacaaattgaatgataaaacaacataatacgtagttattttgatagtgatgaatcctaagttatgtgagttgttcgttgtggaacacattgtgtaacagactcctgggtgtttttctttctcattcgaatctaccacagttggtcatatccaaccctcattcagtatttctatcaagaaagagatgctacaaaaaaaaaaagaaaaaacctttatgtatacagacgtaaacctcagaatgtatgttgagtccccactgtcatctaccaagacttgcacccccctcattatctaccatgactgtctctcagcctcacgggccctcagcactttgtgttttgacccccagcaccgtgtcttgtgaactcccatcaccttcaagaaagcttccgaggtaagaattttatggtcatctgggacaacttaaatctcccttctgctgtcatagttcttccaactcagttgcctttttttttttttcgtactcatcactgacttgaagcttagtatctggcttccttaaggatgtaactttcatgtaacagattaataacttatatgaaaaccaacacaaccatatgtttagggctggaaagggccatgacgcctggccatttttcctgttttaccttactcttatgtgtgtcacacttcatcaattccggaaacagtttctggagatctcctcattacctcttttacaatcacctcactccagcatggtgtctgttacctcttcccacttgtgacaatgtctagtaaggtccactctccattctgtgtgatgaccacttattacaaccctcagaataggggacagtggtgtgccccctgcaatacaatggtttctatctcctgatacttttattacacctctagcaggatgtcttgtgatcctccttattgatttttccctcacgatgatgaacaattatctcccgttactcacctagcagtatctaactgtccctaacacagcatgtgggaatgccctcaatacggtggatgctgttaactttcttccttcccctcaggcaatggcggtgacttacaatgaaccataatgtccacatttcccaactgtattttggagcctcttctgtccccttctttctaggaccccagttaaaaaaaaaaaaaacaaaaactagcccaatgtctgttgatgcccattaatcactaacacagtgtctgacccctccattaaattttgatggtatctcttggctccccattgtcccgttaacccaatgtctgctgattcccaatttcccacattgcttcatgcggttccttagtcacccttggctactgtacttcccccaagattgcatctccatgtttgcatggtcatgatccctggaagatggtgatgaggatgaggtcccagcctcatagaccttttcctctgagttccccccaaggcacaatggaatgatggacccagggtgggccagggatgatctggagatctcaggagaccacaagctgggcttcctgtctactacatgagtatggtgtgagcagaacagtgaaagctgtctatgttggttcaaattctggtgccaacactgatccacttagggaccctcagcctgcccagaaacctcctctgggcctcaattttctcacttgtaaaatgggattatgggagaatgaagtgactttttttgggtcacatgatggatgggatccaagccagcagggcccaatgacagcatcctgttaatattagtcatcagtcaacataagcatctgactatcctctgtatgcccaagcctcatgaagggaaacaatttattgtaaatgacttttgattatttctcttatatatttattgtaacaatattataatacttacgtatatgtatatgcatatacccgtatatacggaaggctttattttttagagtagttttaggttcaaagcaaaattgggtagaaattacagaggtttcccatatatcccctaatccacatatgcatagcctcccacattatcagcattcctctcagagtagtatatttgttacaattggtgaacctccactgacactcattaccaccccaagtctataggttatattagggttcatccttggtgtaacaccatagaatgtgtcttgtactttctgcttgttggagcaagtggatcatggcatgtttccactgttatacacagagtagtttcactgccctaaaaatcctctgtgttctgcctgtcatcccttcatctcctctaatcctggcaacattttttctgtctccatagttttacctttgatcttttatatcatatagttgaaattatacagtgtgtagccttttcaaattgacttctttcacttagtaatgtggatttcagtttcctccatgtcttttcatggcttgataatgcatttctttttagagccaaattatgttccatcgtctggatgtttatttattcacctactgaaggactgttggatgcttccttttggcaattatgaggaaagctgttataaatatctgtgcaggctttttgtgtggacataactgaaatatttttaaagttatatttattgaggtataatttacattcagtaatagtcacactttttagtgtagagttctgagttttgacagttgtatctaatcatgcaatcaacaccacaatcaagatgaagaacaggcccctcacttccctaacttctttcctatccctttttagtcccttttcccactcccagcccttggcaatcaccagtctgtttccgtctctatagttctgccttttccataatattgtataagtggagtccttgtgtgtgtgtgtgtgtgtgtgtgtgttttgtacgtgtatgtatatctccttttgagtcggagtgctttcatttaatgtgatgtatctgagattcatccatatggttctatgaaaaacaaatggaaaataaggtgatgaaaagatgctcaacatctttaattatcaggaaaatgtaaatcaaaccacaatgagatactactatagaatggcttttagaatggctaaaaatgaaaacgtgccataaattggcaagaatacagaccaatggaaattttcatgcattgcttgtaggattgtaaaacggtctgtccactatgcacaaaagtttggcagcttcttatactattaaccatacatttatcatatgactcagcaactccacacttaggtatttaccctagatgaaagaaaaattctgtttacatgaaaacctatactcagatgttcacagcaattgtataattgcccaaattaggaagtaacacaaatgtacatcagtggatgagtgattaaacaaattgtgtacaccaatactatggagggctgctcagacataaagaaatgatttattgacacttactacaacatggatgaatctcaaaagtgctgttgtattttaggtaaaccatgtgataacttgaattacatttgataaaagatttataagtgtaaaaactagatttatatattttaattttatatgtgcctgtcattacatactatagaaaattgtgtctacagtatgttatatagcatattgtaatatttattactgtatattccttgtgacaataaaatagtttgtattttatataatagtacctgttttatagtatatgttttattttatatgattacctaattttaatattttacatatcaaactttcacataatattttggttatttctactttcacgtagttgcatttaatgtttgtagtgtaaagatataactacaataaaagaggccagagagtctgca

SEQ ID NO: 203100 - DNA, 3190 bp, Homo sapiens
  Payload ID: 20050
  Gene Name: zinc finger protein 585A
  ENST ID: ENST00000392157
  CDS Start-End: 467-2611
agtgatgggagtctgtggtcagtgacagagcctgtagggtcagttatggtgatcggtttctgggtgtctctggggagcccctgggccagattttcctctagactccagcccatctcttcagagcagctctgcttgagttcacagatgactgccaagcttcagacaccctacagaaaaagggttgagacccagtgtggccatgccagctaattggacctcacctcagaaatcctcagccctggctccagaggatcatggcagctcctatgagtgttaaccttgatgcctgaaagaactggaaattatgaagatagattcagaagtcaaatatgttaactaactgcattgaagagtagaagaaaacaatagcctaggatcagtgtccttcagggatgtggctatcgatttcagcagagaggaatggcggcacctggacccttctcagagaaacctgtaccgggatgtgatgctggagacctacagccacctgctctcagtaggatatcaagttcctgaagcagaggtggtcatgttggagcaaggaaaggaaccatgggcactgcagggtgagaggccacgtcagagctgcccaggagagaaattatgggaccataatcaatgtagaaaaatcctcagttataaacaagtatcctctcaacctcaaaaaatgtatcctggggagaaagcttatgaatgcgccaaatttgaaaagatattcacccagaagtcacagctcaaagtacacctgaaagttcttgcaggagaaaagctctatgtatgcattgaatgtgggaaggcttttgtacagaagccagaatttattatacaccagaaaacccatatgagagagaaaccctttaaatgcaatgaatgtggaaaatccttttttcaagtgtcgtccctcttcaggcatcagagaattcataccggagagaaactctatgaatgcagccagtgtgggaaaggcttctcttataactcagatctcagtatacatgagaaaattcatactggagagagacaccatgaatgcactgactgtggcaaagcattcacacaaaagtccacactcaagatgcatcagaaaatccatacaggcgagagatcctacatctgtattgaatgcggacaggccttcatccagaagacccatttgattgcacaccgaagaattcatactggagaaaaaccatatgagtgcagtaactgtggcaaatccttcatttccaagtcacaacttcaggtacatcaacgtgttcacacaagagtgaagccctatatatgtaccgaatatgggaaggtcttcagcaataattccaacctcgttacacataagaaagttcaaagtagagagaaatcttccatatgtactgagtgtgggaaggcctttacctacaggtcagagttgattattcatcagagaattcacactggagagaaaccttatgaatgcagtgactgtgggaaagccttcactcagaagtcagcactcacagtgcatcagagaattcatacaggagaaaaatcgtatatatgcatgaaatgtggactggccttcattcagaaggcacacttgattgcacatcaaataattcatactggagagaaacctcataaatgtggtcactgtgggaaattgtttacctccaagtcgcaactccatgttcataaacgaattcacacaggagaaaagccctatatgtgcaataaatgtgggaaggcattcaccaaccggtcaaatctcattacacatcagaaaactcatacaggagagaaatcttatatatgttccaaatgtggaaaggccttcacccagaggtcagacttgattacacatcagagaatccatactggggagaagccttatgaatgcaatacttgtggaaaagccttcactcagaagtcacacctcaatatacatcagaaaattcacactggagagagacagtatgaatgccacgaatgtgggaaagccttcaaccagaaatcaatactcattgttcatcagaaaattcatacaggagagaaaccctatgtatgcactgagtgtggaagagctttcatccgcaagtcaaactttattactcatcaaagaattcatactggagagaagccttatgaatgcagtgactgtgggaagtcctttacctccaagtctcagctcctggtgcatcagccagttcacacaggagagaaaccctatgtgtgtgccgagtgcgggaaggcctttagtggcaggtcaaatctcagtaagcaccagaaaactcataccggagaaaagccctacatttgttctgaatgtgggaagacctttcgacagaagtcagagttgattacacatcacagaattcatactggagagaaaccttatgagtgcagtgactgtgggaagtctttcactaaaaaatcacagctccaagtgcatcagcgaattcacactggagagaagccttacgtgtgtgctgagtgtgggaaggcctttactgacaggtccaatttgaataaacatcagacaacacacactggagacaaaccctacaagtgtggcatctgtgggaaaggcttcgttcagaaatcagtgttcagcgtccatcagagcagccacgcttgagagaaacagtgtgagaaaacccccctgagggttgggtctgattgtacactgttgcacgcatgcagcagaaaaatatgtatattattgtaaatagaaatgaccacagcagaatgtcacacatggctgttctggagagggcctctgagaaggcactgaatgaggcgagggacccttcctacattgtcaccatccccagtaaaccttgggtcattattcatactgacaaggaaccgagtcaatttggtgaataggaaaagccttctcatgaaaactacaatagaatactgttaccaaattcttcctaagaaagatcgtattaagttaacgataatcctgtttactgtggattaggtatagtgccaacaaattgaatgataaaacaacataatacgtagttattttgatagtgatgaatcctaagttatgtgagttgttcgttgtggaacacattgtgtaacagactcctgggtgtttttctttctcattcgaatctaccacagttggtcatatccaaccctcattcagtatttctatcaagaaagagatgctacaaaaaaaaaaagaaaaaacctttatgta

SEQ ID NO: 203101 - DNA, 596 bp, Homo sapiens
  Payload ID: 20050
  Gene Name: zinc finger protein 585A
  ENST ID: ENST00000588354
  CDS Start-End: 213-290
tcttccaaggcttttttgccgctggtgtcaggagtattttcatattccaataccgataaatctttgaggtttctgggtgtctctggggagcccctgggccagattttcctctagactccagcccatctcttcagagcagctctgcttgagttcacagatgactgccaagcttcagacaccctacagaaaaagggttgagacccagtgtggccatgccagctaattggacctcacctcagaaatcctcagccctggctccagaggatcatggcagctcctatgagtgttaaccttgatgcctgaaagaactggaaattatgaagatagattcagaagtcaaatatgttaactaactgcattgaagagtagaagaaaacaatagcctagtaggtttttactgggattagtgaaacaactgctatgttctcagcaacccactccaaagccaaagtcaaaactaaaattgtaaaatatctcaaaaacaataaaaatggtatatatatatcagaagctctggtatatagcaaaactgtactaaaaataatttagaaaaataatttatctcatgcaaatgaataaaaaaatctaaatgaaaa

SEQ ID NO: 203102 - DNA, 2316 bp, Homo sapiens
  Payload ID: 20050
  Gene Name: zinc finger protein 585A
  ENST ID: ENST00000587817
  CDS Start-End: 245-586
ggtgctagaagtcggaccggaagtggaagtggtcttccaaggcttttttgccgctggtgtcaggagtattttcatattccaataccgataaatctttgaggtttctgggtgtctctggggagcccctgggccagattttcctctagactccagcccatctcttcagagcagctctgcttgagttcacagatgactgccaagcttcagacaccctacagaaaaagggttgagacccagtgtggccatgccagctaattggacctcacctcagaaatcctcagccctggctccagaggatcatggcagctcctatgagggatcagtgtccttcagggatgtggctatcgatttcagcagagaggaatggcggcacctggacccttctcagagaaacctgtaccgggatgtgatgctggagacctacagccacctgctctcagtaggatatcaagttcctgaagcagaggtggtcatgttggagcaaggaaaggaaccatgggcactgcagggtgagaggccacgtcagagctgcccagcaccgtgtcttgtgaactcccatcaccttcaagaaagcttccgagggtgaaggtacgctcgagcgtggtcaatgaggacaagtcaacgagagattcctgagtacgtctatggtcaccctttgcggtaaacttgtgcgctcagaagaagccagggtaacaatgggacaaactaaaaaaacgagagacaaattaattgactgttacacatttctgcaagcagaggttgccaacgcaggactggcaatagcatctgaaatcagactactactcctgcagaacaacatcttactggtaaaaaaaagaatagcccacatgaaggaaaactgatttggtggaaagacaacaacaataagacatgggaaatagggaaggtggtaacgtggaggagaggttttgcttgtgtttcaccaggagaaaatcagcttcctgtttggataccaactagacatttgaagttctacaatgaacctgtcggagatgcaaagaaaagcacctccacggagacagaaacactgcaatcaagcaccatcaactcacaagataaaatggtgatgtcagaagaatagatgaagttgccattcaccaagaaggcagagccgccgacttgggcacaattaaagaagctgacacagttagctaaaaaaggccttgagaacacaaaggtgacacaaactccagagagtatgctgcttgcagctttgatgattgtatcaatggtgcaccgtattctgctagtgagagcaagggaaggcgtgtggatccctgtgtccatggaccgacagtgggaggcctcgccatccatccatattttgactgaatctgcaggtgtacccaacagctccaaagagacagcgaccatcgagaacgggccatgatgacgatggcggttttgtccaaaagaaaagggggaaatgggaaaagagagatcagactgttaccgtgtctatgcagaaataagtagacataagagactccgttttgttctgtaccaagaaaattcttctgccttgagatgctgttaatctgtaaccctagccccaaccctgtgctcacagagacatgtgctgtgttgactcaaggtttaatggatttaccaaagggctatgcaggatgtactttgttaaaaaaaagtgcttgaaggcagtatgcttgttaaaagtcatcaccattctctaatctcaagtacccaggacacaatacactgtggaaggccacagggacctctgcctgggaaagccaggtattgcccaagatttctccccatgtgatagcctgagatatggcctcatgggaagggtaagacctgactgtcccccagcccgacatcccccagcccgacacccgaaaagggtctgtgctgaggaggattagtaaaagaggaaggcctctttgcagttcagataagaggaagtcatctgtctcctgctcgtccctgggcaatagaatgtctcagtgtaaaacccaattgtatgttctatttactgagataggagaaaaccaccttagggctggaggagagacatgctagtggtaatactgctctttaatgcaccgagatgtttgtacacgtgcacatcaaggcacagcaccttttcttaaccttgtttacgacacagagacttttgtttacatgttttcccgctgaccctctccccactattaccctattgtcctgccacatccccctctccgagatggtagagataatgatcaataaatactgagggaactcagagaccagtaagcaccggtcccctgggcccacttttctttctccaca

SEQ ID NO: 203103 - DNA, 600 bp, Homo sapiens
  Payload ID: 20051
  Gene Name: zinc finger protein 585B
  ENST ID: ENST00000392156
  CDS Start-End: 235-405
ggtgctagaagtcggaccggaagtggaagtggtccccgaaggctatttcgccgctggcgtcaggactattttcacgttttaatgccgagaggttcttgggtgtctctggggagtccctgggccagaccttcctccagactccagcccacctcttcggagcagctctgctgagttcacagatgaccactaaacttcaggcaccctagacaaaaagggttgagatccagtgtggccatgccagctagttggacctcaccccagaaatcctcagccctggctccagaggatcatggcagctcctatgaggtatataggtaccattttcaaagaaatgatgttctgagccctataagcacaatcaatatgcatcacaagagacaaactgtaatctctgaatgcagttaaatgaagaaatcaacaagggatcagtgtccttcagggatgtggctatcgatttcagcagagaggaatggcggcacctggacctttctcagagaaacctgtaccgggatgtgatgctggagacctacagccacctgctctcagtagggtatcaagttcctaaaccagaggtggtcatgttggagcaaggaaaggaac

SEQ ID NO: 203104 - DNA, 6210 bp, Homo sapiens
  Payload ID: 20051
  Gene Name: zinc finger protein 585B
  Uniprot ID: Q52M93
  ENST ID: ENST00000532828
  CDS Start-End: 253-2562
ggtgctagaagtcggaccggaagtggaagtggtccccgaaggctatttcgccgctggcgtcaggactattttcacgttttaatgccgagaggtctctgtgacgattttggttcttgggtgtctctggggagtccctgggccagaccttcctccagactccagcccacctcttcggagcagctctgctgagttcacagatgaccactaaacttcaggcaccctagacaaaaagggttgagatccagtgtggccatgccagctagttggacctcaccccagaaatcctcagccctggctccagaggatcatggcagctcctatgagggatcagtgtccttcagggatgtggctatcgatttcagcagagaggaatggcggcacctggacctttctcagagaaacctgtaccgggatgtgatgctggagacctacagccacctgctctcagtagggtatcaagttcctaaaccagaggtggtcatgttggagcaaggaaaggaaccatgggcactgcagggtgagaggccacgtcacagctgcccaggagagaaattatgggaccataatcaacatagaaaaatcatcggttataaaccagcttcctctcaagatcaaaaaatttattctggggaaaaatcctatgagtgtgctgaatttggaaagagcttcacctggaagtcacagttcaaggtacatctgaaagttcctacaggagaaaaactctatgtatgtattgaatgtgggagggcttttgtacagaagccagaattcatcacacatcagaaaacccatatgagagagaagccctataagtgcaatgaatgtggaaaatccttttttcaagtatcgtctcttttcaggcatcacagaattcataccggagaaaaactatatgaatgtagtgaatgtgggaaaggtttcccttataactcagatctcagtatacatgagaaaattcatactggagagagacaccatgaatgcactgactgtggcaaagcgttcacacaaaagtccacactcaagattcatcagaaaatccatacaggcgagagatcctacatctgtattgaatgcgggcaggccttcatccagaaaacacaattgattgcacaccgaagaattcatagtggagaaaaaccatatgaatgcaataactgtggcaaatccttcatttccaagtcacaacttcaggtacatcaacgtgttcacacaagagtgaagccctatatatgtaccgaatatgggaaggtcttcagcaataattccaacctcattacacatgagaagattcaaagtagagagaaatcttccatatgtactgagtgtgggaaggcctttacctacaggtcagagttgattattcatcagagaattcacactggagagaaaccttatgaatgcagtgactgtgggagagccttcactcagaagtcagcactcacagtgcatcagagaattcatacaggagaaaaatcgtatatatgcatgaaatgtggactggccttcatccggaaggcacacttgattacacatcaaataattcatactggagagaaaccttataaatgtggtcactgtgggaaattgtttacttccaagtcacaactccatgttcataaacgaattcacacaggagaaaagccctatgtatgcaataaatgtgggaaggcattcaccaaccggtcaaatctcattacacatcagaaaactcatacaggagagaaatcttatatatgttccaaatgtggaaaggccttcacccagaggtcagacttgattacacatcagagaatccatactggggagaagccttatgaatgcaatacttgtggaaaagcctttactcagaagtcaaatcttaatatacatcagaaaattcacactggagagagacagtatgaatgccacgaatgtgggaaagccttcaaccagaaatcaatactcattgttcatcagaaaattcatacaggagagaaaccctatgtatgcactgagtgtggaagagctttcatccgcaagtcaaactttattactcatcaaagaattcatactggagagaagccttatgaatgcagtgactgtgggaagtcctttacctccaagtctcagctcctggtgcatcagccagttcacacaggagagaaaccctatgtgtgtgccgagtgtgggaaagcctttagtggcaggtcaaatctcagtaagcaccagaaaactcataccggagaaaagccctacatttgttctgaatgtgggaagacctttcgacagaagtcagagttgattacacatcacagaattcatactggagagaaaccttatgagtgcagtgactgtgggaagtctttcactaaaaaatcacagctccaagtgcatcagcgaattcacactggagagaagccttacgtgtgtgctgagtgtgggaaggcctttagcaacaggtccaatttgaataaacatcagacaacacacactggagacaaaccctacaagtgtggcatctgtgggaaaggcttcgttcagaaatcagtgttcagtgttcatcagagcagccacgcttgagagaaacagtgtgagaaaacccccctgagggttgggtctgattgtacactgttgcacgcatgcagcagaaaaatatgtatattattgtaaatagaaatgaccacatcagaatgtcacacatggctgttctggagagggcctctgagaaggcactgaatgaggcgagggacccttcctacattgtcaccatccccagtaaaccttgggtcattattcatactgacaaggaaccgagtcaatttggtgaataggaaaagccttctcatgaaaactacaatagaatactgttaccaaattcttcataagaaagatcatattatgggaatgataatcctgtttactgtggattaggtatagtgccaacagtttgaatggtaagacaacataatatatatgatagtgatgaatccttctgtgagttgtttgttccagaacacactgtctagtagaattgtgggtattttcttcttttgaatcgaacacagttgtgcatatccaattccccattgagtatttctatcaagcaagagatactgcaataagacaaactccctgtgtattcagacacagacctcagagcgtatgttgagtccccattgtcatagaaaaagacttacagtccccttcattatctgccaggactctctctgagccccacaggttctcagcacattgtgtttgacacccagcacagtgttttttctttttctttctttctttctctttctttctttctttctttctttctttctttctttctttctttctttctttctttctttccttctttctttctttttctttctttctctttctttctttctttctttctttctttctttctttctttctttctttctttctttctttttttgagacagagtcttgctctgtcgggcaagctagagtgcagtggcgctatcttggctcactgcaacctccgtctcccgggctcaagcaattctcctgcctcagcctcctgagtagctgggattgcgtgtgccaccacgcccagctaatttttgtatgtttagtagaaacgggggtttcaccatgctggccaggctggtctcgaactcctgacctcatgatccgcccgcctcggcctcccaaagtcctgggattacggacgtgagccactgcgcccggcccagcacagtgttttgtacactcccaccaccctcaagaaagcctttgaggttaggattttcaggtcatctgggagaacttaaattcttccttctgctattacaattcttctcactcagttgcctgcctcttttttttttttaatttacttgtgactgagttgaagcccagcattttactttccttaatgatctgactttcataagttgataagtcatgaaatcattatcttacattatatgagatatgagataaatcataaatcatatgaaattgataactcatatgaaaaccaaccccaccatatgttcactgtctacttgtgtccatcttcgtcccacgcaccccacaaggaccttccccgccatgtgcctcaaacatcagttcctgactcagggcctttgtatttgcagtgcccgttgcaaagagcacaattctttattttatctgtggcttgtccgtcatgtctttttttccatgacacctccacacaggccttccctgcctgcctggtttaaaattccagccccttacccttcctcctttattcttctccctagcaatttccaccatgctgcctggtgtattttcctcatttctctgtggcttctacactagaaaatatttcccttttgttcaccactatgagtctagacccatgactgccatacagcaggcattccataaatgcacctgtggagagttgacccatgcttgttgcgtgacttctgtctgatttttttctgtgttgcagcataagaagcgctaatagggagaaccaacttggctaaaacacaccaggctttttcacctctagtctgtacctgggctgtatcccttctcaaccctaaagctaaaaagtcattgtgaaccttttggtctgatgctaaagaagggaaaacaggtacaggaaatcccatgtggatgcttgcttccaggatttcctgccatgattccagaatcccacagctccaacatgattgcaaaagactccctgctcatttttcctcagcatgcacagcgctgtcctgtctcagttgcaactcgacagagccgcatttactccagaacccaatccacacacctgctcatcctgccccgagaggagtgcctgaagccaatagcagggaactagagcagacttgggtggatcttcattggatattaggtatcttgccctagataggcagcagtggccttacagatgctgacagatgatctgattagatgcacagttgctgggtggcgtctggggccagtctattggcagttctgggagtgggaactatttgggctctgcaaagatggtttcacctttaagaagggcagtatggggaggtgaagatggggcccaaaggatagaacatagtcaaagaagcagggccacaatgcccctttaattcccaagccctagttgggcagtgcttggtgacacatcccattacctcaccttagatcaatgtctactgagccatcattagctctgcttcctcacttcttcacagtatctgatggcccatcacatgctgctcaacatcttagaccaatgtctgctcacccattacctcccttcacctcatccagcactgtatctgaagcttcactattcttccttcagttttggatattttgtgatacaacattatccccaacttaggacaatgtcagctgactctcaggagggtgcctggagatcacctcttccttcctaacataccctagaacaaggtctggtccccttcattattcccattttaccttactcctaagtgtatcactcctcatgaattccaggaaatatggaggaaaacacatttcactgtacatgactttcaataatttctcctttatatttattgtaacgtgatattttagtgctgacatatatatgtatatgtatgcccatttatataaaagactagtttttagagaaattttaggttcacagcaaaatggggcagaaggtacagagatttcccatatatcccctaccctcacatatacacagcctcccccatcatcaacatcccccttcagagtggtacatttgttacaattgatgaaactacattgacactatcggccaaagtccatggtttaattagggttcagtcttgatgtgcattctgtgggttgagacaaatgaataatgacatgtatgcattattacagaaggataaagagccgtttcactgtcccaataatcctctgtgtttcgcctactcctctaaactcctggctattttcttttgtctccataattttgcctctgaaccataaagtatgcagccttttcagattgatttgtttcacttagtaatgtggatttaagtttcttccatgtcttttcgtagcttgctagctcttttttttttttttttctcattgaataatatgctattgtctggaagtaccatgacttatttatccattcacctactgaaggacaccttaattgcttccaagttttgttgattatgaataaagatgctataaaca

SEQ ID NO: 203105 - DNA, 572 bp, Homo sapiens
  Payload ID: 20051
  Gene Name: zinc finger protein 585B
  ENST ID: ENST00000526705
  CDS Start-End: 209-316
atttcgccgctggcgtcaggactattttcacgttttaatgccgagaggtctctgtgacgattttggttcttgggtgtctctggggagtccctgggccagaccttcctccagactccagcccacctcttcggagcagctctgctgagttcacagatgaccactaaacttcaggcaccctagacaaaaagggttgagatccagtgtggccatgccagctagttggacctcaccccagaaatcctcagccctggctccagaggatcatggcagctcctatgaggctggagtgctgtggtgcaatcacggctcactgtagcctggacttcccaggttcaatcgatccccccaccttagcctgccgagtagctgggactacaggtatataggtaccattttcaaagaaatgatgttctgagccctataagcacaatcaatatgcatcacaagagacaaactgtaatctctgaatgcagttaaatgaagaaatcaacaagggatcagtgtccttcagggatgtggctatcgatttcagcagagaggaatggcggcacctggacctttctcagagaaac

SEQ ID NO: 203106 - DNA, 2732 bp, Homo sapiens
  Payload ID: 20051
  Gene Name: zinc finger protein 585B
  ENST ID: ENST00000527838
  CDS Start-End: 188-661
ctattttcacgttttaatgccgagaggtctctgtgacgattttggttcttgggtgtctctggggagtccctgggccagaccttcctccagactccagcccacctcttcggagcagctctgctgagttcacagatgaccactaaacttcaggcaccctagacaaaaagggttgagatccagtgtggccatgccagctagttggacctcaccccagaaatcctcagccctggctccagaggatcatggcagctcctatgagggatcagtgtccttcagggatgtggctatcgatttcagcagagaggaatggcggcacctggacctttctcagagaaacctgtaccgggatgtgatgctggagacctacagccacctgctctcagtagggtatcaagttcctaaaccagaggtggtcatgttggagcaaggaaaggaaccatgggcactgcagggtgagaggccacgtcacagctgcccaggagagaaattatgggaccataatcaacatagaaaaatcatcggttataaaccagcttcctctcaagatcaaaaaatttattctggggaaaaatcctatgagtgtgctgaatttggaaagagcttcacctggaagtcacagttcaaggcatcacagaattcataccggagaaaaactatatgaatgtagtgaatgtgggaaaggtttcccttataactcagatctcagtatacatgagaaaattcatactggagagagacaccatgaatgcactgactgtggcaaagcgttcacacaaaagtccacactcaagattcatcagaaaatccatacaggcgagagatcctacatctgtattgaatgcgggcaggccttcatccagaaaacacaattgattgcacaccgaagaattcatagtggagaaaaaccatatgaatgcaataactgtggcaaatccttcatttccaagtcacaacttcaggtacatcaacgtgttcacacaagagtgaagccctatatatgtaccgaatatgggaaggtcttcagcaataattccaacctcattacacatgagaagattcaaagtagagagaaatcttccatatgtactgagtgtgggaaggcctttacctacaggtcagagttgattattcatcagagaattcacactggagagaaaccttatgaatgcagtgactgtgggagagccttcactcagaagtcagcactcacagtgcatcagagaattcatacaggagaaaaatcgtatatatgcatgaaatgtggactggccttcatccggaaggcacacttgattacacatcaaataattcatactggagagaaaccttataaatgtggtcactgtgggaaattgtttacttccaagtcacaactccatgttcataaacgaattcacacaggagaaaagccctatgtatgcaataaatgtgggaaggcattcaccaaccggtcaaatctcattacacatcagaaaactcatacaggagagaaatcttatatatgttccaaatgtggaaaggccttcacccagaggtcagacttgattacacatcagagaatccatactggggagaagccttatgaatgcaatacttgtggaaaagcctttactcagaagtcaaatcttaatatacatcagaaaattcacactggagagagacagtatgaatgccacgaatgtgggaaagccttcaaccagaaatcaatactcattgttcatcagaaaattcatacaggagagaaaccctatgtatgcactgagtgtggaagagctttcatccgcaagtcaaactttattactcatcaaagaattcatactggagagaagccttatgaatgcagtgactgtgggaagtcctttacctccaagtctcagctcctggtgcatcagccagttcacacaggagagaaaccctatgtgtgtgccgagtgtgggaaagcctttagtggcaggtcaaatctcagtaagcaccagaaaactcataccggagaaaagccctacatttgttctgaatgtgggaagacctttcgacagaagtcagagttgattacacatcacagaattcatactggagagaaaccttatgagtgcagtgactgtgggaagtctttcactaaaaaatcacagctccaagtgcatcagcgaattcacactggagagaagccttacgtgtgtgctgagtgtgggaaggcctttagcaacaggtccaatttgaataaacatcagacaacacacactggagacaaaccctacaagtgtggcatctgtgggaaaggcttcgttcagaaatcagtgttcagtgttcatcagagcagccacgcttgagagaaacagtgtgagaaaacccccctgagggttgggtctgattgtacactgttgcacgcatgcagcagaaaaatatgtatattattgtaaatagaaatgaccacatcagaatgtcacacatggctgttctggagagggcctctgagaaggcactgaatgaggcgagggacccttcctacattgtcaccatccccagtaaaccttgggtcattattcatactgacaaggaaccgagtcaatttggtgaataggaaaagccttctcatgaaaactacaatagaatactgttaccaaattcttcataagaaagatcatattatgggaatgataatcctgtttactgtggattaggtatagtgccaacagtttgaatggtaagacaacataatatatatgatagtgatg

SEQ ID NO: 203107 - DNA, 2971 bp, Homo sapiens
  Payload ID: 20051
  Gene Name: zinc finger protein 585B
  ENST ID: ENST00000531805
  CDS Start-End: 420-2564
gtcaggagattgagaccatcctggccaacatggtgaaaccccgtctctactaaaaatacaaaaattagctgggtgtggtggcacgtgcctgtaatcccagctactcaggaggctgaggcaggagaatcacttgaacccgggaggtggaggttgcagtaagccaagatcgcgccactgcactccagcctggggaacagagcaagactgtctcaaaaaaaaaatgaagtaaattaaaaacaacaaaacccatgttccgtaatcccatatatagtcactccaccgtgcaaagctgactatgcacattgaacaggaatgtgcccttacagggatcagtgtccttcagggatgtggctatcgatttcagcagagaggaatggcggcacctggacctttctcagagaaacctgtaccgggatgtgatgctggagacctacagccacctgctctcagtagggtatcaagttcctaaaccagaggtggtcatgttggagcaaggaaaggaaccatgggcactgcagggtgagaggccacgtcacagctgcccaggagagaaattatgggaccataatcaacatagaaaaatcatcggttataaaccagcttcctctcaagatcaaaaaatttattctggggaaaaatcctatgagtgtgctgaatttggaaagagcttcacctggaagtcacagttcaaggtacatctgaaagttcctacaggagaaaaactctatgtatgtattgaatgtgggagggcttttgtacagaagccagaattcatcacacatcagaaaacccatatgagagagaagccctataagtgcaatgaatgtggaaaatccttttttcaagtatcgtctcttttcaggcatcacagaattcataccggagaaaaactatatgaatgtagtgaatgtgggaaaggtttcccttataactcagatctcagtatacatgagaaaattcatactggagagagacaccatgaatgcactgactgtggcaaagcgttcacacaaaagtccacactcaagattcatcagaaaatccatacaggcgagagatcctacatctgtattgaatgcgggcaggccttcatccagaaaacacaattgattgcacaccgaagaattcatagtggagaaaaaccatatgaatgcaataactgtggcaaatccttcatttccaagtcacaacttcaggtacatcaacgtgttcacacaagagtgaagccctatatatgtaccgaatatgggaaggtcttcagcaataattccaacctcattacacatgagaagattcaaagtagagagaaatcttccatatgtactgagtgtgggaaggcctttacctacaggtcagagttgattattcatcagagaattcacactggagagaaaccttatgaatgcagtgactgtgggagagccttcactcagaagtcagcactcacagtgcatcagagaattcatacaggagaaaaatcgtatatatgcatgaaatgtggactggccttcatccggaaggcacacttgattacacatcaaataattcatactggagagaaaccttataaatgtggtcactgtgggaaattgtttacttccaagtcacaactccatgttcataaacgaattcacacaggagaaaagccctatgtatgcaataaatgtgggaaggcattcaccaaccggtcaaatctcattacacatcagaaaactcatacaggagagaaatcttatatatgttccaaatgtggaaaggccttcacccagaggtcagacttgattacacatcagagaatccatactggggagaagccttatgaatgcaatacttgtggaaaagcctttactcagaagtcaaatcttaatatacatcagaaaattcacactggagagagacagtatgaatgccacgaatgtgggaaagccttcaaccagaaatcaatactcattgttcatcagaaaattcatacaggagagaaaccctatgtatgcactgagtgtggaagagctttcatccgcaagtcaaactttattactcatcaaagaattcatactggagagaagccttatgaatgcagtgactgtgggaagtcctttacctccaagtctcagctcctggtgcatcagccagttcacacaggagagaaaccctatgtgtgtgccgagtgtgggaaagcctttagtggcaggtcaaatctcagtaagcaccagaaaactcataccggagaaaagccctacatttgttctgaatgtgggaagacctttcgacagaagtcagagttgattacacatcacagaattcatactggagagaaaccttatgagtgcagtgactgtgggaagtctttcactaaaaaatcacagctccaagtgcatcagcgaattcacactggagagaagccttacgtgtgtgctgagtgtgggaaggcctttagcaacaggtccaatttgaataaacatcagacaacacacactggagacaaaccctacaagtgtggcatctgtgggaaaggcttcgttcagaaatcagtgttcagtgttcatcagagcagccacgcttgagagaaacagtgtgagaaaacccccctgagggttgggtctgattgtacactgttgcacgcatgcagcagaaaaatatgtatattattgtaaatagaaatgaccacatcagaatgtcacacatggctgttctggagagggcctctgagaaggcactgaatgaggcgagggacccttcctacattgtcaccatccccagtaaaccttgggtcattattcatactgacaaggaaccgagtcaatttggtgaataggaaaagccttctcatgaaaactacaatagaatactgttaccaaattcttcataagaaagatcatattatgggaatgataatcctgtttactgtggattaggtatagtgccaacagtttgaatggtaagacaacataatatatatgatagtgatgaa

SEQ ID NO: 203108 - DNA, 548 bp, Homo sapiens
  Payload ID: 20051
  Gene Name: zinc finger protein 585B
  ENST ID: ENST00000591492
  CDS Start-End: 137-548
atttcgccgctggcgtcaggactattttcacgttttaatgccgagaggtatataggtaccattttcaaagaaatgatgttctgagccctataagcacaatcaatatgcatcacaagagacaaactgtaatctctgaatgcagttaaatgaagaaatcaacaagggatcagtgtccttcagggatgtggctatcgatttcagcagagaggaatggcggcacctggacctttctcagagaaacctgtaccgggatgtgatgctggagacctacagccacctgctctcagtagggtatcaagttcctaaaccagaggtggtcatgttggagcaaggaaaggaaccatgggcactgcagggtgagaggccacgtcacagctgcccaggagagaaattatgggaccataatcaacatagaaaaatcatcggttataaaccagcttcctctcaagatcaaaaaatttattctggggaaaaatcctatgagtgtgctgaatttggaaagagcttcacctggaagtcacagttcaaggtacatctgaaagttccta

SEQ ID NO: 203109 - DNA, 574 bp, Homo sapiens
  Payload ID: 20051
  Gene Name: zinc finger protein 585B
  ENST ID: ENST00000591273
  CDS Start-End: 217-399
ggaagtggaagtggtccccgaaggctatttcgccgctggcgtcaggactattttcacgttttaatgccgagaggttcttgggtgtctctggggagtccctgggccagaccttcctccagactccagcccacctcttcggagcagctctgctgagttcacagatgaccactaaacttcaggcaccctagacaaaaagggttgagatccagtgtggccatgccagctagttggacctcaccccagaaatcctcagccctggctccagaggatcatggcagctcctatgagagttttgctcttgttgcccaggctggagtgcagtggcacaatcttggctcaccgcaacctctgcctcctgggttcaagcgattctcctgcctcagcctcccgagtagctgagattacaggcatgcaccaccacgcccagggatcagtgtccttcagggatgtggctatcgatttcagcagagaggaatggcggcacctggacctttctcagagaaacctgtaccgggatgtgatgctggagacctacagccacctgctctcagtagggtatcaagttcctaaacca

SEQ ID NO: 203110 - DNA, 403 bp, Homo sapiens
  Payload ID: 20051
  Gene Name: zinc finger protein 585B
  ENST ID: ENST00000586320
  CDS Start-End: 44-298
gcacaatcaatatgcatcacaagagacaaactgtaatctctgaatgcagttaaatgaagaaatcaacaagggatcagtgtccttcagggatgtggctatcgatttcagcagagaggaatggcggcacctggacctttctcagagaaacctgtaccgggatgtgatgctggagacctacagccacctgctctcagtagggtatcaagttcctaaaccagaggtggtcatgttggagcaaggaaaggaaccatgggcactgcagggtgagaggccacgtcacagctgcccaggtgagtgaagtgaggtgaatgtgactcaggttagatgggagacaggaggaaatctcagctgtcttgaaaaacactggaacctgtgaagtgctattaagaccactcttcagtaa

SEQ ID NO: 203111 - DNA, 2265 bp, Homo sapiens
  Payload ID: 20052
  Gene Name: zinc finger protein 586
  Uniprot ID: Q9NXT0
  ENST ID: ENST00000391702
  CDS Start-End: 368-1447
ctagccgtggcagccattttggcctgtcaggtccatccggcgatgctgggtctggacgagctcgggaggagtggttgtggccattgcacacaggcggatctgaggttcggcgacgccgctggtcgcgacccgggacaggacaacgacaggaacaccgccgagcccgcgttccccccccgcccagagtcatggcggcagcagccgctctgagggcgcctgctcagactactgtggatgatgtcagccacattatggtgtaagccctaaagttaagagcagtgtgacctttgaagatgtggctgtaaacttttccctggaggaatggagtcttcttaatgaggctcagagatgcctgtaccgtgacgtgatgctggagaccttgacacttatatcctccctgggttgttggcatggaggggaagatgaggcagcaccttctaagcagagcacgtgtatacatatatacaaagaccagggaggtcatagtggagaaaggccttatgagtgtggggaatataggaaattatttaagaacaagtcctgcctcactgaacccagaagagatcacaaacacaggaatgttcgcactggagaaaggccttatgagtgcagcaaatatgggaaattatttcaccaaaagcctacactccatattcatgagagatttcatactgggcaaaagacctatgagtgcagtgagtgtggaaaatcatttcaccaaagctcttcactcttgcagcgtcagacacttcacactagagaaaggccttatgagtgtattgaatgtgggaaagcctttgctgaaaagtccagtctcattaaccacaggaaagttcactctggagcaaagcgttatgaatgcaatgaatgtgggaagtcctttgcttatacatctagtctcattaaacacaggaggattcacactggagagaggccttatgagtgcagtgaatgtgggagatcctttgctgaaaactccagtcttattaaacacttgagagttcacacaggagaaaggccttatgaatgcgttgagtgtggaaaatcatttcgccgaagctcttcactcttgcagcatcagagagttcacactagagaaaggccttatgaatgtagtgaatgtgggaaatcctttagcttaaggtccaacctcattcaccatcagcgagttcatactggagaaaggcatgagtgcgggcagtgtgggaaatcctttagccgaaaatctagccttattatacatctgagagttcacactggagaaaggccttatgagtgcagtgactgtgggaaatcctttgctgaaaactccagccttattaaacacttgagagttcacactggagaaaggccatatgaatgcattgattgtggaaaatcatttcgccacagttcttcgttccgtcgccatcagagagttcatactggaatgaggccttataagtgaagcaaattttggaaattctcttgcccaggctttttgctccttcaaggccagagagttcacaccagatcaaggtgttatgagtgtgacaaatggggaatattctttagctagaatgctagcttctttacataaaagagtgctcccactgaagaagtgccttttgagtgcaatgaatgtgagaaagccttcagccctctctcattggttaccacaatatttacatgaggaaaataccacagatgtggaggtaatattattttttcttcaatataacactggaggaaaccccttatgaggatgccatctgcctaaattgaatgtcatacatcaaatagctgcatacattccaggtatgtgggaactgcatagtatttttcgacctgcccaggtctcttgctagacttctgtgacttacagttctcttctaaaaagcatttcacctttaccacttggcaggtgcccacagtacatcattcgcctaactcatcatgatccagaagtaactttgattttgtttcattcaacagagggattttttagtatcctcagcactcattctattctcatttctttctctccaatgagttaggccatgaacctgactcatttttggcacagaggactcttctgataacttgaaaaaatggactacctttttcagggatcttttggatctcacagagttcttaagatggaattttccagcctgccagtcatgaatctcagacagcctgccacctattgccctgatttgtgttataataaaggccttgttgcttaagacaccttcagtctttgcaggagggcatggaagctcc

SEQ ID NO: 203112 - DNA, 1977 bp, Homo sapiens
  Payload ID: 20052
  Gene Name: zinc finger protein 586
  Uniprot ID: Q9NXT0
  ENST ID: ENST00000396150
  CDS Start-End: 148-780
gatgctgggtctggacgagctcgggaggagtggttgtggccattgcacacaggcggatctgaggttcggcgacgccgctggtcgcgacccgggacaggacaacgacaggaacaccgccgagcccgcgttccccccccgcccagagtcatggcggcagcagccgctctgagggcgcctgctcaggttgttggcatggaggggaagatgaggcagcaccttctaagcagagcacgtgtatacatatatacaaagaccagggaggtcatagtggagaaaggccttatgagtgtggggaatataggaaattatttaagaacaagtcctgcctcactgaacccagaagagatcacaaacacaggaatgttcgcactggagaaaggccttatgagtgcagcaaatatgggaaattatttcaccaaaagcctacactccatattcatgagagatttcatactgggcaaaagacctatgagtgcagtgagtgtggaaaatcatttcaccaaagctcttcactcttgcagcgtcagacacttcacactagagaaaggccttatgagtgtattgaatgtgggaaagcctttgctgaaaagtccagtctcattaaccacaggaaagttcactctggagcaaagcgttatgaatgcaatgaatgtgggaagtcctttgcttatacatctagtctcattaaacacaggaggattcacactggagagaggccttatgagtgcagtgaatgtgggagatcctttgctgaaaactccagtcttattaaacacttgagagttcacacaggagaaaggccttatgaatgcgttgagtgtggaaaatcatttcgccgaagctcttcactcttgcagcatcagagagttcacactagagaaaggccttatgaatgtagtgaatgtgggaaatcctttagcttaaggtccaacctcattcaccatcagcgagttcatactggagaaaggcatgagtgcgggcagtgtgggaaatcctttagccgaaaatctagccttattatacatctgagagttcacactggagaaaggccttatgagtgcagtgactgtgggaaatcctttgctgaaaactccagccttattaaacacttgagagttcacactggagaaaggccatatgaatgcattgattgtggaaaatcatttcgccacagttcttcgttccgtcgccatcagagagttcatactggaatgaggccttataagtgaagcaaattttggaaattctcttgcccaggctttttgctccttcaaggccagagagttcacaccagatcaaggtgttatgagtgtgacaaatggggaatattctttagctagaatgctagcttctttacataaaagagtgctcccactgaagaagtgccttttgagtgcaatgaatgtgagaaagccttcagccctctctcattggttaccacaatatttacatgaggaaaataccacagatgtggaggtaatattattttttcttcaatataacactggaggaaaccccttatgaggatgccatctgcctaaattgaatgtcatacatcaaatagctgcatacattccaggtatgtgggaactgcatagtatttttcgacctgcccaggtctcttgctagacttctgtgacttacagttctcttctaaaaagcatttcacctttaccacttggcaggtgcccacagtacatcattcgcctaactcatcatgatccagaagtaactttgattttgtttcattcaacagagggattttttagtatcctcagcactcattctattctcatttctttctctccaatgagttaggccatgaacctgactcatttttggcacagaggactcttctgataacttgaaaaaatggactacctttttcagggatcttttggatctcacagagttcttaagatggaattttccagcctgccagtcatgaatctcagacagcctgccacctattgccct

SEQ ID NO: 203113 - DNA, 2163 bp, Homo sapiens
  Payload ID: 20052
  Gene Name: zinc finger protein 586
  Uniprot ID: Q9NXT0
  ENST ID: ENST00000396154
  CDS Start-End: 174-1382
attttggcctgtcaggtccatccggcgatgctgggtctggacgagctcgggaggagtggttgtggccattgcacacaggcggatctgaggttcggcgacgccgctggtcgcgacccgggacaggacaacgacaggaacaccgccgagcccgcgttccccccccgcccagagtcatggcggcagcagccgctctgagggcgcctgctcagagcagtgtgacctttgaagatgtggctgtaaacttttccctggaggaatggagtcttcttaatgaggctcagagatgcctgtaccgtgacgtgatgctggagaccttgacacttatatcctccctgggttgttggcatggaggggaagatgaggcagcaccttctaagcagagcacgtgtatacatatatacaaagaccagggaggtcatagtggagaaaggccttatgagtgtggggaatataggaaattatttaagaacaagtcctgcctcactgaacccagaagagatcacaaacacaggaatgttcgcactggagaaaggccttatgagtgcagcaaatatgggaaattatttcaccaaaagcctacactccatattcatgagagatttcatactgggcaaaagacctatgagtgcagtgagtgtggaaaatcatttcaccaaagctcttcactcttgcagcgtcagacacttcacactagagaaaggccttatgagtgtattgaatgtgggaaagcctttgctgaaaagtccagtctcattaaccacaggaaagttcactctggagcaaagcgttatgaatgcaatgaatgtgggaagtcctttgcttatacatctagtctcattaaacacaggaggattcacactggagagaggccttatgagtgcagtgaatgtgggagatcctttgctgaaaactccagtcttattaaacacttgagagttcacacaggagaaaggccttatgaatgcgttgagtgtggaaaatcatttcgccgaagctcttcactcttgcagcatcagagagttcacactagagaaaggccttatgaatgtagtgaatgtgggaaatcctttagcttaaggtccaacctcattcaccatcagcgagttcatactggagaaaggcatgagtgcgggcagtgtgggaaatcctttagccgaaaatctagccttattatacatctgagagttcacactggagaaaggccttatgagtgcagtgactgtgggaaatcctttgctgaaaactccagccttattaaacacttgagagttcacactggagaaaggccatatgaatgcattgattgtggaaaatcatttcgccacagttcttcgttccgtcgccatcagagagttcatactggaatgaggccttataagtgaagcaaattttggaaattctcttgcccaggctttttgctccttcaaggccagagagttcacaccagatcaaggtgttatgagtgtgacaaatggggaatattctttagctagaatgctagcttctttacataaaagagtgctcccactgaagaagtgccttttgagtgcaatgaatgtgagaaagccttcagccctctctcattggttaccacaatatttacatgaggaaaataccacagatgtggaggtaatattattttttcttcaatataacactggaggaaaccccttatgaggatgccatctgcctaaattgaatgtcatacatcaaatagctgcatacattccaggtatgtgggaactgcatagtatttttcgacctgcccaggtctcttgctagacttctgtgacttacagttctcttctaaaaagcatttcacctttaccacttggcaggtgcccacagtacatcattcgcctaactcatcatgatccagaagtaactttgattttgtttcattcaacagagggattttttagtatcctcagcactcattctattctcatttctttctctccaatgagttaggccatgaacctgactcatttttggcacagaggactcttctgataacttgaaaaaatggactacctttttcagggatcttttggatctcacagagttcttaagatggaattttccagcctgccagtcatgaatctcagacagcctgccacctattgccctgatttgtgttataataaaggccttgttgcttaa

SEQ ID NO: 203114 - DNA, 578 bp, Homo sapiens
  Payload ID: 20052
  Gene Name: zinc finger protein 586
  ENST ID: ENST00000598885
  CDS Start-End: 183-488
gtggcagccattttggcctgtcaggtccatccggcgatgctgggtctggacgagctcgggaggagtggttgtggccattgcacacaggcggatctgaggttcggcgacgccgctggtcgcgacccgggacaggacaacgacaggaacaccgccgagcccgcgttccccccccgcccagagtcatggcggcagcagccgctctgagggcgcctgctcagagcagtgtgacctttgaagacgtggctgtaaacttttccctggaggaatggagtcttcttaatgaggctcagggatgcctgtaccatgatgtgatgctggagaccttgacacttatatcctccctgggaggagttccgcctcacaggttgttccctacaggcgcctgtggaccccaggttccatcctcccggatccgtccatctccaggccattgcccgcgcccctccctgtacctgtcgctctccccaccgcatcccacgggtgtctgaaacagggatccctcccgagagcgcctcagtgtcccgacgccgggtccgggttgcagagccgtaaacaggtgccgctccctcgctgcttta

SEQ ID NO: 203115 - DNA, 603 bp, Homo sapiens
  Payload ID: 20052
  Gene Name: zinc finger protein 586
  ENST ID: ENST00000598183
  CDS Start-End: 177-407
gccattttggcctgtcaggtccatccggcgatgctgggtctggacgagctcgggaggagtggttgtggccattgcacacaggcggatctgaggttcggcgacgccgctggtcgcgacccgggacaggacaacgacaggaacaccgccgagcccgcgttccccccccgcccagagtcatggcggcagcagccgctctgagggcgcctgctcagagcagtgtgacctttgaagacgtggctgtaaacttttccctggaggaatggagtcttcttaatgaggctcagggatgcctgtaccatgatgtgatgctggagaccttgacacttatatcctccctggaaagggtgcactcgccagcagttttgcaacaggagcacactgaacaaagaagacagggtcatttataacctgaggcgttcaccctcctgccggtttccattgcctggaacaggacctcatattctgtatgtgtcctgattggctagcaacttagaaccttttaagaggcaaaggtagaggagaacaaagaaaggaggaagtaacttgtggaatgctgagaaaggtaaaaacacttttaaataaggaagaggaacaggctatgac

SEQ ID NO: 203116 - DNA, 581 bp, Homo sapiens
  Payload ID: 20052
  Gene Name: zinc finger protein 586
  ENST ID: ENST00000599802
  CDS Start-End: 174-245
attttggcctgtcaggtccatccggcgatgctgggtctggacgagctcgggaggagtggttgtggccattgcacacaggcggatctgaggttcggcgacgccgctggtcgcgacccgggacaggacaacgacaggaacaccgccgagcccgcgttccccccccgcccagagtcatggcggcagcagccgctctgagggcgcctgctcagatgcacctctgggtagcgccctctttacagccttgaaacctggtcaactacattactcagaaagctctgcgttgaatgaatgccgtcagagccaatgagggctcggaaagaagcatttccgtgtgtgcgcctaatgtagggccgagacttccggggtcctcttgtagcggccacgttgatctgcgatacgcgtgtttgcccagtgagtggccccggactgctacgtgggactgcggtgaatgaacccagaaggtggagaggaaccgttctcggtgcacagaggcggctctgcagcccggtgagggcgcctgctgctcccgggcagtgctttccccaagtagtccgatggctgcggctgcgccgaggcgccct

SEQ ID NO: 203117 - DNA, 6882 bp, Homo sapiens
  Payload ID: 20053
  Gene Name: zinc finger protein 587
  Uniprot ID: Q96SQ5
  ENST ID: ENST00000339656
  CDS Start-End: 183-1910
ctagtagcggctgtgtatcggcgatgcgggtgtttccccagtttgtggcccctgagtgctgggtgggaccgcggtgactgaacctagaaggtggagaggaatcgtcctcggtgcccagaggcggctctgcagccccgtgacggcgaccactgctcccgggccgtgcttccccaagtagtccgatggcagcggctgtgccgaggcgcccaactcagcagggcactgtgacctttgaagatgtggctgtgaacttttcccaggaggagtggtgtcttcttagtgaggctcagaggtgcttgtaccgtgatgtgatgctagagaacctggctctcatatcctcgctgggttgttggtgtggatcaaaagatgaggaggcaccttgtaagcagagaatttctgtacaaagagagtctcagagcaggactcctagggcaggtgtttctcctaagaaggctcacccctgtgaaatgtgtggcctcatcttggaggatgtttttcactttgctgaccaccaggaaactcatcacaagcagaagctgaacaggagtggagcatgtggaaaaaacttggatgacactgcataccttcatcagcaccagaagcagcatattggagagaaattctacagaaagagtgtcagagaagcatcgtttgtaaagaaacgtaagctcagggtgtcacaggagccatttgtcttccgcgagtttgggaaggacgttctgcccagttcaggattgtgccaagaagaagctgctgtagagaagacagacagtgaaactatgcatggcccaccctttcaggagggaaaaactaattacagttgtggaaaacgcacaaaagccttcagcaccaaacactcagttattccacaccagaaacttttcactagagatggatgttatgtgtgcagtgattgtggaaaatcctttagcagatatgtcagcttcagtaatcatcagcgagatcacactgcaaaaggaccttatgattgtggagagtgtgggaaatcttatagtcgaaagagcagccttattcaacatcagcgagtccacactggacagacagcttatccctgtgaggagtgcgggaaatcttttagtcagaagggcagccttattagccatcagcttgttcacactggagaagggccttatgagtgtagagaatgtgggaaatcttttggtcaaaagggtaacctcattcaacatcagcaaggtcacactggagagagagcttatcactgtggggaatgtgggaaatcttttcgtcagaagttctgctttattaaccatcagcgtgttcacactggagaaaggccttacaagtgtggagaatgtgggaaatcttttggtcaaaagggcaacctcgttcaccatcagcgaggtcatactggagaaaggccctatgagtgcaaggaatgtgggaaatcatttaggtacagatcccacctcactgaacaccagagacttcacactggggaaagaccttacaattgtagggaatgtgggaaattatttaacaggaagtatcatcttctggttcatgagagagttcacactggagaaaggccatatgcgtgtgaggtatgtgggaaattatttggcaataagcacagcgtgactatacatcagaggattcacactggagaaaggccgtatgaatgcagtgaatgtgggaaatcatttctttccagctctgcgcttcatgttcataaaagagttcattctggacaaaagccttataagtgcagtgaatgtggaaaatccttttctgaatgttccagtctcattaaacacaggagaattcacactggagaaaggccttatgaatgcaccaaatgtggaaaaacatttcagcgaagctctaccctccttcatcatcagagttcacacaggagaaaggccttatgagtgcagtgaatatgggaaatcgtttgctgaagcatcccgtctcgttaaacacaggagagttcatactggagaaaggccttatgagtgctgtcaatgtggaaaacatcagaatgtctgctgtcctcggtcttaagcgacttcgtgttgagatggagtcttgttctgtcacccaggctggagtgcagtggtgcagtcttggctcgctgcaacttgggcctcctgggttcatgcaatcctcctacctcagcctcctgagtagctgggattatgagtacacaccaccacgcccagctaatttttgtgtttttagtggagatggggttttaccatgttggccaggctggtctcaaactcctgacctcaagtgatccacccaccttgactcccaaagtgctgaaattacaggcatgagcctctgcacctggccttcattcttttcgtattgcttagaatatgacatgctgaaccaggcatggtggctcatgcttgtaaacctgatgctttgggaggacaaggtggttcattggaggccaggagttagagatcagcctgggcaacatagccagacctcctctctacaaaaagaaaaaagaatgacatgcttcttgtttttgtctgttataaatgaaactgctatatttgaatgcagttgttcatgtaggtatgtttcactatggtaatatggtggtgtgcagtgcctgagtcacgtgatagattaaagtacaactcttttttgagacagagtctcactctgtcacccaggcgggagttaggtggcatgatttcggctcactgcaacctctgcctcccaagttcaactgattcttctgcctcagcctcccgagtagcagggattaccggtgtgcaccaccatgcctggataacttttttttttatttctattagcaatggggtttcaccatgctggccaggcttgttatgaactgacctcaagtgatctgcctgcctcagcttctcaggtgtgacctactgtgcttggcctaatgtacaactttttaagcaatgccaaactatgacttaagaatgaaattattgctcatttgtatatctatctaccatcagtgtccaagaatttctgttctatcttaccaagagggagtatggttagtatttgaaattgtttattattttaataagtggttataacttttgagtcagtggtttatgttttgcattttttttgttttgagacaaagtctcgctctgtctcccaggctagagtaccgtggcacaatctcagctcattgcaacctctgcttcctgggctcaagcactctgcccacctcagcctccagagtagctggaaatacaggtatgcaccaccacaactggataacttttgtattttctgtagagagggttttacctttttgcccagtctgatcgcgaactcctgggctcaggcgatccacttgcctaggctccaaaagtgcttggtctacaggggtgaggcaccctgcctggcctcacctgtaggcttgttttttaaaatgaattttatctatttcccatttcattaatatatttaaaaataatgaaataacaaagacgtatgttggacttcattcattcttcagtgatgtcactttgctgcaaggaatatttggttttcttttttttttttttttccagatggagtctagctctgtctcctaagctacagtgaagtggcatgatctcggcccactgcaacctccacctcctgtgttcaagcgattctgcctcagcctcctgagtagctgggactacaggcatgtgccattatacctggctaattttatttatttattttagtagagatggggtttcaccatgttacccaggctgctctctaccttctgagctcaagtgatccacctgcctcggcctcccaaagtgctgggattacaggtgtcagccactgtacctggctgaatacttggttttcagtaccacaagaactatgagctggttatccacttcatgtggaatcataagcgtcccaaagtgacaatacatatagattgccaggcagtgaaacagttaagatgccaccatagctttcttttcaacatctttctaagattaccttactatttcttttgttccaagtttgtacttcctcacagttctcacatatggaaaggatacacactttgtagaaacaagaactttatgttatccaagttctaggatagccatgagctccaattatctcagagctctgagtcctctactcaatacccattgagatttatgtgttctgaggcttttgtcttctagctacttacttcattctccatgggtaacgtcattcatccacattaactaatttcctcactccaagctcttttctagagataatctccagtccctgtgcagaaactgtcattgcactttctgctgaaatggcagtttcttctcagcaaggtgagattatggaatccagaatcttttttcaggggtcacatgcccatttccccacttgcatgaatgtcgacactgcagccacagttttggccgtaaatgtgaatttggcaagtaaccactgttcccagggaaatgtcccaatcagaagaagattatctgggacactgatactgacagggagatgggacattctgagggacccggaggcagggtgccacctcctcaacttccctgagggctgcctagaatctgtttcctctcactctgaattattcttcctcttatggctgaccaaaaacatggaacctcacaaagtccactgtaacagctttatatttgtgaagtgaagaacatgaagacagtttcaagcaaagttattgagtggacactttgtgttttttttgagaagtctcactctttcacccaggctggagtgcagtggcacgatctcggctcactgcaactccacctcccgggttcacgccattctcttgcctcagcctcctgagtagctgggaccacaagcgcccaccacgtcagcttaatttttttgttttgtttcttgagacagagtcttgctctcttgcccaggttggagtgccgtgtcgcaatctcagctcactgcaacttctacctcctggattcaagcacttctccttgcctcagccacctctttagctgggattacaggtgcgtgccaccacacccagctaatttttgtatttttagcagagaccaggtttcaccatgttggtcaggctggtctcaaactcctgacctcgtgatccacccacctcggcctcccaaagtgctggaattacaggcgtgagccactgcacctggcctgtattcttttctttagtagagacggggttttactgtatttgccaggatggtctcgatctccagacctcgtgatccgcccgccttagcctcccaaagtgctgggattataggcgtgagccaacacgccctggccacttcttgtctttgcaacattttttagatatgtatttgtgttttttggggagcttaatttgctaatggaatctctgttattttcctaacatgcttggtggatacaagagttaagacttcctgtcccgtttagtgtaacaaaagaaagttaagaaatgtggataaaagattgtaagttagaaatggcaagataatcagctatatgaagaatcttggccaggtgtggtggctgaggcctgtaatcccaccactttgggaggctgaggtgggcggatcacaaggtcaggagttcaagaccaccctggccaatattgtgaattcctgtctctactaaaaatacaaaaattagtcgggcatggtggcgggtgcctgtagtcccagctactcgggaggctgaggccagaaaatcggttgaacctgggaggtggaaggtgcactgagccaatatcacaccagtgcactccaacctggtgacagagagacacatcatctcaaaaaaaaaaaaaaaactcaatccataaatgttatactttataactttataacagcatgttatatgggcttagatattatccctaaatttttttttttttttttttttttgagacagagtctcactctgtcacccaggctgaagtgcaatggcatggtctcggctcactgcaacctccgcctcccaggttcaagtgattctcttgcctcagcctcccgagtagctgggcctataggttccctccaccacgcccagctaatttttgtatttttagtagagatgggctttcactacgttagccaggctggtctcaaactcctgacctcatgatccacccccctcggcctcctaaagtgctgggattacaggcatctgccaccgcactcggcttatccctagaaatcctatgatagcatgatgtataggcacctaaaggcatggcacttgagaaatgtgaataagattgtaagttacaaatagcaaggtacagtcagatgttaacagtctcagcccctaaatgtcaccttgtattacagcatgttatataagcacatacaggcacatacatgaaatagtgatacttcattctcagtaatatcttcatccttctcactggaaagatctttgatgatttttaatcaacataggagtttcaatgatatctagaagtttaaaagggctcgttcaaacaaattatgaccacacacactgaagagtatgtttgtctcttgtggtgtaaatttttttttattacaccaaattatgttcacacaaaacctttgtaatcagggggaattaaagagccttcctggaaaatggaggttgcaatcagccgagatggtgccatcgcactctagcctggggaatagagtgagatcctgcctcaaaaaaaacaaaaaaattctttattttctccataaactacagtttatataagcaaaagtttcagtactaagcaattttagtctctgcagtctcttgtcttgaattaatacaacttttgttaattctcttatgaagttaatcttcctgcttgtatgtgaattaaatatatgtcaaactttttttgta

SEQ ID NO: 203118 - DNA, 1974 bp, Homo sapiens
  Payload ID: 20053
  Gene Name: zinc finger protein 587
  Uniprot ID: Q96SQ5
  ENST ID: ENST00000423137
  CDS Start-End: 180-1904
gtagcggctgtgtatcggcgatgcgggtgtttccccagtttgtggcccctgagtgctgggtgggaccgcggtgactgaacctagaaggtggagaggaatcgtcctcggtgcccagaggcggctctgcagccccgtgacggcgaccactgctcccgggccgtgcttccccaagtagtccgatggcagcggctgtgccgaggcgcccaactcagggcactgtgacctttgaagatgtggctgtgaacttttcccaggaggagtggtgtcttcttagtgaggctcagaggtgcttgtaccgtgatgtgatgctagagaacctggctctcatatcctcgctgggttgttggtgtggatcaaaagatgaggaggcaccttgtaagcagagaatttctgtacaaagagagtctcagagcaggactcctagggcaggtgtttctcctaagaaggctcacccctgtgaaatgtgtggcctcatcttggaggatgtttttcactttgctgaccaccaggaaactcatcacaagcagaagctgaacaggagtggagcatgtggaaaaaacttggatgacactgcataccttcatcagcaccagaagcagcatattggagagaaattctacagaaagagtgtcagagaagcatcgtttgtaaagaaacgtaagctcagggtgtcacaggagccatttgtcttccgcgagtttgggaaggacgttctgcccagttcaggattgtgccaagaagaagctgctgtagagaagacagacagtgaaactatgcatggcccaccctttcaggagggaaaaactaattacagttgtggaaaacgcacaaaagccttcagcaccaaacactcagttattccacaccagaaacttttcactagagatggatgttatgtgtgcagtgattgtggaaaatcctttagcagatatgtcagcttcagtaatcatcagcgagatcacactgcaaaaggaccttatgattgtggagagtgtgggaaatcttatagtcgaaagagcagccttattcaacatcagcgagtccacactggacagacagcttatccctgtgaggagtgcgggaaatcttttagtcagaagggcagccttattagccatcagcttgttcacactggagaagggccttatgagtgtagagaatgtgggaaatcttttggtcaaaagggtaacctcattcaacatcagcaaggtcacactggagagagagcttatcactgtggggaatgtgggaaatcttttcgtcagaagttctgctttattaaccatcagcgtgttcacactggagaaaggccttacaagtgtggagaatgtgggaaatcttttggtcaaaagggcaacctcgttcaccatcagcgaggtcatactggagaaaggccctatgagtgcaaggaatgtgggaaatcatttaggtacagatcccacctcactgaacaccagagacttcacactggggaaagaccttacaattgtagggaatgtgggaaattatttaacaggaagtatcatcttctggttcatgagagagttcacactggagaaaggccatatgcgtgtgaggtatgtgggaaattatttggcaataagcacagcgtgactatacatcagaggattcacactggagaaaggccgtatgaatgcagtgaatgtgggaaatcatttctttccagctctgcgcttcatgttcataaaagagttcattctggacaaaagccttataagtgcagtgaatgtggaaaatccttttctgaatgttccagtctcattaaacacaggagaattcacactggagaaaggccttatgaatgcaccaaatgtggaaaaacatttcagcgaagctctaccctccttcatcatcagagttcacacaggagaaaggccttatgagtgcagtgaatatgggaaatcgtttgctgaagcatcccgtctcgttaaacacaggagagttcatactgga

SEQ ID NO: 203119 - DNA, 5731 bp, Homo sapiens
  Payload ID: 20053
  Gene Name: zinc finger protein 587
  ENST ID: ENST00000419854
  CDS Start-End: 232-1830
ggcaccagtggatgtggtttcaactccgtgttggggaccttgggaggaggatgggcaagggtgggtgtgtgggagaggtgggttgtggtacctcagcagaggggctgcttgtggtttcatctgtcactatcatagcagggcactgtgacctttgaagatgtggctgtgaacttttcccaggaggagtggtgtcttcttagtgaggctcagaggtgcttgtaccgtgatgtgatgctagagaacctggctctcatatcctcgctgggttgttggtgtggatcaaaagatgaggaggcaccttgtaagcagagaatttctgtacaaagagagtctcagagcaggactcctagggcaggtgtttctcctaagaaggctcacccctgtgaaatgtgtggcctcatcttggaggatgtttttcactttgctgaccaccaggaaactcatcacaagcagaagctgaacaggagtggagcatgtggaaaaaacttggatgacactgcataccttcatcagcaccagaagcagcatattggagagaaattctacagaaagagtgtcagagaagcatcgtttgtaaagaaacgtaagctcagggtgtcacaggagccatttgtcttccgcgagtttgggaaggacgttctgcccagttcaggattgtgccaagaagaagctgctgtagagaagacagacagtgaaactatgcatggcccaccctttcaggagggaaaaactaattacagttgtggaaaacgcacaaaagccttcagcaccaaacactcagttattccacaccagaaacttttcactagagatggatgttatgtgtgcagtgattgtggaaaatcctttagcagatatgtcagcttcagtaatcatcagcgagatcacactgcaaaaggaccttatgattgtggagagtgtgggaaatcttatagtcgaaagagcagccttattcaacatcagcgagtccacactggacagacagcttatccctgtgaggagtgcgggaaatcttttagtcagaagggcagccttattagccatcagcttgttcacactggagaagggccttatgagtgtagagaatgtgggaaatcttttggtcaaaagggtaacctcattcaacatcagcaaggtcacactggagagagagcttatcactgtggggaatgtgggaaatcttttcgtcagaagttctgctttattaaccatcagcgtgttcacactggagaaaggccttacaagtgtggagaatgtgggaaatcttttggtcaaaagggcaacctcgttcaccatcagcgaggtcatactggagaaaggccctatgagtgcaaggaatgtgggaaatcatttaggtacagatcccacctcactgaacaccagagacttcacactggggaaagaccttacaattgtagggaatgtgggaaattatttaacaggaagtatcatcttctggttcatgagagagttcacactggagaaaggccatatgcgtgtgaggtatgtgggaaattatttggcaataagcacagcgtgactatacatcagaggattcacactggagaaaggccgtatgaatgcagtgaatgtgggaaatcatttctttccagctctgcgcttcatgttcataaaagagttcattctggacaaaagccttataagtgcagtgaatgtggaaaatccttttctgaatgttccagtctcattaaacacaggagaattcacactggagaaaggccttatgaatgcaccaaatgtggaaaaacatttcagcgaagctctaccctccttcatcatcagagttcacacaggagaaaggccttatgagtgcagtgaatatgggaaatcgtttgctgaagcatcccgtctcgttaaacacaggagagttcatactggagaaaggccttatgagtgctgtcaatgtggaaaacatcagaatgtctgctgtcctcggtcttaagcgacttcgtgttgagatggagtcttgttctgtcacccaggctggagtgcagtggtgcagtcttggctcgctgcaacttgggcctcctgggttcatgcaatcctcctacctcagcctcctgagtagctgggattatgagtacacaccaccacgcccagctaatttttgtgtttttagtggagatggggttttaccatgttggccaggctggtctcaaactcctgacctcaagtgatccacccaccttgactcccaaagtgctgaaattacaggcatgagcctctgcacctggccttcattcttttcgtattgcttagaatatgacatgctgaaccaggcatggtggctcatgcttgtaaacctgatgctttgggaggacaaggtggttcattggaggccaggagttagagatcagcctgggcaacatagccagacctcctctctacaaaaagaaaaaagaatgacatgcttcttgtttttgtctgttataaatgaaactgctatatttgaatgcagttgttcatgtaggtatgtttcactatggtaatatggtggtgtgcagtgcctgagtcacgtgatagattaaagtacaactcttttttgagacagagtctcactctgtcacccaggcgggagttaggtggcatgatttcggctcactgcaacctctgcctcccaagttcaactgattcttctgcctcagcctcccgagtagcagggattaccggtgtgcaccaccatgcctggataacttttttttttatttctattagcaatggggtttcaccatgctggccaggcttgttatgaactgacctcaagtgatctgcctgcctcagcttctcaggtgtgacctactgtgcttggcctaatgtacaactttttaagcaatgccaaactatgacttaagaatgaaattattgctcatttgtatatctatctaccatcagtgtccaagaatttctgttctatcttaccaagagggagtatggttagtatttgaaattgtttattattttaataagtggttataacttttgagtcagtggtttatgttttgcattttttttgttttgagacaaagtctcgctctgtctcccaggctagagtaccgtggcacaatctcagctcattgcaacctctgcttcctgggctcaagcactctgcccacctcagcctccagagtagctggaaatacaggtatgcaccaccacaactggataacttttgtattttctgtagagagggttttacctttttgcccagtctgatcgcgaactcctgggctcaggcgatccacttgcctaggctccaaaagtgcttggtctacaggggtgaggcaccctgcctggcctcacctgtaggcttgttttttaaaatgaattttatctatttcccatttcattaatatatttaaaaataatgaaataacaaagacgtatgttggacttcattcattcttcagtgatgtcactttgctgcaaggaatatttggttttcttttttttttttttttccagatggagtctagctctgtctcctaagctacagtgaagtggcatgatctcggcccactgcaacctccacctcctgtgttcaagcgattctgcctcagcctcctgagtagctgggactacaggcatgtgccattatacctggctaattttatttatttattttagtagagatggggtttcaccatgttacccaggctgctctctaccttctgagctcaagtgatccacctgcctcggcctcccaaagtgctgggattacaggtgtcagccactgtacctggctgaatacttggttttcagtaccacaagaactatgagctggttatccacttcatgtggaatcataagcgtcccaaagtgacaatacatatagattgccaggcagtgaaacagttaagatgccaccatagctttcttttcaacatctttctaagattaccttactatttcttttgttccaagtttgtacttcctcacagttctcacatatggaaaggatacacactttgtagaaacaagaactttatgttatccaagttctaggatagccatgagctccaattatctcagagctctgagtcctctactcaatacccattgagatttatgtgttctgaggcttttgtcttctagctacttacttcattctccatgggtaacgtcattcatccacattaactaatttcctcactccaagctcttttctagagataatctccagtccctgtgcagaaactgtcattgcactttctgctgaaatggcagtttcttctcagcaaggtgagattatggaatccagaatcttttttcaggggtcacatgcccatttccccacttgcatgaatgtcgacactgcagccacagttttggccgtaaatgtgaatttggcaagtaaccactgttcccagggaaatgtcccaatcagaagaagattatctgggacactgatactgacagggagatgggacattctgagggacccggaggcagggtgccacctcctcaacttccctgagggctgcctagaatctgtttcctctcactctgaattattcttcctcttatggctgaccaaaaacatggaacctcacaaagtccactgtaacagctttatatttgtgaagtgaagaacatgaagacagtttcaagcaaagttattgagtggacactttgtgttttttttgagaagtctcactctttcacccaggctggagtgcagtggcacgatctcggctcactgcaactccacctcccgggttcacgccattctcttgcctcagcctcctgagtagctgggaccacaagcgcccaccacgtcagcttaatttttttgttttgtttcttgagacagagtcttgctctcttgcccaggttggagtgccgtgtcgcaatctcagctcactgcaacttctacctcctggattcaagcacttctccttgcctcagccacctctttagctgggattacaggtgcgtgccaccacacccagctaatttttgtatttttagcagagaccaggtttcaccatgttggtcaggctggtctcaaactcctgacctcgtgatccacccacctcggcctcccaaagtgctggaattacaggcgtgagccactgcacctggcctgtattcttttctttagtagagacggggttttactgtatttgccaggatggtctcgatctccagacctcgtgatccgcccgccttagcctcccaaagtgctgggattataggcgtgagccaacacgccctggccacttcttgtctttgcaacattttttagatatgtatttgtgttttttggggagcttaatttgctaatggaatctctgttattttcctaacatgcttggtggatacaagagttaagacttcctgtcccgtttagtgtaacaaaagaaagttaagaaatgtggataaaagattgtaagttagaaatggcaagataatcagctatatgaagaatcttggccaggtgtggtggctgaggcctgtaatcccaccactttgggaggctgaggtgggcggatcacaaggtcaggagttcaagaccaccctggccaatattgtgaattcctgtctctactaaaaatacaaaaattagtcgggcatggtggcgggtgcctgtagtcccagctactcgggaggctgaggccagaaaatcggttgaacctgggaggtggaaggtgcactgagccaatatcacaccagtgcactccaacctggtgacagagagacacatcatctc

SEQ ID NO: 203120 - DNA, 3339 bp, Homo sapiens
  Payload ID: 20054
  Gene Name: zinc finger protein 587B
  Uniprot ID: E7ETH6
  ENST ID: ENST00000442832
  CDS Start-End: 235-1443
ttttgattggtgttgggtttatttgtcggagaggctcctgagcgctaggtcggcactgcggtgactgaacccagaaggcggagaacagttgtcctctgctgcacagaggcgactctggagctctgtgacggcgccaagcgtgacccacccctgggccaggatagggaccgtcatgcccatatctcctggctggtcaccctctcctcccaaccctgctttaaaccacgtggttcgatggcggtggtggccacgctgaggctctctgctcagggcacagtgacttttgaagacgtggctgtgaaatttacccaggaggaatggaatctccttagtgaggctcagagatgcctgtaccgtgatgtgactctggagaacctggcacttatgtcctccctgggttgttggtgtggagtggaagatgaggcggcaccttctaagcagagtatttatatacaaagagagactcaggtcaggactcctgtgacaggtgtgtctcccaagaaggcccacccctgtgagatgtgtggcccgatcttgggagacattttgcatgtggcagatcatcagggaacacatcacaagcagaaactgcacaggtgtgaggcctgggggaataaattgtatgacagtggaaactttcatcagcaccagaatgagcacattggagagaaaccctacagagggagtgttgaggaggcgttgtttgtgaagaggtgtaagttgcatgtgtcaggggagtcatctgtcttcagtgagagtgggaaggactttttgcccaggtcaggattactccagcaggaggccagtcacactggggagaagtcaaacagcaaaactgagtgtgtgtctccctttcagtgtgggggagctcactatagccatggagattccatgaaacattttagcaccaaacatatactcagtcagcaccagagacttctccctcgagaagaatgttatgtgtgctgtgaatgtgggaaatcctttagcaaatatgttagcttcagtaatcatcagagagttcacagtggaaaaagaccttatgaatgtggagaatgtgagaaatcttttagtcaaaagagcagcctcattcaacatcagcaatttcacactggaggaaaaccttatgggtgtgaagaatgtgggaaatattttagcttagaaggatatcttaggcgccatcaaaaagttcacgctggaaaagggccttatgagtgtggagaatgtgggaaatcttttagttcaaacgtgaaccttaagagtcatcagcgcattcacactggagagagaccttacaagtgtggagaatgtgagaaatcttttagtcggaagcccagccttagttaccatcagcgctttgggaggccgaggtgggtggatcacaaggacaggaaggagttcaagaccagcctgggcaatatagtgaaatcctgtctcttctaaaaatataaaaattagccgggcatggtggcgcacctgtagccgcagctactcaggaggctgaggcaggaaaattgcttgaaccccgggaggtagaggttgcagtgagctgagatcatgccactgcactccagcctgggtcctgctaccttgaaggacagcatagctaaactgcgtggcccaagggacagcatgaatgcagaatatagctttcttcacttgtggcctatttgcatagctgcccaaggcctccagtggacgacttcatggctttgtggtcttcatctgtagcatggatactacagattgtgggttcataggtcagctgggtacagggcagtttttataacaacctctggtgggttttttattttagtgtcaatatcacactgaaagattggtgattttttttgaaccagacaaaattctctcttatgaggtatattgcactgtgctcggtactgttgagggaactctgttcagcagatcttacaaggcacacatgtgccatgatatccagaattctgtaaggcaacatcacaggttgtaaggctataggatgaaattataattttatggttacttagttactgcatttatagtcagcagaggggacagcaataaagtttttgaaatatatcttttttttttttttgagacacagtctcactctgtcacccaggctagagtgctgttgcaccatctcggctcactgcaacctgtgccttctgggttcaagcgattctcccacctcagtcacccaagtagctagaattacaggtgcatgccaccacaccactaatgttttgtggttttagtagagacgggtttcaccgtgttgcacagactggtcttgaattcaactcttgagctcaggtgatctgctcacctccgccttccaaagtgctgggactacaggtgtgggccgctgtgtttggctgaaatgtatgtcttttaaaggagtgtccacagttatccagtcactgtgtctgtgatggataagcagatacagaaattctcaagacttccataataatgaatgttgtgtagctaagctttggtcagaggaaataatctaaaggttttgtgaattcatgtaaccttttgggctgctcaccttaaggtaactcctgtattaacaggaggaacagaatagggaaaaagatctcagttcagtgatgtagctttgtgaccagccagtgatccagttcaatcaggtagaaatgaccttcctgctacatcaatatttgcttctatggaggctagtttccccacttagggcatgagaagaattggtaaagtcaacataaaattgccaaacctgtcaccaaaaatgatggcaaatctgtatttttctcttaaaccgtgttataaaagctgtaataaggtataggctgagcatcatggctcatgcctgtattcccagcactttgggaggccagattccttgagaccagtgtggggaacatggcaaaaccttgtctctaggaaaaatagccaggtatggtggcatgtaccttagtcttagtgatgtgggaggattgcttgagcctgggaggcagaagttgcagtgagctaagattgcaacgctgcagtccagcctgggtgatagagtgagaccccatcttaaaaataaaataaagatataaatgacatccaataaagtacacatatttgagctgtaggataagtcttgaattttattataatcccgtgaaaccatcatcagagtcaccataatgaatttatctaatctatcacctttgtatttacttggagcctttataaagtttttctctctgctcttcaaacaaccattgatttactttgctgtatgatggagtactttccattttctggaattttctgactgatgtaataaagtgtttcctcttataa

SEQ ID NO: 203121 - DNA, 2118 bp, Homo sapiens
  Payload ID: 20054
  Gene Name: zinc finger protein 587B
  ENST ID: ENST00000594901
  CDS Start-End: 217-2118
ttatttgtcggagaggctcctgagcgctaggtcggcactgcggtgactgaacccagaaggcggagaacagttgtcctctgctgcacagaggcgactctggagctctgtgacggcgccaagcgtgacccacccctgggccaggatagggaccgtcatgcccatatctcctggctggtcaccctctcctcccaaccctgctttaaaccacgtggttcgatggcggtggtggccacgctgaggctctctgctcagggcacagtgacttttgaagacgtggctgtgaaatttacccaggaggaatggaatctccttagtgaggctcagagatgcctgtaccgtgatgtgactctggagaacctggcacttatgtcctccctgggttgttggtgtggagtggaagatgaggcggcaccttctaagcagagtatttatatacaaagagagactcaggtcaggactcctgtgacaggtgtgtctcccaagaaggcccacccctgtgagatgtgtggcccgatcttgggagacattttgcatgtggcagatcatcagggaacacatcacaagcagaaactgcacaggtgtgaggcctgggggaataaattgtatgacagtggaaactttcatcagcaccagaatgagcacattggagagaaaccctacagagggagtgttgaggaggcgttgtttgtgaagaggtgtaagttgcatgtgtcaggggagtcatctgtcttcagtgagagtgggaaggactttttgcccaggtcaggattactccagcaggaggccagtcacactggggagaagtcaaacagcaaaactgagtgtgtgtctccctttcagtgtgggggagctcactatagccatggagattccatgaaacattttagcaccaaacatatactcagtcagcaccagagacttctccctcgagaagaatgttatgtgtgctgtgaatgtgggaaatcctttagcaaatatgttagcttcagtaatcatcagagagttcacagtggaaaaagaccttatgaatgtggagaatgtgagaaatcttttagtcaaaagagcagcctcattcaacatcagcaatttcacactggaggaaaaccttatgggtgtgaagaatgtgggaaatattttagcttagaaggatatcttaggcgccatcaaaaagttcacgctggaaaagggccttatgagtgtggagaatgtgggaaatcttttagttcaaacgtgaaccttaagagtcatcagcgcattcacactggagagagaccttacaagtgtggagaatgtgagaaatcttttagtcggaagcccagccttagttaccatcagcgcattcacactgaagtaagaccttacaagtgtggagaatgtgggaaatcttatatttcaaaggggcaccttaggatccatcagcgcatgcacactggagaaagaccttacaagtgtggagactgtgggaaatcttttaatgaaaaaggacaccttaggagtcatcagcgagttcacactacagaaagaccttataagtgtggggaatgtgggaaatgttttagtcacaagggtaacctcattctacaccagcatggccatactagaaaaaggccttatatgtgttgggaatgtggaaaattatttaagaagaagtctcacctccttgtacaccagagaattcacagtggagagaagccatatgcttgtgaggcttgtcagaaattttttaggcacaagtgccacctcactgcacaccagagagttcacactggagaaaggccatatgaatgcagtgattgtgggaagtcatttacccacagctgtgcattcattgttcataagagagttcacactggtcagaagccttatgagtgcagtgaatgtgggaaatcttttgctgcaagctcctatctcactagtcacaggagagttcacactggtcagaagccttatgagtgcagtgaatgtgggaaatcttttgctggaatctccagtctcactaatcacaggagagttcacactggagaaaagccttatgggtgtagtgaatgtgaaaaaaaatttaggaaaagctcttcacttcgttaccatcagagagttcatgaaagaaaggccttatga

SEQ ID NO: 203122 - DNA, 1670 bp, Homo sapiens
  Payload ID: 20054
  Gene Name: zinc finger protein 587B
  ENST ID: ENST00000594328
  CDS Start-End: 376-1670
cgttgatctgcgatacgcgtgtttgcccagtgagtggccccggactgctacgtgggactgcggtgaatgaacccagaaggtggagaggaaccgttctcggtgcacagaggcggctctgcagcccggtgagggcgcctgctgctcccgggcagtgctttccccaagtagtccgatggctgcggctgcgccgaggcgccctactcaggagcaacttggcgaggttcagactcttggagccagaagctacatgacccctaaacgggcacagtgacttttgaagacgtggctgtgaaatttacccaggaggaatggaatctccttagtgaggctcagagatgcctgtaccgtgatgtgactctggagaacctggcacttatgtcctccctgggttgttggtgtggagtggaagatgaggcggcaccttctaagcagagtatttatatacaaagagagactcaggtcaggactcctgtgacaggtgtgtctcccaagaaggcccacccctgtgagatgtgtggcccgatcttgggagacattttgcatgtggcagatcatcagggaacacatcacaagcagaaactgcacaggtgtgaggcctgggggaataaattgtatgacagtggaaactttcatcagcaccagaatgagcacattggagagaaaccctacagagggagtgttgaggaggcgttgtttgtgaagaggtgtaagttgcatgtgtcaggggagtcatctgtcttcagtgagagtgggaaggactttttgcccaggtcaggattactccagcaggaggccagtcacactggggagaagtcaaacagcaaaactgagtgtgtgtctccctttcagtgtgggggagctcactatagccatggagattccatgaaacattttagcaccaaacatatactcagtcagcaccagagacttctccctcgagaagaatgttatgtgtgctgtgaatgtgggaaatcctttagcaaatatgttagcttcagtaatcatcagagagttcacagtggaaaaagaccttatgaatgtggagaatgtgagaaatcttttagtcaaaagagcagcctcattcaacatcagcaatttcacactggaggaaaaccttatgggtgtgaagaatgtgggaaatattttagcttagaaggatatcttaggcgccatcaaaaagttcacgctggaaaagggccttatgagtgtggagaatgtgggaaatcttttagttcaaacgtgaaccttaagagtcatcagcgcattcacactggagagagaccttacaagtgtggagaatgtgagaaatcttttagtcggaagcccagccttagttaccatcagcgcattcacactgaagtaagaccttacaagtgtggagaatgtgggaaatcttatatttcaaaggggcaccttaggatccatcagcgcatgcacactggagaaagaccttacaagtgtggagactgtgggaaatcttttaatgaaaaaggacaccttaggagtcatcagcgagttcacactacagaaagaccttataagtgtggggaatgtgggaaatgttttagtcacaagggtaacctcattctacaccagcatggccatactagaaaaaggccttatatgtgttgggaatgtggaaaattatttaagaagaagtctcacctcct

SEQ ID NO: 203123 - DNA, 3368 bp, Homo sapiens
  Payload ID: 20055
  Gene Name: zinc finger protein 589
  Uniprot ID: Q86UQ0
  ENST ID: ENST00000354698
  CDS Start-End: 73-1167
cggtgcgcattctaatccgtttcacacacggtgctgctacctcgtttgcttcgtgcgtgcgtgcgcgcgcagatgtgggccccgcgggagcagctactgggctggactgcggaagctctgcctgccaaggattctgcctggccctgggaagagaagcctagatatctgggaccagtgactttcgaggatgtggctgtgcttttcactgaggcagagtggaagagactgagccttgagcagaggaacctatacaaagaagtgatgctggaaaatctcaggaatctggtctcattggcagaatcaaagccagaagtccatacctgcccttcttgccctctggcctttggcagtcagcagttcctcagccaagatgagctacacaatcatcctattccaggtttccatgcaggaaatcaactccacccaggaaatccctgcccagaggatcagccacagtcacaacatccttctgataaaaatcacaggggggctgaagcagaagatcaacgagtggaaggaggcgtcagacccttgttttggagtacaaatgaaaggggggctttagtgggtttctctagcctgttccagagaccaccaataagctcttggggaggcaacagaatattagagatacagctcagtccagcccagaatgcaagctctgaggaagtagacagaatttccaagagggcagaaaccccagggtttggagcagtcacgtttggggagtgtgcactagcttttaaccagaagtcaaacctgttcagacagaaggcagtcacagcagaaaaatcttcagacaaaaggcagtcacaggtgtgcagggagtgtgggcgaggctttagcaggaagtcacagctcatcatacaccagaggacacacacaggagaaaagccttatgtctgcggagagtgtgggcgaggctttatagttgagtcagtcctccgcaaccacctgagtacacactccggggagaaaccttatgtgtgcagccattgtgggcgaggctttagctgcaagccatacctcatcagacatcagaggacacacacaagggagaaatcgtttatgtgcacagtgtgtgggcgaggctttcgtgaaaagtcagagctcattaagcaccagagaattcacacgggggataagccttatgtgtgcagagattgaggccgaggctttgtaaggagatcatgtctcaacacacaccagaggatacattcagatgagaagccttttgtttgcagagagtgtgggcgaggctttcgtgctaaatcaactctcctcctacaccagtggacacattcagaggtgaaacctcacgtgtgtgaggagtgtgggcatggatttagccagaagtcgtcgctcaaatcacatcggagaacacactcaggggagaagccttatgtgtgtggggaatgtgggcggggatttagccggaggatagtcctcaatggacactggaggacacacacgggagagaagccttacacgtgctttgagtgtgggcgaaactttagcctcaagtccgctcttagtgtacatcagaggatacactctggggagaagccttatgcatgcacggagtgtgggcaaggctttatcacgaaatcacagctcatcagacaccagaggacacacacaggagaaaagccttatgtctgcggagagtgtgggcgaggctttatagctcagtcaaccctccactaccaccggagtacacactccaaggaaaaaccttatgtgtgcagccagtgtgggcgaggcttttgtgataaatcaactctcctcgcacacgagcagacacattcaggggagaagccttatgtgtgtggggaatgtgggcggggatttggccggaagatactcctcaacagacactggaggacacacacaggagagaaaccttacgcatgcatcgagtgtgggcgaaactttagccacaagtccactctcagcttacatcagaggatacactcgggggagaagccttatgcatgcgtggagtgtgggcaaagctttaggagaaagtcacagctcatcatacaccagaagatacactcggggaaaagctttagaggtgcaaggagtgaggatgtgattttagcaacaagtcagccatcagccacaccagcggaaatgcttagggagaagccttgtttgtaaggtaatgtggacagagctgtacgtggacatcattacttgtcacgtgtcagaggacacactcgggagaaaccttcatggagtgagagtaaggtgttggctggaagtggccccttaagagatacttggagtcaaatctatccactgtacgcccaccccactcttgttctaagagctttggggacagtcttttgaccccttacattcctttagatgtgaagatgacagagatctaacttctgagagcagaggtgtcaagtgacggtccccttggaggaatggtctttgcatctgactacttccttctgcaactgtgttcttccattagcttccatgacactctcctgctttatttttttctacatctctagcctttgctgtttcctctcctaccccacctttagattttactcagagttcagtctccagccctacaatctgagggacacctttaccaggtccccttcctaaccctccagtcccaaatccaagattctttaaccacactctaaaagttcttcagactcaggacttaaacatagccacgccaccttggccttcaatgacagggatctagcaatgctgcatcatcagccttccaataccaggtttaagggtattttaaacacagctcctcttaaatcctccaatctcagtacccagtgttttagccatgctcgggtggctaaattacatccaggaatggtgccagggcctttagccatttgtctctcctcacactccagggcccatatggcccaggttctgacagtttgccttactcccttgggctggggctagccctacctgataccctgtgtcaatgagtgtaccttggagagctatccactcaggccccagtgcctctatttgctaagggactctgccacagaaaagaaggggagagatgttcatgtaacctcaaaatacttaggcttggttttgatgctagagaggaaaaaggacttggagagagagaaggaatggctggtccagaggcttttgtccactccctctcactggaagtggttgatctccagggaatccccaaggttagcctgcttaggggaagggctaggggtacctggaatgtaggatctcccccatgcctggcctaccaccctaatgtgtctggaattggtgggttcttggtcttgctgacttcaagaatgaagccgtggaccctcacggtgagtgttacaattctt

SEQ ID NO: 203124 - DNA, 1677 bp, Homo sapiens
  Payload ID: 20055
  Gene Name: zinc finger protein 589
  ENST ID: ENST00000427617
  CDS Start-End: 73-363
cggtgcgcattctaatccgtttcacacacggtgctgctacctcgtttgcttcgtgcgtgcgtgcgcgcgcagatgtgggccccgcgggagcagctactgggctggactgcggaagctctgcctgccaaggattctgcctggccctgggaagagaagcctagatatctgggaccagtgactttcgaggatgtggctgtgcttttcactgaggcagagtggaagagactgagccttgagcagaggaacctatacaaagaagtgatgctggaaaatctcaggaatctggtctcattggttctggaactgggaagtccaagatcagggctcctgcccctggacctgaacctggatctttggctttgatgttggaccttgtgtgtggatatgaactttgaacctgcaccttggaactaaacctctgacttggatttgttctgcattttggaactcaccttagacctgaaccttggtcatgaaatggatctgaatcattcttgggtcttggacatgggacttggacctccatgtgtatcttggacttaggaccatgatctggaccttgtaaattgacttggactttggacttggaccttggactagaatttgtccctggctgtggacctcgtctttggatctggatctggacctggtcttggatgttggacctagatgcaggccttgatttgatttggaacatggacttggtccttgcacatggcccaacacccgcgtctttggaactgcatcttggaccttggatctgaaatttaaacagggaggtgaccttcatttcttgtatttgactttataactggaaattcaatctctacctggatcttggacctggatctcagaccttgctttttattgggccatggatcttataccttaaacatggaaattgtacctggatttggacctttgacttggacctggatctggacccagggataagatttggacctcacttgcaaattttggtaatgaaattttcctttgctcctgtagtccttggacctaggcttcagtcatggatttagaccttagacgtgaccatcagaccttagagttgaacctaaattcctggtccccagtcctataactcagaatgattatgcataaccttggacttagaacttagatctggatcttagagctgatacttgacctggtactggatatttaaccttggacttcagacatggatttaatctgggccttgggatgatttaagatctagaagtggacctagaattagaccttggacttatgtgcctgagcctggactttggaagtggactttgggccttgtaactcaaccttgaatatgagcctcaaatgtagactgtgggccaggcacagtggctcacatctgtaatcccagcactttgggtggaaagctgaggcaggtggatcacttgagctcaggaattcaagaccagcctggggaacatggtgaaaacctggctctacaaaaaataaaaaaattagccaggcttggtggcacacacctgtagttccaggtactcaggaggctgaggcaggaggttcacttgggcccaggaggcagaggttgcagtgagctgagcttgtacagctgcactccagcctggaggacagagtgagactctgtctcaagaaaaaaaaataaaaaataaataaataaataagagaaaa

SEQ ID NO: 203125 - DNA, 3658 bp, Homo sapiens
  Payload ID: 20055
  Gene Name: zinc finger protein 589
  ENST ID: ENST00000457782
  CDS Start-End: 18-287
cgtgcgtgcgcgcgcagatgtgggccccgcgggagcagctactgggctggactgcggaagctctgcctgccaaggattctgcctggccctgggaagagaagcctagatatctggttccagtggcagatggggcactggccagaggggttaggaggatttggactctccttgggagtcgctgtgatacggccttcaattatagttgtctttccttcttggatttccaccacttccctgaaaccacgagctggaagctgagaccagctggtcactgctgggcctgctaggagcccacacggaagctgcccacagccagacaccagagcctcaaaggccgccatcttgaaaaaccaaccctgacctccacaatgattgattttcaaatgttgaaccagctttgcagaactataataaacccaagtgtgataccctgtctcaagtattgtggtgatcaaataggaccagtgactttcgaggatgtggctgtgcttttcactgaggcagagtggaagagactgagccttgagcagaggaacctatacaaagaagtgatgctggaaaatctcaggaatctggtctcattggaatcaaagccagaagtccatacctgcccttcttgccctctggcctttggcagtcagcagttcctcagccaagatgagctacacaatcatcctattccaggtttccatgcaggaaatcaactccacccaggaaatccctgcccagaggatcagccacagtcacaacatccttctgataaaaatcacaggggggctgaagcagaagatcaacgagtggaaggaggcgtcagacccttgttttggagtacaaatgaaaggggggctttagtgggtttctctagcctgttccagagaccaccaataagctcttggggaggcaacagaatattagagatacagctcagtccagcccagaatgcaagctctgaggaagtagacagaatttccaagagggcagaaaccccagggtttggagcagtcacgtttggggagtgtgcactagcttttaaccagaagtcaaacctgttcagacagaaggcagtcacagcagaaaaatcttcagacaaaaggcagtcacaggtgtgcagggagtgtgggcgaggctttagcaggaagtcacagctcatcatacaccagaggacacacacaggagaaaagccttatgtctgcggagagtgtgggcgaggctttatagttgagtcagtcctccgcaaccacctgagtacacactccggggagaaaccttatgtgtgcagccattgtgggcgaggctttagctgcaagccatacctcatcagacatcagaggacacacacaagggagaaatcgtttatgtgcacagtgtgtgggcgaggctttcgtgaaaagtcagagctcattaagcaccagagaattcacacgggggataagccttatgtgtgcagagattgaggccgaggctttgtaaggagatcatgtctcaacacacaccagaggatacattcagatgagaagccttttgtttgcagagagtgtgggcgaggctttcgtgctaaatcaactctcctcctacaccagtggacacattcagaggtgaaacctcacgtgtgtgaggagtgtgggcatggatttagccagaagtcgtcgctcaaatcacatcggagaacacactcaggggagaagccttatgtgtgtggggaatgtgggcggggatttagccggaggatagtcctcaatggacactggaggacacacacgggagagaagccttacacgtgctttgagtgtgggcgaaactttagcctcaagtccgctcttagtgtacatcagaggatacactctggggagaagccttatgcatgcacggagtgtgggcaaggctttatcacgaaatcacagctcatcagacaccagaggacacacacaggagaaaagccttatgtctgcggagagtgtgggcgaggctttatagctcagtcaaccctccactaccaccggagtacacactccaaggaaaaaccttatgtgtgcagccagtgtgggcgaggcttttgtgataaatcaactctcctcgcacacgagcagacacattcaggggagaagccttatgtgtgtggggaatgtgggcggggatttggccggaagatactcctcaacagacactggaggacacacacaggagagaaaccttacgcatgcatcgagtgtgggcgaaactttagccacaagtccactctcagcttacatcagaggatacactcgggggagaagccttatgcatgcgtggagtgtgggcaaagctttaggagaaagtcacagctcatcatacaccagaagatacactcggggaaaagctttagaggtgcaaggagtgaggatgtgattttagcaacaagtcagccatcagccacaccagcggaaatgcttagggagaagccttgtttgtaaggtaatgtggacagagctgtacgtggacatcattacttgtcacgtgtcagaggacacactcgggagaaaccttcatggagtgagagtaaggtgttggctggaagtggccccttaagagatacttggagtcaaatctatccactgtacgcccaccccactcttgttctaagagctttggggacagtcttttgaccccttacattcctttagatgtgaagatgacagagatctaacttctgagagcagaggtgtcaagtgacggtccccttggaggaatggtctttgcatctgactacttccttctgcaactgtgttcttccattagcttccatgacactctcctgctttatttttttctacatctctagcctttgctgtttcctctcctaccccacctttagattttactcagagttcagtctccagccctacaatctgagggacacctttaccaggtccccttcctaaccctccagtcccaaatccaagattctttaaccacactctaaaagttcttcagactcaggacttaaacatagccacgccaccttggccttcaatgacagggatctagcaatgctgcatcatcagccttccaataccaggtttaagggtattttaaacacagctcctcttaaatcctccaatctcagtacccagtgttttagccatgctcgggtggctaaattacatccaggaatggtgccagggcctttagccatttgtctctcctcacactccagggcccatatggcccaggttctgacagtttgccttactcccttgggctggggctagccctacctgataccctgtgtcaatgagtgtaccttggagagctatccactcaggccccagtgcctctatttgctaagggactctgccacagaaaagaaggggagagatgttcatgtaacctcaaaatacttaggcttggttttgatgctagagaggaaaaaggacttggagagagagaaggaatggctggtccagaggcttttgtccactccctctcactggaagtggttgatctccagggaatccccaaggttagcctgcttaggggaagggctaggggtacctggaatgtaggatctcccccatgcctggcctaccaccctaatgtgtctggaattggtgggttcttggtcttgctgacttcaagaatgaagccgtggaccctcacggtgagtgttacaattcttaaa

SEQ ID NO: 203126 - DNA, 593 bp, Homo sapiens
  Payload ID: 20055
  Gene Name: zinc finger protein 589
  ENST ID: ENST00000412564
  CDS Start-End: 72-314
ggtgcgcattctaatccgtttcacacacggtgctgctacctcgtttgcttcgtgcgtgcgtgcgcgcgcagatgtgggccccgcgggagcagctactgggctggactgcggaagctctgcctgccaaggattctgcctggccctgggaagagaagcctagatatctgggaccagtgactttcgaggatgtggctgtgcttttcactgaggcagagtggaagagactgagccttgagcagaggaacctatacaaagaagtgatgctggaaaatctcaggaatctggtctcattggtgctctcctatcaaatctagaattggaagattgatggacagcaactgaggtgctaccaggataccaaaaagtctgctggataaacaccatctctattctaatattatggagagatcaggatctcctgtgcccaaatcaaacctgttaatacactcagctgtcctcagtggtaacactgaggtcaacacacaactccaacatcaggaacaagtcataaccattttgcatctgaaacagtgcctgacacaaaggtgcttgatcaattttatttactaaataaacctatatagtcttatttc

SEQ ID NO: 203127 - DNA, 4703 bp, Homo sapiens
  Payload ID: 20055
  Gene Name: zinc finger protein 589
  Uniprot ID: Q86UQ0
  ENST ID: ENST00000448461
  CDS Start-End: 44-1138
ggtgctgctacctcgtttgcttcgtgcgtgcgtgcgcgcgcagatgtgggccccgcgggagcagctactgggctggactgcggaagctctgcctgccaaggattctgcctggccctgggaagagaagcctagatatctgggaccagtgactttcgaggatgtggctgtgcttttcactgaggcagagtggaagagactgagccttgagcagaggaacctatacaaagaagtgatgctggaaaatctcaggaatctggtctcattggcagaatcaaagccagaagtccatacctgcccttcttgccctctggcctttggcagtcagcagttcctcagccaagatgagctacacaatcatcctattccaggtttccatgcaggaaatcaactccacccaggaaatccctgcccagaggatcagccacagtcacaacatccttctgataaaaatcacaggggggctgaagcagaagatcaacgagtggaaggaggcgtcagacccttgttttggagtacaaatgaaaggggggctttagtgggtttctctagcctgttccagagaccaccaataagctcttggggaggcaacagaatattagagatacagctcagtccagcccagaatgcaagctctgaggaagtagacagaatttccaagagggcagaaaccccagggtttggagcagtcacgtttggggagtgtgcactagcttttaaccagaagtcaaacctgttcagacagaaggcagtcacagcagaaaaatcttcagacaaaaggcagtcacaggtgtgcagggagtgtgggcgaggctttagcaggaagtcacagctcatcatacaccagaggacacacacaggagaaaagccttatgtctgcggagagtgtgggcgaggctttatagttgagtcagtcctccgcaaccacctgagtacacactccggggagaaaccttatgtgtgcagccattgtgggcgaggctttagctgcaagccatacctcatcagacatcagaggacacacacaagggagaaatcgtttatgtgcacagtgtgtgggcgaggctttcgtgaaaagtcagagctcattaagcaccagagaattcacacgggggataagccttatgtgtgcagagattgaggccgaggctttgtaaggagatcatgtctcaacacacaccagaggatacattcagatgagaagccttttgtttgcagagagtgtgggcgaggctttcgtgctaaatcaactctcctcctacaccagtggacacattcagaggtgaaacctcacgtgtgtgaggagtgtgggcatggatttagccagaagtcgtcgctcaaatcacatcggagaacacactcaggggagaagccttatgtgtgtggggaatgtgggcggggatttagccggaggatagtcctcaatggacactggaggacacacacgggagagaagccttacacgtgctttgagtgtgggcgaaactttagcctcaagtccgctcttagtgtacatcagaggatacactctggggagaagccttatgcatgcacggagtgtgggcaaggctttatcacgaaatcacagctcatcagacaccagaggacacacacaggagaaaagccttatgtctgcggagagtgtgggcgaggctttatagctcagtcaaccctccactaccaccggagtacacactccaaggaaaaaccttatgtgtgcagccagtgtgggcgaggcttttgtgataaatcaactctcctcgcacacgagcagacacattcaggggagaagccttatgtgtgtggggaatgtgggcggggatttggccggaagatactcctcaacagacactggaggacacacacaggagagaaaccttacgcatgcatcgagtgtgggcgaaactttagccacaagtccactctcagcttacatcagaggatacactcgggggagaagccttatgcatgcgtggagtgtgggcaaagctttaggagaaagtcacagctcatcatacaccagaagatacactcggggaaaagctttagaggtgcaaggagtgaggatgtgattttagcaacaagtcagccatcagccacaccagcggaaatgcttagggagaagccttgtttgtaaggtaatgtggacagagctgtacgtggacatcattacttgtcacgtgtcagaggacacactcgggagaaaccttcatggagtgagagtaaggtgttggctggaagtggccccttaagagatacttggagtcaaatctatccactgtacgcccaccccactcttgttctaagagctttggggacagtcttttgaccccttacattcctttagatgtgaagatgacagagatctaacttctgagagcagaggtgtcaagtgacggtccccttggaggaatggtctttgcatctgactacttccttctgcaactgtgttcttccattagcttccatgacactctcctgctttatttttttctacatctctagcctttgctgtttcctctcctaccccacctttagattttactcagagttcagtctccagccctacaatctgagggacacctttaccaggtccccttcctaaccctccagtcccaaatccaagattctttaaccacactctaaaagttcttcagactcaggacttaaacatagccacgccaccttggccttcaatgacagggatctagcaatgctgcatcatcagccttccaataccaggtttaagggtattttaaacacagctcctcttaaatcctccaatctcagtacccagtgttttagccatgctcgggtggctaaattacatccaggaatggtgccagggcctttagccatttgtctctcctcacactccagggcccatatggcccaggttctgacagtttgccttactcccttgggctggggctagccctacctgataccctgtgtcaatgagtgtaccttggagagctatccactcaggccccagtgcctctatttgctaagggactctgccacagaaaagaaggggagagatgttcatgtaacctcaaaatacttaggcttggttttgatgctagagaggaaaaaggacttggagagagagaaggaatggctggtccagaggcttttgtccactccctctcactggaagtggttgatctccagggaatccccaaggttagcctgcttaggggaagggctaggggtacctggaatgtaggatctcccccatgcctggcctaccaccctaatgtgtctggaattggtgggttcttggtcttgctgacttcaagaatgaagccgtggaccctcacgttctggaactgggaagtccaagatcagggctcctgcccctggacctgaacctggatctttggctttgatgttggaccttgtgtgtggatatgaactttgaacctgcaccttggaactaaacctctgacttggatttgttctgcattttggaactcaccttagacctgaaccttggtcatgaaatggatctgaatcattcttgggtcttggacatgggacttggacctccatgtgtatcttggacttaggaccatgatctggaccttgtaaattgacttggactttggacttggaccttggactagaatttgtccctggctgtggacctcgtctttggatctggatctggacctggtcttggatgttggacctagatgcaggccttgatttgatttggaacatggacttggtccttgcacatggcccaacacccgcgtctttggaactgcatcttggaccttggatctgaaatttaaacagggaggtgaccttcatttcttgtatttgactttataactggaaattcaatctctacctggatcttggacctggatctcagaccttgctttttattgggccatggatcttataccttaaacatggaaattgtacctggatttggacctttgacttggacctggatctggacccagggataagatttggacctcacttgcaaattttggtaatgaaattttcctttgctcctgtagtccttggacctaggcttcagtcatggatttagaccttagacgtgaccatcagaccttagagttgaacctaaattcctggtccccagtcctataactcagaatgattatgcataaccttggacttagaacttagatctggatcttagagctgatacttgacctggtactggatatttaaccttggacttcagacatggatttaatctgggccttgggatgatttaagatctagaagtggacctagaattagaccttggacttatgtgcctgagcctggactttggaagtggactttgggccttgtaactcaaccttgaatatgagcctcaaatgtagactgtgggccaggcacagtggctcacatctgtaatcccagcactttgggtggaaagctgaggcaggtggatcacttgagctcaggaattcaagaccagcctggggaacatggtgaaaacctggctctacaaaaaataaaaaaattagccaggcttggtggcacacacctgtagttccaggtactcaggaggctgaggcaggaggttcacttgggcccaggaggcagaggttgcagtgagctgagcttgtacagctgcactccagcctggaggacagagtgagactctgtctcaagaaaaaaaaataaaaaataaataaataaataagagaaaa

SEQ ID NO: 203128 - DNA, 917 bp, Homo sapiens
  Payload ID: 20055
  Gene Name: zinc finger protein 589
  ENST ID: ENST00000440261
  CDS Start-End: 67-600
gcattctaatccgtttcacacacggtgctgctacctcgtttgcttcgtgcgtgcgtgcgcgcgcagatgtgggccccgcgggagcagctactgggctggactgcggaagctctgcctgccaaggattctgcctggccctgggaagagaagcctagatatctgggaccagtgactttcgaggatgtggctgtgcttttcactgaggcagagtggaagagactgagccttgagcagaggaacctatacaaagaagtgatgctggaaaatctcaggaatctggtctcattggaatcaaagccagaagtccatacctgcccttcttgccctctggcctttggcagtcagcagttcctcagccaagatgagctacacaatcatcctattccaggtttccatgcaggaaatcaactccacccaggaaatccctgcccagaggatcagccacagtcacaacatccttctgataaaaatcacaggggggctgaagcagaagatcaacgagtggaaggaggcgtcagacccttgttttggattctggaactgggaagtccaagatcagggctcctgcccctggacctgaacctggatctttggctttgatgttggaccttgtgtgtggatatgaactttgaacctgcaccttggaactaaacctctgacttggatttgttctgcattttggaactcaccttagacctgaaccttggtcatgaaatggatctgaatcattcttgggtcttggacatgggacttggacctccatgtgtatcttggacttaggaccatgatctggaccttgtaaattgacttggactttggacttggaccttggactagaatttgtccctggctgtggacctcgtctttggatctggatctggacctggtcttggatgttggacctagatgcaggcctt

SEQ ID NO: 203129 - DNA, 7863 bp, Homo sapiens
  Payload ID: 20056
  Gene Name: zinc finger protein 592
  Uniprot ID: Q92610
  ENST ID: ENST00000299927
  CDS Start-End: 23-3826
cagcccttgccagcatccagccatgggggatatgaaaaccccagattttgatgaccttctggctgcctttgacatcccagaccccaccagccttgatgccaaggaggccatccagacacccagtgaggagaatgagagtcccctcaaacctccaggcatatgtatggatgaaagtgtgtccttgtctcactcaggatcagcccccgatgtgccggccgtgagtgtcattgtcaagaacaccagccgccaggagtcatttgaagcggagaaagaccacattactcccagtctcctacacaatggattccggggctcagatctgcctccagatccccacaactgtgggaaatttgattctacttttatgaatggagacagtgccaggagtttccctggcaaactggagcctcccaagtcagagccattacccaccttcaaccagttcagtccaatctccagcccagaacctgaggatcccatcaaagataacggatttgggataaagcccaaacactctgacagttatttcccaccccctcttgggtgcggggctgtgggaggcccagtcctggaggctctggctaagtttccggttccagagctgcatatgtttgatcatttttgtaagaaagaacccaagccagaacccctgcccttggggagccagcaggaacacgagcaaagtgggcagaacacagtggaacctcacaaggatccggatgccactcgattcttcggggaagctttggagttcaacagccatcctagcaacagtattggagagtccaaggggcttgcccgggagcttggtacctgctcatcagtcccccctaggcagcgtctaaagccagctcattccaagctgtcctcttgtgtggcagccttggtggccttgcaggccaaaagagtggctagtgtcactaaggaggatcagcctggccacacaaaggatctctcagggcccactaaagagagttctaaaggtagccccaaaatgcccaagtcaccaaagagtccccggagccctctggaggccactagaaaaagtatcaagccatcggacagccctcgtagcatctgcagtgacagcagcagcaaaggctcaccgtctgtggctgccagctccccaccagcaattcccaaagtgagaatcaaaaccattaagacatcatcaggggaaatcaaacggactgtcacaaggatcctgccagatcctgatgatccaagtaagtcccctgttgggtcacctctagggagcgccattgcagaggcccccagcgagatgccaggggatgaggtgcctgtggaagagcactttcctgaggcaggcacaaattcagggagcccccagggggccaggaaaggggacgagagcatgacaaaggccagtgactcgtcatctcccagctgcagttctgggccccgggtcccaaagggggctgccccaggctcacagacaggcaagaagcaacagagcacagcactgcaggcatccaccctggcccctgccaacctcctgcccaaagccgtgcacttggccaacctgaacctcgtcccccacagtgttgctgcatcagtgacagccaagtcttcagtgcaaagacggagccagccacagcttacacaaatgtcggtgcccctggtccaccaggtgaaaaaggctgccccactgattgtagaggtcttcaacaaggtccttcacagctccaaccccgtgcccctctatgcgccaaatctcagcccgcctgcggacagcaggatccacgtgccggccagtgggtactgctgcctggagtgtggagacgcatttgccttagagaagagcctgagccagcactatggccggcggagcgtccacattgaggtactgtgcacactgtgctccaagacgctgctcttcttcaacaagtgcagcctgctccggcacgcccgtgaccacaagagcaaggggctcgtcatgcagtgttcccagctgctggtgaagcctatctctgcggaccaaatgttcgtgtcggcccctgtgaactccacggcaccagcagccccagccccttcatcctctcccaaacatggcctcacttcgggcagtgccagtccccctcctccagccttgccactctacccagaccctgtgaggctcatccggtactcaatcaagtgtcttgaatgtcacaagcagatgcgggactacatggtcctggctgcacatttccagaggacaacagaggagacagaggggctgacctgccaggtatgccaaatgctgctgcccaaccagtgcagtttctgtgcccaccagcggattcatgcacacaagtccccctactgctgcccggagtgtggggtcctctgccgctctgcctacttccagacccatgtaaaggagaattgcctgcactatgcccgcaaggtgggctacaggtgcatccactgtggtgtcgtccacctgaccttggccttgctgaaaagccacatccaggagcgacactgccaggttttccacaaatgtgcattctgccccatggccttcaagactgccagcagcactgcagaccacagtgccacccagcaccccacccagccccacagaccctcccagctcatttataagtgctcctgtgaaatggtcttcaacaagaagaggcacattcagcagcatttttaccagaatgtcagcaagacgcaggtgggcgtcttcaagtgccctgagtgcccactcttgttcgtgcagaagccggagttgatgcaacacgtcaagagcacccacggtgttccccgaaatgtggacgagctgtcaagcctccagtcttcagcggacacatcctcaagccgccctggctctcgagttcccactgagccaccagccactagtgtggctgctcggagcagctccctgccttctggccgctggggtaggcctgaagcccaccgcagggtggaagccaggccgcggctgaggaacactggctggacctgccaggagtgccaggagtgggttccagatcgggagagctacgtgtcccacatgaaaaagagccacggtcggacattgaagcggtacccatgccggcagtgtgaacagtccttccacacccccaacagcctgcgcaaacacatccgcaacaaccatgacacagtaaagaagttctacacctgcgggtactgcacagaggacagccccagctttcctcggccctcccttctggagagccacatcagccttatgcatggcatcagaaaccctgatttgagccagacgtccaaagtgaaacctccgggtggacattcccctcaggtgaaccatctgaaaagaccagtcagtggagtgggggacgctccaggcaccagcaatggcgcaactgtctcttccaccaaaaggcacaagtccctttttcagtgcgcgaaatgtagttttgccacagactcggggctcgagtttcagagccacatacctcagcaccaggtggacagctccacagcccaatgtctcctctgtggtttgtgctacacctctgccagctccctcagccgccacctcttcattgtccacaaggtgagagaccaggaggaggaggaggaagaggaggcggcggcagcggagatggcagtggaggtggcagagccagaggagggctccggggaggaggtgcccatggagactagagagaatggactggaagaatgtgccggtgagcctttgtcagctgacccagaggcgaggagattgctgggcccggcccctgaggacgatggtggccacaatgatcacagtcaaccacaggcctctcaggaccaggacagccacacactgtcccctcaggtgtgaccggagactttgcagtgtgcatggtcaggggtggtgccgaagtgtcttccacctgccctgcggaccgtggaaaataaaaggctctgcccccagtgtgagtgtgaccggttgtaccctggagtagtgtctgccctgagctgccagtgctgggtatcccccagccccaggaaatgtggggtcggccaggaccctcacagctctgaatttgcttctgttatttatggcttttcgctgcttcttggtgccccatctcttgtctgtgtccttccaaccccaagctgcttatgtggcccaaccccactgctgtcaactaggcttgaaccccacagcggctgtgctcttctgggaggttcccgcttgctgccttcagccagggcgctcctcagagctctattttcctgcagacaccagctctccttcctgcctttagatcctgagaaggagggaaatgaggggtgctgacacagtccctctgggagagctctgcctagtctggtttggcgagggcccttgatcaccttgcccctcctccctgtcttctctgattcttttccctcaaaatagtcctgagaactaattgtcacactggctcatcatgtctctgtgggtggggtgggagaaacctctgctgcacacctctgtttggaacctgggcagagcaggaggtaaggcaaaggcaggcaggcaccaagaaccagaccccttgagaaggcgctgtgggtgggtctttgttctgctgttctgcctttcctgacaggtggggttggggcacacagacattggaatatttgtactgctctcgtgccatttgagaggctgctgccccaggcaggccagcccctactcctcttggctacactcatgttgctcagactatatttcaaataaaaaatcttctcaccatgcaggtaggctcttgtattcctctccaagtgagcctggccccaccctattccacccaagggtctttcccagacttcccctgtttgtcccatctctgagggagaacaatacttcctactgtctaaggaaggccttctctagattctggagcttgtggttaggaaaccgggagccctgtactacttagttctctagagaccttctgaaggggtgaggggagcggctccacaatggtcaagtcacctccaagatctccaggctagtgacattggctttagggcgtatcgaaattttctaggcaccttcatctttccttcagttgattttcaacataagagaaccccttactggtaaaaagggaaaagggggtggagaagaggaattttataattttcttatagcattcaagaggtttcttatttcttacagcatcgctactgccacagagaactcaaatgtggcagaactgggattagacttgggagactggctgtcttttcactgatggtggagtcagggcccacccaagcacgaggagcaggctgtgtggaggtgtcgtctgacctctaacccaggtggcatggggttgcgcccagcaggatgtagtggagtaaagggaagagggtgctggccgggtgcttagaggtcatctttcaaggaggcattaaatatcaattataaattattaagtcagataaatatgcctgaccttttcacagttgaaaaaatacattttttcccctctatcaaatgccaagtttttagtggaaatgctaatggcagtgggaaaggttgcctcactttcagagagactctcgctgtctgcacccttttaataattgctcttcctggcaaggctgccacttccctgcctccccagctggcagtggggcaacccaggcctgtttccagctacctgcaaagccagacctagacctgccgtagctgttgtcccatgcctaattctagttacaggaagccatccctgtaccctgggtccattcacaggaatgggttccagaggaggctgatagaagggtttgaaatgactggctggatcccttcctgctcagacacagtggtagctggagagcaggcagagatggtagaattgcaggtttgaccacctgtcgtgaccccagatatacatctccttcctgggaagaacgtgagttggaaaaatgctgagccagtccctggaaaacctgggtcctggcctggattctgtccttagccagctcttaacaaatcccttaacctcactgtctcctctccttcacaatagagttagtaattcccatccaactggcttcacaggcttttgtgagcttatgaatgtgaaagtattttctagtttataaaacactatatgaatgtggggaaatctttacttgaccttagggcatggagggtggagcacattttgtctgctgtttggacttggatgctgattagcagttatgaagtggcccagacacctagccattctttagtaagagtgaagatagcattttaagccctccttgtgtgcctagcatcttactgaacactttctggtgattctctcctttaatcctcacaaagatctcacagttgtcctccattttacggagaagaaaccgaggctccgagaggttaaacgatgtgcagaggctacctgtagtgatggtgctgagtcaagcctgtcaaccactgtgctcgttagtgaccaaggctgctttgacaggctgccagcttgtcagtggtttgcagccccccagacatttgctttcctacttcccatgcagttggggtgccctgccaagtgccaggttctctttggagtccatctgtgccttgtcaccccaaggagggcctcgagcatcacaccgttgacatttcgaaacgtggtatctctacaacctttcattctcattgggatttaccttgccatttgaacaccatcattttttgaggactgtctagaaaaggttgcctaaccctcacagggaacacacagttccctcagagtccagcatcttctggtcttttctttttcaagatttttttaaatggttgtgctatcatttgtcatcatcagaaaatgcttgctgtaacaagcgtttatctgcacattatgctgcagtgaatgctctactgatcaagttaaacagataagatcccttcccttgtagaaactacaacttaatacagtctaagacttgacaaattacttagtatttattttccaactgctttatctctgtaaaatgatatgctgaattattataagctaattgttgtagaaagaactttccccttaacttatgtaaacagtctggttttaaaaaatttgataattgtggcccagtaagctcaacactttgccttccccaagactggggaacctctgtcctgttcaccactgtatattcagcaccaggcagtttctttttttgtttgtttgtttttttgttttgaaaaattaatacatatacatggtaagacattccacaatacaaaagggtatacaataaatggtaagcttccccatggaggtcagcctctagtcccctctccagagttaatcactgttatctatatgttgtgtatcctttcatagcaattctatgcatttacaagtttataaatatgtatatttatatatctatttttaatacaaatagtagaattctatacacagtgttctgaagcttgctttcttatatagtattttggagattattccaaattcatacattgggtcagagtaattctttaaaagttccttgcatataacagtgattcaaaaagtatatggatgaatgagtgaatgctgcatgaatgaatgaatctgattcaattggtagctacagctgttctctcagggtctgatctgaccaagacagcaccttctagattctagaatgtgtcctcctgactaaggggttcaggatactgttcaccttctccaacagatgccaccggagccttaggaactgggcacaggaagccttgggcccctggaggaaaaagttgagactaggacgcaggtcccaagtatgggatttttttgggttcctacttaaaatgcttttttctttattggaaaatgatgtaacattttagagaaattaaaaagcacacatatttat

SEQ ID NO: 203130 - DNA, 8131 bp, Homo sapiens
  Payload ID: 20056
  Gene Name: zinc finger protein 592
  Uniprot ID: Q92610
  ENST ID: ENST00000560079
  CDS Start-End: 289-4092
ctggcctgcagtcgccgccgccgccgccaggtggtgtttggactctagaccatgtgcctaggtagaagtttttcctttctccgcagctctgctcccctagcaacgctcgccacacccttgttttgagatcctctctaaggagcggagagtttaataggcaagaaggaagggagaagacagaaggaagacgctcccccgtacggagacagagggagggggggctccaaagccgaaagaggaggtccctacctgccacggataccagtcagcccttgccagcatccagccatgggggatatgaaaaccccagattttgatgaccttctggctgcctttgacatcccagaccccaccagccttgatgccaaggaggccatccagacacccagtgaggagaatgagagtcccctcaaacctccaggcatatgtatggatgaaagtgtgtccttgtctcactcaggatcagcccccgatgtgccggccgtgagtgtcattgtcaagaacaccagccgccaggagtcatttgaagcggagaaagaccacattactcccagtctcctacacaatggattccggggctcagatctgcctccagatccccacaactgtgggaaatttgattctacttttatgaatggagacagtgccaggagtttccctggcaaactggagcctcccaagtcagagccattacccaccttcaaccagttcagtccaatctccagcccagaacctgaggatcccatcaaagataacggatttgggataaagcccaaacactctgacagttatttcccaccccctcttgggtgcggggctgtgggaggcccagtcctggaggctctggctaagtttccggttccagagctgcatatgtttgatcatttttgtaagaaagaacccaagccagaacccctgcccttggggagccagcaggaacacgagcaaagtgggcagaacacagtggaacctcacaaggatccggatgccactcgattcttcggggaagctttggagttcaacagccatcctagcaacagtattggagagtccaaggggcttgcccgggagcttggtacctgctcatcagtcccccctaggcagcgtctaaagccagctcattccaagctgtcctcttgtgtggcagccttggtggccttgcaggccaaaagagtggctagtgtcactaaggaggatcagcctggccacacaaaggatctctcagggcccactaaagagagttctaaaggtagccccaaaatgcccaagtcaccaaagagtccccggagccctctggaggccactagaaaaagtatcaagccatcggacagccctcgtagcatctgcagtgacagcagcagcaaaggctcaccgtctgtggctgccagctccccaccagcaattcccaaagtgagaatcaaaaccattaagacatcatcaggggaaatcaaacggactgtcacaaggatcctgccagatcctgatgatccaagtaagtcccctgttgggtcacctctagggagcgccattgcagaggcccccagcgagatgccaggggatgaggtgcctgtggaagagcactttcctgaggcaggcacaaattcagggagcccccagggggccaggaaaggggacgagagcatgacaaaggccagtgactcgtcatctcccagctgcagttctgggccccgggtcccaaagggggctgccccaggctcacagacaggcaagaagcaacagagcacagcactgcaggcatccaccctggcccctgccaacctcctgcccaaagccgtgcacttggccaacctgaacctcgtcccccacagtgttgctgcatcagtgacagccaagtcttcagtgcaaagacggagccagccacagcttacacaaatgtcggtgcccctggtccaccaggtgaaaaaggctgccccactgattgtagaggtcttcaacaaggtccttcacagctccaaccccgtgcccctctatgcgccaaatctcagcccgcctgcggacagcaggatccacgtgccggccagtgggtactgctgcctggagtgtggagacgcatttgccttagagaagagcctgagccagcactatggccggcggagcgtccacattgaggtactgtgcacactgtgctccaagacgctgctcttcttcaacaagtgcagcctgctccggcacgcccgtgaccacaagagcaaggggctcgtcatgcagtgttcccagctgctggtgaagcctatctctgcggaccaaatgttcgtgtcggcccctgtgaactccacggcaccagcagccccagccccttcatcctctcccaaacatggcctcacttcgggcagtgccagtccccctcctccagccttgccactctacccagaccctgtgaggctcatccggtactcaatcaagtgtcttgaatgtcacaagcagatgcgggactacatggtcctggctgcacatttccagaggacaacagaggagacagaggggctgacctgccaggtatgccaaatgctgctgcccaaccagtgcagtttctgtgcccaccagcggattcatgcacacaagtccccctactgctgcccggagtgtggggtcctctgccgctctgcctacttccagacccatgtaaaggagaattgcctgcactatgcccgcaaggtgggctacaggtgcatccactgtggtgtcgtccacctgaccttggccttgctgaaaagccacatccaggagcgacactgccaggttttccacaaatgtgcattctgccccatggccttcaagactgccagcagcactgcagaccacagtgccacccagcaccccacccagccccacagaccctcccagctcatttataagtgctcctgtgaaatggtcttcaacaagaagaggcacattcagcagcatttttaccagaatgtcagcaagacgcaggtgggcgtcttcaagtgccctgagtgcccactcttgttcgtgcagaagccggagttgatgcaacacgtcaagagcacccacggtgttccccgaaatgtggacgagctgtcaagcctccagtcttcagcggacacatcctcaagccgccctggctctcgagttcccactgagccaccagccactagtgtggctgctcggagcagctccctgccttctggccgctggggtaggcctgaagcccaccgcagggtggaagccaggccgcggctgaggaacactggctggacctgccaggagtgccaggagtgggttccagatcgggagagctacgtgtcccacatgaaaaagagccacggtcggacattgaagcggtacccatgccggcagtgtgaacagtccttccacacccccaacagcctgcgcaaacacatccgcaacaaccatgacacagtaaagaagttctacacctgcgggtactgcacagaggacagccccagctttcctcggccctcccttctggagagccacatcagccttatgcatggcatcagaaaccctgatttgagccagacgtccaaagtgaaacctccgggtggacattcccctcaggtgaaccatctgaaaagaccagtcagtggagtgggggacgctccaggcaccagcaatggcgcaactgtctcttccaccaaaaggcacaagtccctttttcagtgcgcgaaatgtagttttgccacagactcggggctcgagtttcagagccacatacctcagcaccaggtggacagctccacagcccaatgtctcctctgtggtttgtgctacacctctgccagctccctcagccgccacctcttcattgtccacaaggtgagagaccaggaggaggaggaggaagaggaggcggcggcagcggagatggcagtggaggtggcagagccagaggagggctccggggaggaggtgcccatggagactagagagaatggactggaagaatgtgccggtgagcctttgtcagctgacccagaggcgaggagattgctgggcccggcccctgaggacgatggtggccacaatgatcacagtcaaccacaggcctctcaggaccaggacagccacacactgtcccctcaggtgtgaccggagactttgcagtgtgcatggtcaggggtggtgccgaagtgtcttccacctgccctgcggaccgtggaaaataaaaggctctgcccccagtgtgagtgtgaccggttgtaccctggagtagtgtctgccctgagctgccagtgctgggtatcccccagccccaggaaatgtggggtcggccaggaccctcacagctctgaatttgcttctgttatttatggcttttcgctgcttcttggtgccccatctcttgtctgtgtccttccaaccccaagctgcttatgtggcccaaccccactgctgtcaactaggcttgaaccccacagcggctgtgctcttctgggaggttcccgcttgctgccttcagccagggcgctcctcagagctctattttcctgcagacaccagctctccttcctgcctttagatcctgagaaggagggaaatgaggggtgctgacacagtccctctgggagagctctgcctagtctggtttggcgagggcccttgatcaccttgcccctcctccctgtcttctctgattcttttccctcaaaatagtcctgagaactaattgtcacactggctcatcatgtctctgtgggtggggtgggagaaacctctgctgcacacctctgtttggaacctgggcagagcaggaggtaaggcaaaggcaggcaggcaccaagaaccagaccccttgagaaggcgctgtgggtgggtctttgttctgctgttctgcctttcctgacaggtggggttggggcacacagacattggaatatttgtactgctctcgtgccatttgagaggctgctgccccaggcaggccagcccctactcctcttggctacactcatgttgctcagactatatttcaaataaaaaatcttctcaccatgcaggtaggctcttgtattcctctccaagtgagcctggccccaccctattccacccaagggtctttcccagacttcccctgtttgtcccatctctgagggagaacaatacttcctactgtctaaggaaggccttctctagattctggagcttgtggttaggaaaccgggagccctgtactacttagttctctagagaccttctgaaggggtgaggggagcggctccacaatggtcaagtcacctccaagatctccaggctagtgacattggctttagggcgtatcgaaattttctaggcaccttcatctttccttcagttgattttcaacataagagaaccccttactggtaaaaagggaaaagggggtggagaagaggaattttataattttcttatagcattcaagaggtttcttatttcttacagcatcgctactgccacagagaactcaaatgtggcagaactgggattagacttgggagactggctgtcttttcactgatggtggagtcagggcccacccaagcacgaggagcaggctgtgtggaggtgtcgtctgacctctaacccaggtggcatggggttgcgcccagcaggatgtagtggagtaaagggaagagggtgctggccgggtgcttagaggtcatctttcaaggaggcattaaatatcaattataaattattaagtcagataaatatgcctgaccttttcacagttgaaaaaatacattttttcccctctatcaaatgccaagtttttagtggaaatgctaatggcagtgggaaaggttgcctcactttcagagagactctcgctgtctgcacccttttaataattgctcttcctggcaaggctgccacttccctgcctccccagctggcagtggggcaacccaggcctgtttccagctacctgcaaagccagacctagacctgccgtagctgttgtcccatgcctaattctagttacaggaagccatccctgtaccctgggtccattcacaggaatgggttccagaggaggctgatagaagggtttgaaatgactggctggatcccttcctgctcagacacagtggtagctggagagcaggcagagatggtagaattgcaggtttgaccacctgtcgtgaccccagatatacatctccttcctgggaagaacgtgagttggaaaaatgctgagccagtccctggaaaacctgggtcctggcctggattctgtccttagccagctcttaacaaatcccttaacctcactgtctcctctccttcacaatagagttagtaattcccatccaactggcttcacaggcttttgtgagcttatgaatgtgaaagtattttctagtttataaaacactatatgaatgtggggaaatctttacttgaccttagggcatggagggtggagcacattttgtctgctgtttggacttggatgctgattagcagttatgaagtggcccagacacctagccattctttagtaagagtgaagatagcattttaagccctccttgtgtgcctagcatcttactgaacactttctggtgattctctcctttaatcctcacaaagatctcacagttgtcctccattttacggagaagaaaccgaggctccgagaggttaaacgatgtgcagaggctacctgtagtgatggtgctgagtcaagcctgtcaaccactgtgctcgttagtgaccaaggctgctttgacaggctgccagcttgtcagtggtttgcagccccccagacatttgctttcctacttcccatgcagttggggtgccctgccaagtgccaggttctctttggagtccatctgtgccttgtcaccccaaggagggcctcgagcatcacaccgttgacatttcgaaacgtggtatctctacaacctttcattctcattgggatttaccttgccatttgaacaccatcattttttgaggactgtctagaaaaggttgcctaaccctcacagggaacacacagttccctcagagtccagcatcttctggtcttttctttttcaagatttttttaaatggttgtgctatcatttgtcatcatcagaaaatgcttgctgtaacaagcgtttatctgcacattatgctgcagtgaatgctctactgatcaagttaaacagataagatcccttcccttgtagaaactacaacttaatacagtctaagacttgacaaattacttagtatttattttccaactgctttatctctgtaaaatgatatgctgaattattataagctaattgttgtagaaagaactttccccttaacttatgtaaacagtctggttttaaaaaatttgataattgtggcccagtaagctcaacactttgccttccccaagactggggaacctctgtcctgttcaccactgtatattcagcaccaggcagtttctttttttgtttgtttgtttttttgttttgaaaaattaatacatatacatggtaagacattccacaatacaaaagggtatacaataaatggtaagcttccccatggaggtcagcctctagtcccctctccagagttaatcactgttatctatatgttgtgtatcctttcatagcaattctatgcatttacaagtttataaatatgtatatttatatatctatttttaatacaaatagtagaattctatacacagtgttctgaagcttgctttcttatatagtattttggagattattccaaattcatacattgggtcagagtaattctttaaaagttccttgcatataacagtgattcaaaaagtatatggatgaatgagtgaatgctgcatgaatgaatgaatctgattcaattggtagctacagctgttctctcagggtctgatctgaccaagacagcaccttctagattctagaatgtgtcctcctgactaaggggttcaggatactgttcaccttctccaacagatgccaccggagccttaggaactgggcacaggaagccttgggcccctggaggaaaaagttgagactaggacgcaggtcccaagtatgggatttttttgggttcctacttaaaatgcttttttctttattggaaaatgatgtaacattttagagaaattaaaaagcacacatatttataa

SEQ ID NO: 203131 - DNA, 3910 bp, Homo sapiens
  Payload ID: 20056
  Gene Name: zinc finger protein 592
  ENST ID: ENST00000559607
  CDS Start-End: 73-2649
gggggctccaaagccgaaagaggaggtccctacctgccacggataccagtcagcccttgccagcatccagccatgggggatatgaaaaccccagattttgatgaccttctggctgcctttgacatcccagaccccaccagccttgatgccaaggaggccatccagacacccagtgaggagaatgagagtcccctcaaacctccaggcatatgtatggatgaaagtgtgtccttgtctcactcaggatcagcccccgatgtgccggccgtgagtgtcattgtcaagaacaccagccgccaggagtcatttgaagcggagaaagaccacattactcccagtctcctacacaatggattccggggctcagatctgcctccagatccccacaactgtgggaaatttgattctacttttatgaatggagacagtgccaggagtttccctggcaaactggagcctcccaagtcagagccattacccaccttcaaccagttcagtccaatctccagcccagaacctgaggatcccatcaaagataacggatttgggataaagcccaaacactctgacagttatttcccaccccctcttgggtgcggggctgtgggaggcccagtcctggaggctctggctaagtttccggttccagagctgcatatgtttgatcatttttgtaagaaagaacccaagccagaacccctgcccttggggagccagcaggaacacgagcaaagtgggcagaacacagtggaacctcacaaggatccggatgccactcgattcttcggggaagctttggagttcaacagccatcctagcaacagtattggagagtccaaggggcttgcccgggagcttggtacctgctcatcagtcccccctaggcagcgtctaaagccagctcattccaagctgtcctcttgtgtggcagccttggtggccttgcaggccaaaagagtggctagtgtcactaaggaggatcagcctggccacacaaaggatctctcagggcccactaaagagagttctaaaggtagccccaaaatgcccaagtcaccaaagagtccccggagccctctggaggccactagaaaaagtatcaagccatcggacagccctcgtagcatctgcagtgacagcagcagcaaaggctcaccgtctgtggctgccagctccccaccagcaattcccaaagtgagaatcaaaaccattaagacatcatcaggggaaatcaaacggactgtcacaaggatcctgccagatcctgatgatccaagtaagtcccctgttgggtcacctctagggagcgccattgcagaggcccccagcgagatgccaggggatgaggtgcctgtggaagagcactttcctgaggcaggcacaaattcagggagcccccagggggccaggaaaggggacgagagcatgacaaaggccagtgactcgtcatctcccagctgcagttctgggccccgggtcccaaagggggctgccccaggctcacagacaggcaagaagcaacagagcacagcactgcaggcatccaccctggcccctgccaacctcctgcccaaagccgtgcacttggccaacctgaacctcgtcccccacagtgttgctgcatcagtgacagccaagtcttcagtgcaaagacggagccagccacagcttacacaaatgtcggtgcccctggtccaccaggtgaaaaaggctgccccactgattgtagaggtcttcaacaaggtccttcacagctccaaccccgtgcccctctatgcgccaaatctcagcccgcctgcggacagcaggatccacgtgccggccagtgggtactgctgcctggagtgtggagacgcatttgccttagagaagagcctgagccagcactatggccggcggagcgtccacattgaggtactgtgcacactgtgctccaagacgctgctcttcttcaacaagtgcagcctgctccggcacgcccgtgaccacaagagcaaggggctcgtcatgcagtgttcccagctgctggtgaagcctatctctgcggaccaaatgttcgtgtcggcccctgtgaactccacggcaccagcagccccagccccttcatcctctcccaaacatggcctcacttcgggcagtgccagtccccctcctccagccttgccactctacccagaccctgtgaggctcatccggtactcaatcaagtgtcttgaatgtcacaagcagatgcgggactacatggtcctggctgcacatttccagaggacaacagaggagacagaggggctgacctgccaggtatgccaaatgctgctgcccaaccagtgcagtttctgtgcccaccagcggattcatgcacacaagtccccctactgctgcccggagtgtggggtcctctgccgctctgcctacttccagacccatgtaaaggagaattgcctgcactatgcccgcaaggtgcatccactgtggtgtcgtccacctgaccttggccttgctgaaaagccacatccaggagcgacactgccaggttttccacaaatgtgcattctgccccatggccttcaagactgccagcagcactgcagaccacagtgccacccagcaccccacccagccccacagaccctcccagctcatttataagtgctcctgtgaaatggtcttcaacaagaagaggcacattcagcagcatttttaccagaatgtcagcaagacgcaggtgggcgtcttcaagtgccctgagtgcccactcttgttcgtgcagaagccggagttgatgcaacacgtcaagagcacccacggtgttccccgaaatgtggacgagctgtcaagcctccagtcttcagcggacacatcctcaagccgccctggctctcgagttcccactgagccaccagccactagtgtggctgctcggagcagctccctgccttctggccgctggggtaggcctgaagcccaccgcagggtggaagccaggccgcggctgaggaacactggctggacctgccaggagtgccaggagtgggttccagatcgggagagctacgtgtcccacatgaaaaagagccacggtcggacattgaagcggtacccatgccggcagtgtgaacagtccttccacacccccaacagcctgcgcaaacacatccgcaacaaccatgacacagtaaagaagttctacacctgcgggtactgcacagaggacagccccagctttcctcggccctcccttctggagagccacatcagccttatgcatggcatcagaaaccctgatttgagccagacgtccaaagtgaaacctccgggtggacattcccctcaggtgaaccatctgaaaagaccagtcagtggagtgggggacgctccaggcaccagcaatggcgcaactgtctcttccaccaaaaggcacaagtccctttttcagtgcgcgaaatgtagttttgccacagactcggggctcgagtttcagagccacatacctcagcaccaggtggacagctccacagcccaatgtctcctctgtggtttgtgctacacctctgccagctccctcagccgccacctcttcattgtccacaaggtgagagaccaggaggaggaggaggaagaggaggcggcggcagcggagatggcagtggaggtggcagagccagaggagggctccggggaggaggtgcccatggagactagagagaatggactggaagaatgtgccggtgagcctttgtcagctgacccagaggcgaggagattgctgggcccggcccctgaggacgatggtggccacaatgatcacagtcaaccacaggcctctcaggaccaggacagccacacactgtcccctcaggtgtgaccggagactttgcagtgtgcatggtcaggggtggtgccgaagtgt

SEQ ID NO: 203132 - DNA, 1885 bp, Homo sapiens
  Payload ID: 20057
  Gene Name: zinc finger protein 593
  ENST ID: ENST00000270812
  CDS Start-End: 43-513
gccctgctcctggccccttggccggccgggctgtttctggccatgggtcgctcccgccggacaggcgcgcaccgagcgcactctctagcccggcagatgaaggcgaagcggcggcggccggacttggatgagattcaccgcgagctgcggcctcagggatccgcacgaccccagcccgacccaaacgccgagttcgaccccgacctgccagggggcggtctgcaccgctgtctggcctgcgcgaggtacttcatcgattccaccaacctgaagacccacttccgatccaaagaccacaagaaaaggtatgaaggagtaaggagaggattgatggatgggtgctcagcagatagggctctcacctggtcagctcccaactcctgtttttctttctcccaggctgaagcagctgagcgtcgagccctacagtcaggaagaggcggagagggcagcgggtatgggatcctatgtgccccccaggcggctggcagtgcccacggaagtgtccactgaggtccctgagatggatacctctacctgacatggcctgaagatgcagggcagaggaattgcccatggacagtgacgcaaggactaggctgggagggagcgtgccaaccccttttgcctctgggtttggggagcggagggcctcttcttggtgccctgccccaaataaaggaactggacaaagagaacttgcctccaactctaacttccaggccgctgtctcaaactcctgccctggaagggcttctctactactttctgtacaccaggcctagggtgtctactccccacttggtctatctctgccttccctctgaggtcctagcatctgaactggagcacccagatggaggcctgatgcagtgtggggtggcgggagtgggatcagattactctgtcctgcttctgacagagactgatccccagaaaagaaggcttctgagattgcacccccctcccgagtcacctacccccagcatccaagtgagagtctctcttcttcgttacggggcccgtggcacccgccgctgccccaccatcttccagacggcatagcaggagccacccaggccgaggacagctagcactgtagccacaactcctgccagcagactccggggctctgccttcagctcaccagctacctgcatctggaggtgcacagagggtgtgcctcaggggtcagttgagactgccaggaaggtggggagtgggaaagggctgagtagatgtagctaggggaaggagacatggacgccggtcctgccccagggagattccaccccaatccctttcgcctcactgcccatctgggcctgcctgctcaggcggcagggaacgtgacagcctggctgttgggggtgtcaacccagctatggtagggggaggaaggggtcagtcgtgccagaaaccgttgatcaggggtacttacctgtaacacccggaagtaaccaggggtcaagcgtcgaaatcgcatggtgggcggcactggtctccctggcggcctgtagggtgggagcggacgtgaagaccagtggtcttcatgacaccaagaagtggaaactagggtagaggggtctctgaccttccacatacgcaagacccaagctctcagaggatgctcacccgcgcctgcctgcccaggtctggcagggggcggagcaactggacctttaaatctggtcccttcccccactgcctaccatcctgccagccttagaagcagctgtcaaaagagatcagcatcaggcttgagcggcacctcccccactctccgaggaggcgggtccggttaggcaggagaggccttggctggcagtgctcaggagtcccaggcctggaccaggtactgggcgggcctccctcagccctggtc

SEQ ID NO: 203133 - DNA, 1862 bp, Homo sapiens
  Payload ID: 20057
  Gene Name: zinc finger protein 593
  Uniprot ID: O00488
  ENST ID: ENST00000374266
  CDS Start-End: 114-518
gagcctgcctagccccccggcgtggcctgacgtagctgatcggcccggaagtgctcacacgtgtgctccctgccctgctcctggccccttggccggccgggctgtttctggccatgggtcgctcccgccggacaggcgcgcaccgagcgcactctctagcccggcagatgaaggcgaagcggcggcggccggacttggatgagattcaccgcgagctgcggcctcagggatccgcacgaccccagcccgacccaaacgccgagttcgaccccgacctgccagggggcggtctgcaccgctgtctggcctgcgcgaggtacttcatcgattccaccaacctgaagacccacttccgatccaaagaccacaagaaaaggctgaagcagctgagcgtcgagccctacagtcaggaagaggcggagagggcagcgggtatgggatcctatgtgccccccaggcggctggcagtgcccacggaagtgtccactgaggtccctgagatggatacctctacctgacatggcctgaagatgcagggcagaggaattgcccatggacagtgacgcaaggactaggctgggagggagcgtgccaaccccttttgcctctgggtttggggagcggagggcctcttcttggtgccctgccccaaataaaggaactggacaaagagaacttgcctccaactctaacttccaggccgctgtctcaaactcctgccctggaagggcttctctactactttctgtacaccaggcctagggtgtctactccccacttggtctatctctgccttccctctgaggtcctagcatctgaactggagcacccagatggaggcctgatgcagtgtggggtggcgggagtgggatcagattactctgtcctgcttctgacagagactgatccccagaaaagaaggcttctgagattgcacccccctcccgagtcacctacccccagcatccaagtgagagtctctcttcttcgttacggggcccgtggcacccgccgctgccccaccatcttccagacggcatagcaggagccacccaggccgaggacagctagcactgtagccacaactcctgccagcagactccggggctctgccttcagctcaccagctacctgcatctggaggtgcacagagggtgtgcctcaggggtcagttgagactgccaggaaggtggggagtgggaaagggctgagtagatgtagctaggggaaggagacatggacgccggtcctgccccagggagattccaccccaatccctttcgcctcactgcccatctgggcctgcctgctcaggcggcagggaacgtgacagcctggctgttgggggtgtcaacccagctatggtagggggaggaaggggtcagtcgtgccagaaaccgttgatcaggggtacttacctgtaacacccggaagtaaccaggggtcaagcgtcgaaatcgcatggtgggcggcactggtctccctggcggcctgtagggtgggagcggacgtgaagaccagtggtcttcatgacaccaagaagtggaaactagggtagaggggtctctgaccttccacatacgcaagacccaagctctcagaggatgctcacccgcgcctgcctgcccaggtctggcagggggcggagcaactggacctttaaatctggtcccttcccccactgcctaccatcctgccagccttagaagcagctgtcaaaagagatcagcatcaggcttgagcggcacctcccccactctccgaggaggcgggtccggttaggcaggagaggccttggctggcagtgctcaggagtcccaggcctggaccaggtactgggcgggcctccctcagccctggtc

SEQ ID NO: 203134 - DNA, 4862 bp, Homo sapiens
  Payload ID: 20058
  Gene Name: zinc finger protein 594
  Uniprot ID: Q96JF6
  ENST ID: ENST00000399604
  CDS Start-End: 142-2565
ctcagctttggcagggaaaggtcttctgagttctttgttcctccctcttagactgcccagtataatgaagagatgatatttgtattttaggaattatagaatgatctacttatcatttcagattctgaagacaggaataagatgaaggaatggaaatcaaagatggaaatttctgaagaaaagaagtcagcaagggctgcatccgaaaaactccaaagacaaatcacccaggaatgtgagttagttgaaaccagtaattctgaggacagattattgaagcactgggtaagccctttaaaggatgcaatgagacatctcccttcccaagagagcggtatcagggaaatgcatattatcccccagaaagccattgtgggagagattggccatggatgtaatgaaggagaaaaaatactttctgcaggagaaagctcccatagatatgaggttagtggccaaaacttcaaacagaagtcaggattaactgaacatcagaaaattcataatataaataagacctatgaatgtaaggaatgtgaaaaaaccttcaacaggagttcaaacctgatcatacatcagagaattcatacaggaaataagccatatgtgtgtaatgaatgtgggaaagactctaatcaaagttcaaatcttattatacatcagagaattcatacaggaaagaaaccttatatatgtcatgaatgtggaaaagacttcaatcagagctccaatctggtgagacataagcaaattcacagtggtgggaatccctatgagtgcaaagagtgtgggaaggcttttaagggaagctcaaaccttgtcctgcaccagagaatccacagtagggggaagccatatttatgcaataaatgtgggaaggctttcagtcaaagcacagatcttattatacatcacagaattcacactggagagaaaccctatgaatgttatgactgtggacagatgttcagtcaaagttcacaccttgtcccacatcagagaattcacactggagagaaacccctcaaatgtaatgaatgtgaaaaagccttcaggcagcattctcaccttactgaacaccagagactccacagtggagagaaaccctatgaatgtcacagatgtgggaagaccttcagtgggcgcacagcttttcttaaacatcagagattgcatgctggagagaaaattgaagaatgtgagaaaaccttcagcaaggatgaggagcttagggaagagcagagaattcaccaggaagagaaagcttattggtgtaatcagtgtggtaggaatttccagggcacctcagacctcatcagacatcaggtaactcatacaggagagaaaccatatgaatgtaaagaatgtgggaaaactttcaatcagagctcagaccttctgagacatcatagaattcacagtggagaaaaaccttgtgtatgtagcaaatgtgggaaatcttttaggggcagctcagatcttattagacaccatcgtgttcatactggagagaaaccctatgaatgtagtgaatgtgggaaagcctttagccagaggtcacaccttgttacacaccagaaaatccatactggagagaagccctatcagtgcactgaatgtgggaaagccttcaggcggcgttcactccttattcaacatcggagaattcatagtggtgagaaaccctatgaatgtaaggaatgtgggaagctcttcatttggcgcacagctttcctcaaacatcagagcctgcatactggagagaaacttgaatgtgagaaaaccttcagccaggatgaggagcttaggggagagcagaaaattcaccaggaagcgaaagcttattggtgtaatcagtgtggtagggctttccagggcagctcagacctcatcagacatcaggtaactcatacaagagagaaaccatatgaatgcaaagaatgtgggaaaactttcaatcagagctcagaccttctgagacatcatagaattcacagtggagaaaaaccttatgtatgcaacaaatgtgggaaatcttttaggggtagctcagatcttattaaacaccatcgtattcatactggagagaaaccctatgaatgtagtgaatgtgggaaagccttcagccagaggtcacaccttgctacacaccagaaaatccatactggagagaaaccctatcagtgcagtgaatgtgggaatgccttcaggcggcgttccctccttattcaacatcggagacttcatagtggtgagaaaccctatgaatgtaaggaatgtgggaaactcttcatgtggcacacggctttcctcaaacatcagagactgcatgctggagagaaacttgaagaatgtgagaaaaccttcagcaaggatgaggagcttagaaaagagcagagaactcaccaggaaaagaaagtttattggtgtaatcagtgtagtaggaccttccagggcagctcagatctcatcagacatcaggtaactcatacaagagagaaaccatatgaatgtaaagaatgtgggaaaactcaatcagagctcagaccttctgagacatcatagaattcacagtggagaaaaaccttacgtatgcaataaatgtggggaatcttttaggagcagctcagatcttattaaacaccatcgtgttcatactggagagaaacctcatgaatgtagtgaatgtgggaaagtctttagccagaggtcccaccttgtcacacaccagaaaatccacactggagagaagccctatcagtgcactgaatgtgaaaaagccttcaggcggcgttcactccttattcaacgtcggagaattcatagtggtgagaaaccctatgaatgtaaggaatgtgggaaactcttcatgtggcacacagctttcctcaaacatcagagactgcatgctggagagaaacttgaagaacgtgagaaaaccttcagcaaggatgaggagcttaggggagagcagaaaattcaccaagaagagaaagcttattggtgtaatcagtgtggtagggctttccagggcagctcagacctcatcggacatcaggtaactcatacaggagagaaaccatatgaatgtaaagaatgtgggaaaactttcaatcagagctcagaccttctgagacatcatagaattcacagtggagaaaaaccttatgtatgcaacaaatgtgggaaatcttttaggggcagctcagatcttattagacaccatcgtgttcatactggagagaaaccctatgaatgccctgaatgttggaaggccttcagtcagaactcacaccttgtcagtcatcaaagaattcataccagagagaaaccctttgaatgtagcaactgtggtaaggccttcagtgggtggacagcttttcttaagcaccagaaacttcacattggaaaggaatttgaagactgtaagagtctacaaacaggacctattctaataggtagcagaaacctaatgaatgcagtaaaactaggaaaagtctgatggagaccacatcttattgcactacaaatgagttttattagaaaaaaaccatgggaaggtgggaaagcagagaaaatacctactggatttttcaaacgtaagtataatcaagtggaaaagccaaaagctcttggacataatcaccttttttttttctgtctcagaactgacactagaatatggtcccaacgatacaattttttaaattatttattttttaacatacaaagagatgaggtctcactatgttgcccaggctggacttgaactcttgggctcaagcactcctccctcctcagcctcccaaagggttgggattaccggcatgagccactgcaccagccccaggggtctaattacttgagaatgttttaagggatgtctatcattattaaaatcattataaatcactttggcaacaaccccaaaactaaattattcatggaaagagccatttcaatcttgacttcctagtcgagtgacaagtttaaatgtgggaaaaaaccctgtgaaagtaatgagtgtaggccaggtgcggtggctcgtacctgtaatccagcactttgggaagccaaggtgggcagatcacgaggtcacgagttgatcatgaggagttactatgcccagccaacatactaaaaccccgtctctactaaaaataacaaaaattagccaggcatggtggggcacgcctgtagtcccaggtacttgcgaggctagggcaggagaatcacttgaacctgggaggtggaggttgcggtgagccaagatcatgccactgcactccagcctgggcaacaagtgcgaaactccatctcaaaaaaaaaaaaaagtctaactcttctgcttgtctttacaatgctgtacagtgagagctaatgtttataaggataaacaggatacttacagggatttgaaggtaatttaattcagtggtttccaactttttaatcaccaaggccttctttttactcccctatgtcctgtgtcttaaaagattatgtttaccaaactgcatttattaaagaattatattttgctacataaaggcatgtacaacacaaatcatgcttctgactggcaccatgtaggcagacctaggtactaaaattccagcccaaagcaaataatttaccattttcattagtctttttattccttttgtgggcaaacatatcgtctatgttaggctttttgaaatattaactatgacttgtaaactccagattaaaaactaaccaattcatctttgatggagcttgaatcaaactaagggtattggacttttgaaagattgaaatttttgttacagtatggaatgtttttaactgaatgttgaaataaaagttatttaagaatt

SEQ ID NO: 203135 - DNA, 4335 bp, Homo sapiens
  Payload ID: 20058
  Gene Name: zinc finger protein 594
  Uniprot ID: Q96JF6
  ENST ID: ENST00000575779
  CDS Start-End: 157-2580
agtcccggggagcgcaccggaagttctcgcctggcccaggcgcggggtccaagatggtggcgctaggagccgcgacccagtgatagcggccgtggaggggcccccgaccgagcgggaggttgggggtagcctggagattctgaagacaggaataagatgaaggaatggaaatcaaagatggaaatttctgaagaaaagaagtcagcaagggctgcatccgaaaaactccaaagacaaatcacccaggaatgtgagttagttgaaaccagtaattctgaggacagattattgaagcactgggtaagccctttaaaggatgcaatgagacatctcccttcccaagagagcggtatcagggaaatgcatattatcccccagaaagccattgtgggagagattggccatggatgtaatgaaggagaaaaaatactttctgcaggagaaagctcccatagatatgaggttagtggccaaaacttcaaacagaagtcaggattaactgaacatcagaaaattcataatataaataagacctatgaatgtaaggaatgtgaaaaaaccttcaacaggagttcaaacctgatcatacatcagagaattcatacaggaaataagccatatgtgtgtaatgaatgtgggaaagactctaatcaaagttcaaatcttattatacatcagagaattcatacaggaaagaaaccttatatatgtcatgaatgtggaaaagacttcaatcagagctccaatctggtgagacataagcaaattcacagtggtgggaatccctatgagtgcaaagagtgtgggaaggcttttaagggaagctcaaaccttgtcctgcaccagagaatccacagtagggggaagccatatttatgcaataaatgtgggaaggctttcagtcaaagcacagatcttattatacatcacagaattcacactggagagaaaccctatgaatgttatgactgtggacagatgttcagtcaaagttcacaccttgtcccacatcagagaattcacactggagagaaacccctcaaatgtaatgaatgtgaaaaagccttcaggcagcattctcaccttactgaacaccagagactccacagtggagagaaaccctatgaatgtcacagatgtgggaagaccttcagtgggcgcacagcttttcttaaacatcagagattgcatgctggagagaaaattgaagaatgtgagaaaaccttcagcaaggatgaggagcttagggaagagcagagaattcaccaggaagagaaagcttattggtgtaatcagtgtggtaggaatttccagggcacctcagacctcatcagacatcaggtaactcatacaggagagaaaccatatgaatgtaaagaatgtgggaaaactttcaatcagagctcagaccttctgagacatcatagaattcacagtggagaaaaaccttgtgtatgtagcaaatgtgggaaatcttttaggggcagctcagatcttattagacaccatcgtgttcatactggagagaaaccctatgaatgtagtgaatgtgggaaagcctttagccagaggtcacaccttgttacacaccagaaaatccatactggagagaagccctatcagtgcactgaatgtgggaaagccttcaggcggcgttcactccttattcaacatcggagaattcatagtggtgagaaaccctatgaatgtaaggaatgtgggaagctcttcatttggcgcacagctttcctcaaacatcagagcctgcatactggagagaaacttgaatgtgagaaaaccttcagccaggatgaggagcttaggggagagcagaaaattcaccaggaagcgaaagcttattggtgtaatcagtgtggtagggctttccagggcagctcagacctcatcagacatcaggtaactcatacaagagagaaaccatatgaatgcaaagaatgtgggaaaactttcaatcagagctcagaccttctgagacatcatagaattcacagtggagaaaaaccttatgtatgcaacaaatgtgggaaatcttttaggggtagctcagatcttattaaacaccatcgtattcatactggagagaaaccctatgaatgtagtgaatgtgggaaagccttcagccagaggtcacaccttgctacacaccagaaaatccatactggagagaaaccctatcagtgcagtgaatgtgggaatgccttcaggcggcgttccctccttattcaacatcggagacttcatagtggtgagaaaccctatgaatgtaaggaatgtgggaaactcttcatgtggcacacggctttcctcaaacatcagagactgcatgctggagagaaacttgaagaatgtgagaaaaccttcagcaaggatgaggagcttagaaaagagcagagaactcaccaggaaaagaaagtttattggtgtaatcagtgtagtaggaccttccagggcagctcagatctcatcagacatcaggtaactcatacaagagagaaaccatatgaatgtaaagaatgtgggaaaactcaatcagagctcagaccttctgagacatcatagaattcacagtggagaaaaaccttacgtatgcaataaatgtggggaatcttttaggagcagctcagatcttattaaacaccatcgtgttcatactggagagaaacctcatgaatgtagtgaatgtgggaaagtctttagccagaggtcccaccttgtcacacaccagaaaatccacactggagagaagccctatcagtgcactgaatgtgaaaaagccttcaggcggcgttcactccttattcaacgtcggagaattcatagtggtgagaaaccctatgaatgtaaggaatgtgggaaactcttcatgtggcacacagctttcctcaaacatcagagactgcatgctggagagaaacttgaagaacgtgagaaaaccttcagcaaggatgaggagcttaggggagagcagaaaattcaccaagaagagaaagcttattggtgtaatcagtgtggtagggctttccagggcagctcagacctcatcggacatcaggtaactcatacaggagagaaaccatatgaatgtaaagaatgtgggaaaactttcaatcagagctcagaccttctgagacatcatagaattcacagtggagaaaaaccttatgtatgcaacaaatgtgggaaatcttttaggggcagctcagatcttattagacaccatcgtgttcatactggagagaaaccctatgaatgccctgaatgttggaaggccttcagtcagaactcacaccttgtcagtcatcaaagaattcataccagagagaaaccctttgaatgtagcaactgtggtaaggccttcagtgggtggacagcttttcttaagcaccagaaacttcacattggaaaggaatttgaagactgtaagagtctacaaacaggacctattctaataggtagcagaaacctaatgaatgcagtaaaactaggaaaagtctgatggagaccacatcttattgcactacaaatgagttttattagaaaaaaaccatgggaaggtgggaaagcagagaaaatacctactggatttttcaaacgtaagtataatcaagtggaaaagccaaaagctcttggacataatcaccttttttttttctgtctcagaactgacactagaatatggtcccaacgatacaattttttaaattatttattttttaacatacaaagagatgaggtctcactatgttgcccaggctggacttgaactcttgggctcaagcactcctccctcctcagcctcccaaagggttgggattaccggcatgagccactgcaccagccccaggggtctaattacttgagaatgttttaagggatgtctatcattattaaaatcattataaatcactttggcaacaaccccaaaactaaattattcatggaaagagccatttcaatcttgacttcctagtcgagtgacaagtttaaatgtgggaaaaaaccctgtgaaagtaatgagtgtaggccaggtgcggtggctcgtacctgtaatccagcactttgggaagccaaggtgggcagatcacgaggtcacgagttgatcatgaggagttactatgcccagccaacatactaaaaccccgtctctactaaaaataacaaaaattagccaggcatggtggggcacgcctgtagtcccaggtacttgcgaggctagggcaggagaatcacttgaacctgggaggtggaggttgcggtgagccaagatcatgccactgcactccagcctgggcaacaagtgcgaaactccatctc

SEQ ID NO: 203136 - DNA, 757 bp, Homo sapiens
  Payload ID: 20058
  Gene Name: zinc finger protein 594
  ENST ID: ENST00000576772
  CDS Start-End: 452-757
agttctcgcctggcccaggcgcggggtccaagatggtggcgctaggagccgcgacccagtgatagcggccgtggaggggcccccgaccgagcgggaggttgggggtagcctggaggtgagaccccgctgcgttcacagagctggcggccgcggcgcctgcgtccaccggcaagcgaggagtggagcagagctcatatgcctatggggagaggcctgggggaccgcaggaggatgtaggcgccgggtgcgcatgactgggccttcttgctctcggtcggcttcttggtctcggcgtgccccattcccggccctgtcccgctactcttgcctgttccagttccctcctgtgggtaccgctaacggcatcttcccgaggcccagaatccaccgtcaggcataaattgattattcctcgcccacatctgtgccagattctgaagacaggaataagatgaaggaatggaaatcaaagatggaaatttctgaagaaaagaagtcagcaagggctgcatccgaaaaactccaaagacaaatcacccaggaatgtgagttagttgaaaccagtaattctgaggacagattattgaagcactgggtaagccctttaaaggatgcaatgagacatctcccttcccaagagagcggtatcagggaaatgcatattatcccccagaaagccattgtgggagagattggccatggatgtaatgaaggagaaaaaatactttctgcaggagaaagctcccatagatatgag

SEQ ID NO: 203137 - DNA, 1072 bp, Homo sapiens
  Payload ID: 20059
  Gene Name: zinc finger protein 595
  ENST ID: ENST00000509152
  CDS Start-End: 186-443
ccgggatctggcgcggcgttttcctctggctcctgcgagggcttggtttagggcttcagctctctgcgttctcggctccgggaggcctcggtgattcagccacagcctctgcctcccgttgctctgtgacctgagggtattggacaatttgtagctaagactcccggataccctgaagtcgggaaatggaactcgtaacattcagggatgtggccatagaattctcccctgaagagtggaaatgtctggaccctgcccagcagaatttgtatagagatgtgatgttggagaactacaggaacctggtctccctgggttttgtgatctctaacccagacctggtcacctgtctggagcaaataaaagagccctgcaatttgaagatacatgagacagcagccaaacccccagttgttcagcacttctggtctcttcagttctgatatgattttaggattgcttctttttttttttttgaggcggagtggagtgcagtggcgccatctcgtttcattgcaagttccgcctcccatgttcacaccattgtcctgcctcagcctccctagtagctgggactacaggtgcccgccaccacgcccggctaattttttgtattttagtagagacggggtttcactgagttagccaggatggtctcgatctcctgacctcgtgatccgcccatttcggcctcccgaagtgctgggattacaggtgtgagccactgcaccacgtcaggattgcgtcttatgttaatgcgaaatatgcatagctgtcatccgaagtataccaccattcccttcagcactctacgtcagaggaggcacgtcaggggagacaaaattcctcttcggacagtccctcaaaagacaggaatgtggacatatattccacatttctctttgtctcctgaggaagaagcatagagttgggagtttctcctggattgcaccatgctgtattgggaggaggtcaggctgcgctgggcatatctaataagctttttcttctcttctacatgtttttggcattgtgctcaactgaagtagtacaaattcttaactatgttcag

SEQ ID NO: 203138 - DNA, 1999 bp, Homo sapiens
  Payload ID: 20059
  Gene Name: zinc finger protein 595
  ENST ID: ENST00000608255
  CDS Start-End: 530-1927
gagaggaggggttggcttccgggatctggcgcggcgttttcctctggctcctgcgagggcttggtttagggcttcagctctctgcgttctcggctccgggaggcctcggtgattcagccacagcctctgcctcccgttgctctgtgacctgagggtattggacaatttgtagctaagactcccggataccctgaagtcgggaaatgctatatgttctcctttcagccaagacctttcaccagtgcaggggatagaagattcattccacaaacttatactgaaaagatacgagaaatgtggacatgagaatttacaattaagaaaaggctgtaaacgtgtgaatgagtgtaaggtgcagaaaggagttaataatggagtttaccagtgcttgtcaactacccagagcaaaatatttcaatgtaatacatgtgttaaagtttttagtaaattttcaaattcaaacaaacataagataagacatactggagagaaaccctttaaatgtacagaatgtggcagatcgttttacatgtcacacctaactcaacatacaggaattcatgctggagagaaaccctacaaatgtgaaaaatgtggcaaagcctttaataggtccacatcacttagtaaacataagagaattcatactggagagaaaccctacacatgtgaagaatgtggcaaagcctttagacggtccacagttctgaacgaacataagaaaattcatactggagagaaaccctacaaatgtgaagaatgtggcaaagcctttacaaggtccacaacactgaatgaacacaagaaaattcatactggagagaaaccctacaaatgtaaagaatgtggcaaagcctttagatggtccacaagcctgaatgaacataagaatattcatactggagagaaaccctacaaatgtaaagaatgtggcaaagcctttagacagtccaggagcctgaatgaacataaaaatattcatactggcgaaaaaccctacacatgtgaaaaatgtggcaaagcttttaaccaatcctcaagtcttattatacacaggagcattcattctgaacaaaaactttacaaatgtgaagaatgtggcaaagcctttacttggtcctcatcccttaataaacataagagaattcatactggagagaaaccctacacatgtgaagaatgtggcaaagctttttataggtcctcacaccttgctaaacataagagaattcatactggagagaaaccctacacgtgcgaagaatgtggcaaagcttttaaccaatcctcaactcttatattacacaagagaatccattctgggcaaaaaccttacaaatgtgaagaatgtggcaaagcctttacacggtccacaacactgaacgaacataagaaaattcatactggcgagaaaccctacaaatgtgaagaatgtggcaaagctttcatatggtccgcaagcctgaatgaacataagaatattcatactggagagaaaccctacaaatgtaaagaatgtggcaaagcttttaaccaatcctcaggccttattatacacaggagcattcattctgaacaaaaactttacaaatgtgaagaatgtggcaaagcctttactcggtccacagccctgaatgaacataagaaaattcattctggagagaaaccctacaaatgcaaagaatgtggcaaagcctataacttatcctcaacccttactaaacataagagaattcatactggagagaaacccttcacatgtgaagaatgtggcaaagccttcaattggtcctcatcccttactaaacataagataattcatactggagagaaatcctacaaatgtgaagaatgtggcaaagcttttaatcggccctcaacccttactgtacacaagcgaattcatactggcaaggaacatagttgaatgacatttctagtaatctctaattccagtgtctttacacagcaaataaattggagaatattgctcccatat

SEQ ID NO: 203139 - DNA, 2115 bp, Homo sapiens
  Payload ID: 20059
  Gene Name: zinc finger protein 595
  ENST ID: ENST00000609518
  CDS Start-End: 195-2045
ggttggcttccgggatctggcgcggcgttttcctctggctcctgcgagggcttggtttagggcttcagctctctgcgttctcggctccgggaggcctcggtgattcagccacagcctctgcctcccgttgctctgtgacctgagggtattggacaatttgtagctaagactcccggataccctgaagtcgggaaatggaactcgtaacattcagggatgtggccatagaattctcccctgaagagtggaaatgtctggaccctgcccagcagaatttgtatagagatgtgatgttggagaactacaggaacctggtctccctggctatatgttctcctttcagccaagacctttcaccagtgcaggggatagaagattcattccacaaacttatactgaaaagatacgagaaatgtggacatgagaatttacaattaagaaaaggctgtaaacgtgtgaatgagtgtaaggtgcagaaaggagttaataatggagtttaccagtgcttgtcaactacccagagcaaaatatttcaatgtaatacatgtgttaaagtttttagtaaattttcaaattcaaacaaacataagataagacatactggagagaaaccctttaaatgtacagaatgtggcagatcgttttacatgtcacacctaactcaacatacaggaattcatgctggagagaaaccctacaaatgtgaaaaatgtggcaaagcctttaataggtccacatcacttagtaaacataagagaattcatactggagagaaaccctacacatgtgaagaatgtggcaaagcctttagacggtccacagttctgaacgaacataagaaaattcatactggagagaaaccctacaaatgtgaagaatgtggcaaagcctttacaaggtccacaacactgaatgaacacaagaaaattcatactggagagaaaccctacaaatgtaaagaatgtggcaaagcctttagatggtccacaagcctgaatgaacataagaatattcatactggagagaaaccctacaaatgtaaagaatgtggcaaagcctttagacagtccaggagcctgaatgaacataaaaatattcatactggcgaaaaaccctacacatgtgaaaaatgtggcaaagcttttaaccaatcctcaagtcttattatacacaggagcattcattctgaacaaaaactttacaaatgtgaagaatgtggcaaagcctttacttggtcctcatcccttaataaacataagagaattcatactggagagaaaccctacacatgtgaagaatgtggcaaagctttttataggtcctcacaccttgctaaacataagagaattcatactggagagaaaccctacacgtgcgaagaatgtggcaaagcttttaaccaatcctcaactcttatattacacaagagaatccattctgggcaaaaaccttacaaatgtgaagaatgtggcaaagcctttacacggtccacaacactgaacgaacataagaaaattcatactggcgagaaaccctacaaatgtgaagaatgtggcaaagctttcatatggtccgcaagcctgaatgaacataagaatattcatactggagagaaaccctacaaatgtaaagaatgtggcaaagcttttaaccaatcctcaggccttattatacacaggagcattcattctgaacaaaaactttacaaatgtgaagaatgtggcaaagcctttactcggtccacagccctgaatgaacataagaaaattcattctggagagaaaccctacaaatgcaaagaatgtggcaaagcctataacttatcctcaacccttactaaacataagagaattcatactggagagaaacccttcacatgtgaagaatgtggcaaagccttcaattggtcctcatcccttactaaacataagataattcatactggagagaaatcctacaaatgtgaagaatgtggcaaagcttttaatcggccctcaacccttactgtacacaagcgaattcatactggcaaggaacatagttgaatgacatttctagtaatctctaattccagtgtctttacacagcaaataaattggagaatattgctcccat

SEQ ID NO: 203140 - DNA, 2911 bp, Homo sapiens
  Payload ID: 20059
  Gene Name: zinc finger protein 595
  ENST ID: ENST00000610261
  CDS Start-End: 205-2151
agagaggaggggttggcttccgggatctggcgcggcgttttcctctggctcctgcgagggcttggtttagggcttcagctctctgcgttctcggctccgggaggcctcggtgattcagccacagcctctgcctcccgttgctctgtgacctgagggtattggacaatttgtagctaagactcccggataccctgaagtcgggaaatggaactcgtaacattcagggatgtggccatagaattctcccctgaagagtggaaatgtctggaccctgcccagcagaatttgtatagagatgtgatgttggagaactacaggaacctggtctccctgggttttgtgatctctaacccagacctggtcacctgtctggagcaaataaaagagccctgcaatttgaagatacatgagacagcagccaaacccccagctatatgttctcctttcagccaagacctttcaccagtgcaggggatagaagattcattccacaaacttatactgaaaagatacgagaaatgtggacatgagaatttacaattaagaaaaggctgtaaacgtgtgaatgagtgtaaggtgcagaaaggagttaataatggagtttaccagtgcttgtcaactacccagagcaaaatatttcaatgtaatacatgtgttaaagtttttagtaaattttcaaattcaaacaaacataagataagacatactggagagaaaccctttaaatgtacagaatgtggcagatcgttttacatgtcacacctaactcaacatacaggaattcatgctggagagaaaccctacaaatgtgaaaaatgtggcaaagcctttaataggtccacatcacttagtaaacataagagaattcatactggagagaaaccctacacatgtgaagaatgtggcaaagcctttagacggtccacagttctgaacgaacataagaaaattcatactggagagaaaccctacaaatgtgaagaatgtggcaaagcctttacaaggtccacaacactgaatgaacacaagaaaattcatactggagagaaaccctacaaatgtaaagaatgtggcaaagcctttagatggtccacaagcctgaatgaacataagaatattcatactggagagaaaccctacaaatgtaaagaatgtggcaaagcctttagacagtccaggagcctgaatgaacataaaaatattcatactggcgaaaaaccctacacatgtgaaaaatgtggcaaagcttttaaccaatcctcaagtcttattatacacaggagcattcattctgaacaaaaactttacaaatgtgaagaatgtggcaaagcctttacttggtcctcatcccttaataaacataagagaattcatactggagagaaaccctacacatgtgaagaatgtggcaaagctttttataggtcctcacaccttgctaaacataagagaattcatactggagagaaaccctacacgtgcgaagaatgtggcaaagcttttaaccaatcctcaactcttatattacacaagagaatccattctgggcaaaaaccttacaaatgtgaagaatgtggcaaagcctttacacggtccacaacactgaacgaacataagaaaattcatactggcgagaaaccctacaaatgtgaagaatgtggcaaagctttcatatggtccgcaagcctgaatgaacataagaatattcatactggagagaaaccctacaaatgtaaagaatgtggcaaagcttttaaccaatcctcaggccttattatacacaggagcattcattctgaacaaaaactttacaaatgtgaagaatgtggcaaagcctttactcggtccacagccctgaatgaacataagaaaattcattctggagagaaaccctacaaatgcaaagaatgtggcaaagcctataacttatcctcaacccttactaaacataagagaattcatactggagagaaacccttcacatgtgaagaatgtggcaaagccttcaattggtcctcatcccttactaaacataagataattcatactggagagaaatcctacaaatgtgaagaatgtggcaaagcttttaatcggccctcaacccttactgtacacaagcgaattcatactggcaaggaacatagttgaatgacatttctagtaatctctaattccagtgtctttacacagcaaataaattggagaatattgctcccatataaacttgtattatttttcttattttaaattttttaaaatttctgtaggtacatagtatgtgtatctattcatggcttatttggattattttgatacaggcatatgacatgtaattatcacatcagagtaaatgagttattcttcacaagcatttgttctttgtattacacacagtccagttatacactttaatttttttttttttttttttttttgagacagagtctcgttctgtcgcccaggctggagcgcagtggtgcgatcttggctcactgcaacctccacctgctgggttcaagcaattctcctgcctcagcctcatgagtagctgtgactaccggcaggtgccaccatgcccagctaattttttgtattttcagtagagacagggtttcacaatgctggccaggctgttctcgaactcctgagctcatgatccacccacctcggcctcccaaagtgctgggattacgggtgtgagccatcgtacctggccactttaattatttttaaatgtgcaattatttttttactacaggttattttatgattataataagtatatgagtataattataattcacacatttctaagtcatgaatgcttttaaaaaatgttccatatttatctttgaacatgtagcatctctttccgcaaataaatgcagactttggttttgatttacat

SEQ ID NO: 203141 - DNA, 2783 bp, Homo sapiens
  Payload ID: 20060
  Gene Name: zinc finger protein 596
  Uniprot ID: Q8TC21
  ENST ID: ENST00000308811
  CDS Start-End: 289-1803
gacacgcgctttcaaccggcggagacactggcagggccagaaacgcgcgcagcgggggcgggaggtcggtaagctccccgcccctgcccgagaccccgccccggcccggccccgcctttttctctgcctcccctccctgcacgtacgggccccgcccctcgcgcgacgttttttgttgacccggaaacggattctccggagccgaggtccgctcggatttgtcttcttagtgcttggatggtgtgagtgaaaacccagaggaatacatttggtggctgagctagtacaatgccatcaccggattccatgaccttcgaggatatcattgtagacttcactcaagaagagtgggccctgctggacacatcccagagaaagctgtttcaagatgtgatgttggagaacatcagtcatctggtctctattggcaaacagctctgcaaatcagttgtgctttcccaattggagcaagtagagaaactttcaacacaaagaataagcttactgcaaggtagagaagttggcattaaacatcaagagataccattcattcaacatatctatcagaagggcacgtccaccatcagcacaatgagatctcatactcaagaggatccttttctatgcaatgacttaggagaagatttcactcaacatatagcattgactcaaaatgtgattacctacatgagaacgaaacactttgtaagcaaaaagtttgggaaaatcttcagtgactggttatcctttaatcaacacaaggaaattcacaccaaatgtaaatcatatggaagtcatctatttgattatgcctttatccaaaactctgcccttagaccacacagtgtgactcacactagagagataacattggaatgtcgtgtgtgtgggaaaacctttagcaaaaattctaatcttaggcgacatgagatgattcacactggagagaaaccacacggatgtcatctatgtgggaaagcctttactcattgctctgatcttcgaaaacatgagagaactcacactggagagaagccatatggatgtcatctatgtgggaaagccttcagtaaaagttctaaccttagacgacatgagatgattcacactagagaaaaagcacagatatgccatctatgtgggaaagccttcactcattgctctgaccttagaaaacatgagagaactcacttaggagataaaccatatggatgtctcctatgtgggaaggctttcagtaaatgttcttaccttagacaacatgaaagaactcacaatggagagaaaccatatgaatgtcatctatgtggaaaagccttctctcattgttctcaccttagacaacatgagcgaagtcacaatggagagaaaccacatggatgtcatctatgtgggaaagcattcactgaatcttctgtgcttaaacgacatgagagaattcacactggagagaaaccatatgagtgccatgtatgtgggaaagccttcactgaatcttctgacctcagacgacatgagagaactcacactggagaaaaaccatatgaatgccatctatgcggaaaagccttcaatcactcttctgtccttagacgacatgagagaactcacactggagagaaaccatatgaatgcaatatatgtggtaaagccttcaatagaagttacaactttagacttcatagaagagttcacactggagagaaaccatatgtatgtcctctatgtgggaaagcctttagtaaattttttaaccttagacaacatgagagaactcacactaaaaaagcaatgaatatgtaagaatcatcagctgtagcgttaacactaaatacaccaaggacaaacatactacaggaatattatgtctgtaatcagtgtggaaaagcctttatttatatttaccactttgctcaacctaaatgaattcaaggtagagagaatccagatgtatttaatgtttatggcacaaacttcagactctaggctgaccatatacaacgtgagagaatgaaactatagatcaaaggaatgtggaggagtcttcatccacagctctgttaaataaatgggagaaatcacatcacgaaaattctgtgcctgtcgtcagtgtgaaaatgcctttgctgataatttatcctctaaacaaatgagtaaaatccacaggcaagcaaccatatgtctgtaattgctgtgcactctcattcagctaagcaccaattttggtgtgtgcaagaaaattcattataaggtaactgataaaaacaggaaatatgtgaaaatattttttattaggtggatgaggcctcttgaacaattccagacattcatagtggagaagttattcaatgaaaactcatgagaaatccttttcttaatacagcagcacttctataatagatcagaattcacatggtgtagaactctcaatgacatgaatggagggtagtcctcagtaaattactcattccttagtcaataccagcatttttccagtgagaaaactatcttgacaggatagtggaaaaaccttcaggcagcttttatgtcaaaaaagtgagacagggatgaaaactctaaaaagccattgatgagatgtatagctgggggacaaaacataaagccatcaagcacgtgcttgagaaaaaaattataattttgaataaagactttctacttaaaatatgtgggttgaaatgtacaattctgaaataacctgggaatattgaatgcagaattatgtaagaagtaataagattaaattagtactgtcaaaaatacaa

SEQ ID NO: 203142 - DNA, 2696 bp, Homo sapiens
  Payload ID: 20060
  Gene Name: zinc finger protein 596
  Uniprot ID: Q8TC21
  ENST ID: ENST00000320552
  CDS Start-End: 204-1718
aagttgggtggaagcagcgcggacccacggcacaccgaacgcactccaacagaacccgacgcagacacgcgctttcaaccggcggagacactggcagggccagaaacgcgcgcagcgggggcgggaggtcgatttgtcttcttagtgcttggatggtgtgagtgaaaacccagaggaatacatttggtggctgagctagtacaatgccatcaccggattccatgaccttcgaggatatcattgtagacttcactcaagaagagtgggccctgctggacacatcccagagaaagctgtttcaagatgtgatgttggagaacatcagtcatctggtctctattggcaaacagctctgcaaatcagttgtgctttcccaattggagcaagtagagaaactttcaacacaaagaataagcttactgcaaggtagagaagttggcattaaacatcaagagataccattcattcaacatatctatcagaagggcacgtccaccatcagcacaatgagatctcatactcaagaggatccttttctatgcaatgacttaggagaagatttcactcaacatatagcattgactcaaaatgtgattacctacatgagaacgaaacactttgtaagcaaaaagtttgggaaaatcttcagtgactggttatcctttaatcaacacaaggaaattcacaccaaatgtaaatcatatggaagtcatctatttgattatgcctttatccaaaactctgcccttagaccacacagtgtgactcacactagagagataacattggaatgtcgtgtgtgtgggaaaacctttagcaaaaattctaatcttaggcgacatgagatgattcacactggagagaaaccacacggatgtcatctatgtgggaaagcctttactcattgctctgatcttcgaaaacatgagagaactcacactggagagaagccatatggatgtcatctatgtgggaaagccttcagtaaaagttctaaccttagacgacatgagatgattcacactagagaaaaagcacagatatgccatctatgtgggaaagccttcactcattgctctgaccttagaaaacatgagagaactcacttaggagataaaccatatggatgtctcctatgtgggaaggctttcagtaaatgttcttaccttagacaacatgaaagaactcacaatggagagaaaccatatgaatgtcatctatgtggaaaagccttctctcattgttctcaccttagacaacatgagcgaagtcacaatggagagaaaccacatggatgtcatctatgtgggaaagcattcactgaatcttctgtgcttaaacgacatgagagaattcacactggagagaaaccatatgagtgccatgtatgtgggaaagccttcactgaatcttctgacctcagacgacatgagagaactcacactggagaaaaaccatatgaatgccatctatgcggaaaagccttcaatcactcttctgtccttagacgacatgagagaactcacactggagagaaaccatatgaatgcaatatatgtggtaaagccttcaatagaagttacaactttagacttcatagaagagttcacactggagagaaaccatatgtatgtcctctatgtgggaaagcctttagtaaattttttaaccttagacaacatgagagaactcacactaaaaaagcaatgaatatgtaagaatcatcagctgtagcgttaacactaaatacaccaaggacaaacatactacaggaatattatgtctgtaatcagtgtggaaaagcctttatttatatttaccactttgctcaacctaaatgaattcaaggtagagagaatccagatgtatttaatgtttatggcacaaacttcagactctaggctgaccatatacaacgtgagagaatgaaactatagatcaaaggaatgtggaggagtcttcatccacagctctgttaaataaatgggagaaatcacatcacgaaaattctgtgcctgtcgtcagtgtgaaaatgcctttgctgataatttatcctctaaacaaatgagtaaaatccacaggcaagcaaccatatgtctgtaattgctgtgcactctcattcagctaagcaccaattttggtgtgtgcaagaaaattcattataaggtaactgataaaaacaggaaatatgtgaaaatattttttattaggtggatgaggcctcttgaacaattccagacattcatagtggagaagttattcaatgaaaactcatgagaaatccttttcttaatacagcagcacttctataatagatcagaattcacatggtgtagaactctcaatgacatgaatggagggtagtcctcagtaaattactcattccttagtcaataccagcatttttccagtgagaaaactatcttgacaggatagtggaaaaaccttcaggcagcttttatgtcaaaaaagtgagacagggatgaaaactctaaaaagccattgatgagatgtatagctgggggacaaaacataaagccatcaagcacgtgcttgagaaaaaaattataattttgaataaagactttctacttaaaatatgtgggttgaaatgtacaattctgaaataacctgggaatattgaatgcagaattatgtaagaagtaataagattaaattagtactgtcaaaaatac

SEQ ID NO: 203143 - DNA, 2863 bp, Homo sapiens
  Payload ID: 20060
  Gene Name: zinc finger protein 596
  Uniprot ID: Q8TC21
  ENST ID: ENST00000398612
  CDS Start-End: 371-1885
ggagccgaggtccgctcgggtgagtgccctccgctttttgtggccaaacccagccacgcagttcccttcctgcggcgtcctccacacccggggtctgctggtctccgcggatgtcacaggctcggcaaccgccctcctgtcggcggggagtcccgcgacgcccggaaatgctccgaagcctgtcgcccagctgccagatctgcgtctgtgtccggttccgtcactgaggtcgcccctgtccggcccttccaccctagttctcttcaccgtccgcccatcctatcgcgcgcggcctcagatttgtcttcttagtgcttggatggtgtgagtgaaaacccagaggaatacatttggtggctgagctagtacaatgccatcaccggattccatgaccttcgaggatatcattgtagacttcactcaagaagagtgggccctgctggacacatcccagagaaagctgtttcaagatgtgatgttggagaacatcagtcatctggtctctattggcaaacagctctgcaaatcagttgtgctttcccaattggagcaagtagagaaactttcaacacaaagaataagcttactgcaaggtagagaagttggcattaaacatcaagagataccattcattcaacatatctatcagaagggcacgtccaccatcagcacaatgagatctcatactcaagaggatccttttctatgcaatgacttaggagaagatttcactcaacatatagcattgactcaaaatgtgattacctacatgagaacgaaacactttgtaagcaaaaagtttgggaaaatcttcagtgactggttatcctttaatcaacacaaggaaattcacaccaaatgtaaatcatatggaagtcatctatttgattatgcctttatccaaaactctgcccttagaccacacagtgtgactcacactagagagataacattggaatgtcgtgtgtgtgggaaaacctttagcaaaaattctaatcttaggcgacatgagatgattcacactggagagaaaccacacggatgtcatctatgtgggaaagcctttactcattgctctgatcttcgaaaacatgagagaactcacactggagagaagccatatggatgtcatctatgtgggaaagccttcagtaaaagttctaaccttagacgacatgagatgattcacactagagaaaaagcacagatatgccatctatgtgggaaagccttcactcattgctctgaccttagaaaacatgagagaactcacttaggagataaaccatatggatgtctcctatgtgggaaggctttcagtaaatgttcttaccttagacaacatgaaagaactcacaatggagagaaaccatatgaatgtcatctatgtggaaaagccttctctcattgttctcaccttagacaacatgagcgaagtcacaatggagagaaaccacatggatgtcatctatgtgggaaagcattcactgaatcttctgtgcttaaacgacatgagagaattcacactggagagaaaccatatgagtgccatgtatgtgggaaagccttcactgaatcttctgacctcagacgacatgagagaactcacactggagaaaaaccatatgaatgccatctatgcggaaaagccttcaatcactcttctgtccttagacgacatgagagaactcacactggagagaaaccatatgaatgcaatatatgtggtaaagccttcaatagaagttacaactttagacttcatagaagagttcacactggagagaaaccatatgtatgtcctctatgtgggaaagcctttagtaaattttttaaccttagacaacatgagagaactcacactaaaaaagcaatgaatatgtaagaatcatcagctgtagcgttaacactaaatacaccaaggacaaacatactacaggaatattatgtctgtaatcagtgtggaaaagcctttatttatatttaccactttgctcaacctaaatgaattcaaggtagagagaatccagatgtatttaatgtttatggcacaaacttcagactctaggctgaccatatacaacgtgagagaatgaaactatagatcaaaggaatgtggaggagtcttcatccacagctctgttaaataaatgggagaaatcacatcacgaaaattctgtgcctgtcgtcagtgtgaaaatgcctttgctgataatttatcctctaaacaaatgagtaaaatccacaggcaagcaaccatatgtctgtaattgctgtgcactctcattcagctaagcaccaattttggtgtgtgcaagaaaattcattataaggtaactgataaaaacaggaaatatgtgaaaatattttttattaggtggatgaggcctcttgaacaattccagacattcatagtggagaagttattcaatgaaaactcatgagaaatccttttcttaatacagcagcacttctataatagatcagaattcacatggtgtagaactctcaatgacatgaatggagggtagtcctcagtaaattactcattccttagtcaataccagcatttttccagtgagaaaactatcttgacaggatagtggaaaaaccttcaggcagcttttatgtcaaaaaagtgagacagggatgaaaactctaaaaagccattgatgagatgtatagctgggggacaaaacataaagccatcaagcacgtgcttgagaaaaaaattataattttgaataaagactttctacttaaaatatgtgggttgaaatgtacaattctgaaataacctgggaatattgaatgcagaattatgtaagaagtaataagattaaattagtactgtcaaaaatac

SEQ ID NO: 203144 - DNA, 581 bp, Homo sapiens
  Payload ID: 20060
  Gene Name: zinc finger protein 596
  ENST ID: ENST00000521270
  CDS Start-End: 451-581
aaacccagccacgcagttcccttcctgcggcgtcctccacacccggggtctgctggtctccgcggatgtcacaggctcggcaaccgccctcctgtcggcggggagtcccgcgacgcccggaaatgctccgaagcctgtcgcccagctgccagatctgcgtctgtgtccggttccgtcactgaggtcagacttgagggactggtatttctagaagcctcacatggaagagacagaatcattcagtacaagtgtatccagaggaccagcagaagggagaaggaatggagggaggctcctgagggctgagatgcatgtggagaaagcctgcaagcacacaaaccgagaataattaaatctgagaaattccaggatttatctatttgtcttcttagtgcttggatggtgtgagtgaaaacccagaggaatacatttggtggctgagctagtacaatgccatcaccggattccatgaccttcgaggatatcattgtagacttcactcaagaagagtgggccctgctggacacatcccagagaaagctgtttcaagatgtgatgttggagaacatcagtcatctggt

SEQ ID NO: 203145 - DNA, 643 bp, Homo sapiens
  Payload ID: 20060
  Gene Name: zinc finger protein 596
  ENST ID: ENST00000521145
  CDS Start-End: 204-643
aagttgggtggaagcagcgcggacccacggcacaccgaacgcactccaacagaacccgacgcagacacgcgctttcaaccggcggagacactggcagggccagaaacgcgcgcagcgggggcgggaggtcgatttgtcttcttagtgcttggatggtgtgagtgaaaacccagaggaatacatttggtggctgagctagtacaatgccatcaccggattccatgaccttcgaggatatcattgtagacttcactcaagaagagtgggccctgctggacacatcccagagaaagctgtttcaagatgtgatgttggagaacatcagtcatctggtctctattggcaaacagctctgcaaatcagttgtgctttcccaattggagcaagtagagaaactttcaacacaaagaataagcttactgcaaggtagagaagttggcattaaacatcaagagataccattcattcaacatatctatcagaagggcacgtccaccatcagcacaatgagatctcatactcaagaggatccttttctatgcaatgacttaggagaagatttcactcaacatatagcattgactcaaaatgtgattacctacatgagaacgaaacactttgtaagcaaaaagtttgggaaaat

SEQ ID NO: 203146 - DNA, 564 bp, Homo sapiens
  Payload ID: 20060
  Gene Name: zinc finger protein 596
  ENST ID: ENST00000518414
  CDS Start-End: 346-564
gccctccgctttttgtggccaaacccagccacgcagttcccttcctgcggcgtcctccacacccggggtctgctggtctccgcggatgtcacaggctcggcaaccgccctcctgtcggcggggagtcccgcgacgcccggaaatgctccgaagcctgtcgcccagctgccagatctgcgtctgtgtccggttccgtcactgaggtcgcccctgtccggcccttccaccctagttctcttcaccgtccgcccatcctatcgcgcgcggcctcagatttgtcttcttagtgcttggatggtgtgagtgaaaacccagaggaatacatttggtggctgagctagtacaatgccatcaccggattccatgaccttcgaggatatcattgtagacttcactcaagaagagtgggccctgctggacacatcccagagaaagctgtttcaagatgtgatgttggagaacatcagtcatctggtctctattggcaaacagctctgcaaatcagttgtgctttcccaattggagcaagtagagaaactttcaacacaaagaataagcttactg

SEQ ID NO: 203147 - DNA, 1006 bp, Homo sapiens
  Payload ID: 20060
  Gene Name: zinc finger protein 596
  ENST ID: ENST00000523162
  CDS Start-End: 251-484
agaaacgcgcgcagcgggggcgggaggtcggtaagctccccgcccctgcccgagaccccgccccggcccggccccgcctttttctctgcctcccctccctgcacgtacgggccccgcccctcgcgcgacgttttttgttgacccggaaacggattctccggagccgaggtccgctcggatttgtcttcttagtgcttggatggtgtgagtgaaaacccagaggaatacatttggtggctgagctagtacaatgccatcaccggattccatgaccttcgaggatatcattgtagacttcactcaagaagagtgggccctgctggacacatcccagagaaagctgtttcaagatgtgatgttggagaacatcagtcatctggtctctattggcaaacagctctgcaaatcagttgtgctttcccaattggagcaagtagagaaactttcaacacaaagaataagcttactgcaaggtgagctctaagaagcagtgcttcaataggaggaggagaaacatggccagtgagtagagaagttggcattaaacatcaagagataccattcattcaacatatctatcagaagggcacgtccaccatcagcacaatgagatctcatactcaagaggatccttttctatgcaatgacttaggagaagatttcactcaacatatagcattgactcaaaatgtgattacctacatgagaacgaaacactttgtaagcaaaaagtttgggaaaatcttcagtgactggttatcctttaatcaacacaaggaaattcacaccaaatgtaaatcatatggaagtcatctatttgattatgcctttatccaaaactctgcccttagaccacacagtgtgactcacactagagagataacattggaatgtcgtgtgtgtgggaaaacctttagcaaaaattctaatcttaggcgacatgagatgattcacactggagagaaaccacacggatgtcatctatgtgggaaagcctttactcatt

SEQ ID NO: 203148 - DNA, 522 bp, Homo sapiens
  Payload ID: 20060
  Gene Name: zinc finger protein 596
  ENST ID: ENST00000518320
  CDS Start-End: 316-522
agttcccttcctgcggcgtcctccacacccggggtctgctggtctccgcggatgtcacaggctcggcaaccgccctcctgtcggcggggagtcccgcgacgcccggaaatgctccgaagcctgtcgcccagctgccagatctgcgtctgtgtccggttccgtcactgagatttgtcttcttagtgcttggatggtgtgagtgaaaacccagaggaatacatttggtggctgagctagtacaatgccatcaccgacttcactcaagaagagtgggccctgctggacacatcccagagaaagctgtttcaagatgtgatgttggagaacatcagtcatctggtctctattggcaaacagctctgcaaatcagttgtgctttcccaattggagcaagtagagaaactttcaacacaaagaataagcttactgcaaggtagagaagttggcattaaacatcaagagataccattcattcaacatatctatcagaagggcacgtccaccatcagcacaatgagatct

SEQ ID NO: 203149 - DNA, 714 bp, Homo sapiens
  Payload ID: 20060
  Gene Name: zinc finger protein 596
  ENST ID: ENST00000522866
  CDS Start-End: 314-714
aaacggattctccggagccgaggtccgctcgggtgagtgccctccgctttttgtggccaaacccagccacgcagttcccttcctgcggcgtcctccacacccggggtctgctggtctccgcggatgtcacaggctcggcaaccgccctcctgtcggcggggagtcccgcgacgcccggaaatgctccgaagcctgtcgcccagctgccagatctgcgtctgtgtccggttccgtcactgagatttgtcttcttagtgcttggatggtgtgagtgaaaacccagaggaatacatttggtggctgagctagtacaatgccatcaccggattccatgaccttcgaggatatcattgtagacttcactcaagaagagtgggccctgctggacacatcccagagaaagctgtttcaagatgtgatgttggagaacatcagtcatctggtctctattggcaaacagctctgcaaatcagttgtgctttcccaattggagcaagtagagaaactttcaacacaaagaataagcttactgcaaggtagagaagttggcattaaacatcaagagataccattcattcaacatatctatcagaagggcacgtccaccatcagcacaatgagatctcatactcaagaggatccttttctatgcaatgacttaggagaagatttcactcaacatatagcattgactcaaaatgtgattacctacat

SEQ ID NO: 203150 - DNA, 5513 bp, Homo sapiens
  Payload ID: 20061
  Gene Name: zinc finger protein 597
  Uniprot ID: Q96LX8
  ENST ID: ENST00000301744
  CDS Start-End: 237-1511
aggatggcggagagggctgagggcgggtcgcttccggcggcttttcccgcagctcctgcgtaaaggagcatgagagcgtgggagttttgcagtggccgtggcgttcttcgtcgcgtctcggtcgggcgtcgctttctgcagctcctgtcagggagcgcgaggcctgttattaaccgcggagcgctttgtcacgaagtccctgtggcgtcttgaagaaggcattccccacccgccaaatggcgtccatgcccccgacgcccgaggcccagggaccaatactctttgaggatctggctgtgtatttttctcaagaggagtgcgtgactctgcaccctgcccagaggtccctcagcaaagatggtacaaaagagtctttggaggatgcggctttgatgggagaggaaggcaagcctgagattaatcagcagttaagcctagagtctatggaacttgacgagcttgccttagaaaagtaccccattgctgcaccccttgtcccttacccagaaaaatcctctgaggatggagttggaaaccctgaagcgaaaatattaagtggaactcccacttacaagagaagggtcatcagccttttagttaccattgaaaaccacaccccattagtagaactctctgaatatttaggaaccaacacactttctgaaattcttgattctccctgggaaggagccaaaaatgtgtacaaatgtcctgagtgtgaccaaaacttcagcgatcattcatacctagttttgcatcagaaaattcattcaggagagaaaaaacataaatgtggtgactgtggaaagatcttcaatcatagagccaacctgaggacacacaggagaatccatactggtgagaaaccttataagtgtgccaagtgcagtgccagctttcgccagcactctcatctatcccgacacatgaatagccacgtaaaggagaagccctatacatgtagcatatgtggtagaggttttatgtggctcccaggattggcacagcatcagaaaagccacagtgctgaaaacacctacgaatctactaactgtgataaacattttaatgagaaaccaaatcttgctttgcctgaggaaacattcgtatcaggcccccagtaccagcacactaagtgcatgaagagcttcaggcagtccttatatcctgccctttccgagaagagccacgacgaggactctgaacgctgcagcgatgatggggacaatttcttctcattctcaaaattcaagcccttacagtgtcctgactgtgacatgacctttccttgtttctctgagcttatttcccatcagaacattcatacagaggaaaggccccataagtgcaaaacatgcgaggaaagttttgctttggactcagaacttgcatgccaccagaagagccacatgctagcggaaccttttaaatgtaccgtgtgtgggaaaactttcaagtcgaatttgcatctcattactcataagcgaactcacataaaaaacaccacgtaaagtaaatataacaaattgttattagtgattgggcttttcagtatctgtatggtgggaagcagttactgtatatgtcccaggcaatgtgctaagcactttacacacattcccatgtaatacttaattctcagcacaaccgtgatttaggcagtatcatttccattttataagtagggatgcaaaatccgtgtcactaaactagtgaatgaacccaggatttgaactcagttactgtacaactgtgagccagaagaagatacacaacttttgtttaaattcaattttcattaaaatgaaggctcttgctaaagttattttaattttgtttacgtagtttctgacttttagaaggaggagaatttatttatattttgccagttctgcagacatatctaggaaagtaaatgcttttatatgttttatacttttttttgctataactatttgaatgtaatacttgtataagattgctgttctacatgtgaattcccacaggcgttcagaagtttttttctgccctgtaaaagttcccaaatgggtagactagtttatattttgatggccattagtatccggagttctctgtcatggttctgatgccaggggcacatactggcatttaggacccaattgtttgcaaggagttttggaagtctaactgcagcccttttctggaggctggacttgacttggggagggggagaagtacttgctcttttctaagatttgcctccaaattgctactgaagcacattacctgtcttactatgaataattgtaattgtttctcagtgagcatgctagctactttagatatattatgtaatttaatcttcagaatctgtgacagagaaaaaaaatctttgtttcataaacgaggaaactgaagtcctcagagggtaaagtcagttctttgcccagcacacaaatcacattgtggtgaaactgacattaagcttgggtttctctgactccaaaggccatgcagtctgcaagactgcggcatttgttggcatttgcaccacgtagtagcactgcaggcagccagggaaaggggagctgagataggtgagggtggtcctcatggaggcgattctgtgtgcttgcatcctggaaccccttcattccctttgtgctgtacccaaagcctgactaacatatacagttacaaagcagcagaagactctccaggacttcaggtttgaattcttgtccctctaatcagatgagagatttcacacttggcagagtacaatactgaaggtcttaactgggttttggttttttaaaaaacacccataacatttcctctccatctccaaagaaaatgcatatagaaaattgttagattttaaccaaaatacttgataatatatagatctttagatattgctattatagataaatactggagcaaaatattattaaatggtatggttattaatgttaaagaaccacagaatgttgtaaatatagattcatatacaatttctcattaaagtcgattgtatgcctatcagcaaaacaatatttacatgggttttgattaggatggaagaatgctctcattctatttaaatagacagtataaaagtacaatatttgctaaaattgaattgttgctgggaatttttgctgggagaaaagataaaggactcttgaggactaattatatggaaggtagcagaaggtggtcctacagaacagcagattgaggactaaatatacaaaaaatgctggctactcagctaagctcttattactgagtagaggcaggaagatactgttcaggtgagagaaaaactgaaactaacaaaaacatccctaacccagagagagtttctctctctttgtcattcttgtcttgtttcttgtttgcagatccacagttgagacaatgtgctgctctgtatgtcaaggtcagactttggctgtttgtttctgatgtctccactcttaggagacaggacaccagcttccaggtttctctgaggtgctttgaaatgtgtagaaagatagtctccagttagattacttattaggcaactctgagataccatgacctttgttaaataacaagaacaccacctccttgctctcctgcttctgccctcagtgggagaaactggcaggagcctcatcagcacatatcaggggccctaagagttcagtcaaagatctaatgagtcacaggatgggggatgaaattgggaaaggtctggattagcagagttgctgcagaaagaagtagaggggaatatcttagaaggcacttggacagaatgggggtgatataaaagatgtatgctgtcatttttgttttggctcctagaaaatatagcagaaagtgagaatttgtgccatacatcctgttctgcaccttaatatggaagtttgcctttccacacgagtcttccttcacaattaacctctaatttttttttttgcagttttctccagattttggaagattacgacaaacttcctaaaagattagaaaaaatagcccttttcagaaacattaacatacgtgtgggtagaactaaaatggctttttggtataatactgttaatgattagtatgcagaaaaaaatgaaaaccccggaagtgtcagttactgtgaaagaggcatattttcagttgtgcttattgtgcagttgtacttaaatacatttgctagatgtaattcaagctgctttacccccagggaattgaaggaaaagatatatctgctggtgagcttcaggctttttatgatgatggcatttcacccttctgtttacagtgtcaactgatggagataaattccataaaattgtcattaactcagatactagccttccatgttaggtgctattcacaaatactggataaaagttaatatgggaatgaaaaactaaatgcaagagtttattgctatgaatgattggttaactgcattttgcagcatggaaatcaacacactatgagagtgaaaactttgtgctgaataaattgactcagacaaatttctccgtttttgtcgttgatgcagtgatgaaaatgtatatccaacagttccttaacatgattgctggaatagttaaacagtcttttaaacagtcgtcattgatgaaaacagcatttttccaatggaattcagatgtcagcagtttacattttataatttaagaaattgtggaatgtagttgttttgaatgaggtcgactcagaatagttttatttagagctttgttgctacaggtggtagtctattgacacctcctcatttaacatagaaaatgactaacccaataattcagggagttaaaactcaaatgacatttcacagcaaatgccattttgagtctttgcctcctgagtttccatataattaagtggcaatgttctagtgactgcagcataagatgtcatacaatctgaaactgcagagtttgatcaaagtaatctgcaatttactgcctatgtgtacaaagggagacatagcaggttatagtttatatgaatagtctattttgaatgttcattaaacttgttatccctgtgggattttagtaggaaagtgtatttgctttgaccatctgtttaacaaaatgatgttcattacattagaagtgtatgtattcatctggtttagttttgtaatttagaagagctattgatctgattcaaagataaccattacccatctttccaaggcccatctaagtagtacaggtgttttgtcttttaaaattgacagtcctctttgcattaagtctgtagggggggaatacaatataaatattcttctgtgtaaacgtaagaatgtgctgtaatctccagttcctttggatacctcagaattctatttattgtatacacttatactgtttattcaatgttttgggtcttactctttttgacgtattctcatcagtcttcactctagtttgcaagctctgaagttattgattacgtctaatgtgcaatttggcttctattaaatgctattttatgat

SEQ ID NO: 203151 - DNA, 3366 bp, Homo sapiens
  Payload ID: 20062
  Gene Name: zinc finger protein 598
  Uniprot ID: Q86UK7
  ENST ID: ENST00000431526
  CDS Start-End: 75-2789
ggaaggggcgggcccgccgggagccaggccgctcggcgccacgaccggccgagaggggggccggatcccggaccatggcggcggccgggggcgccgaggggcggcgcgcggacatggaggcggaggcggcggcagctcctgagcggggaggcgggagctgcgtgctgtgctgcggagacctggaggccacggcgctgggccgctgcgaccacccggtgtgctaccgctgctctaccaagatgcgggtgctctgcgagcagcgctactgcgccgtgtgccgcgaggagctgcgccaggtggtctttgggaagaagcttcctgcctttgccaccatccccatccaccagctgcagcatgagaagaaatatgatatctactttgcagatggaaaggtgtacgcattgtacaggcagctgctgcagcacgagtgcccgcggtgccccgagctgccacctttcagcctcttcggggacctggagcagcacatgcggaggcagcatgagctcttctgctgccgtctgtgcctccagcacctccagatcttcacatatgagcgcaagtggtactcgcgcaaggacctggcccggcatcgcatgcagggtgaccccgatgacacgtcgcaccgtgggcacccgctctgcaagttctgtgacgagcgctacctggacaatgatgagctgcttaagcacctgcgccgcgaccactacttctgccacttctgcgactcggacggggcccaggactactacagcgactatgcctacctgcgtgagcacttccgggagaagcactttctgtgtgaggaaggccgctgcagcacggagcagttcacccacgccttccgcaccgagatcgacctcaaggcccacaggacggcctgccacagtcgcagccgcgccgaggcacgccagaaccgccacatcgacctgcagttcagctacgcgccacggcactcgcgccggaacgagggggtcgttggtggcgaagactacgaggaggtggacaggtacagccgccagggccgagtggcccgggctggcactcgcggagcccagcagagccgccgaggaagctggaggtacaaaagggaagaagaggaccgagaagtagcagctgctgtccgggcctccgtggccgcacagcagcaggaggaggctcgcaggagtgaggatcaggaggaaggcggtaggcccaagaaggaggaggcagcggcgcggggacctgaggatccccgtggcccccggcgctcaccccggactcagggcgaaggcccaggccccaaggaaacctcgacaaatggtcctgtaagccaagaagccttctcggtgacaggcccagccgccccagggtgtgtgggggtgccaggcgccctcccaccacccagcccgaagctcaaggacgaagacttccccagcctctctgcctccacttcctcctcctgctccactgcagcaaccccgggccctgtggggttggcgctgccgtacgccatccctgccagaggcaggagtgccttccaggaggaggacttccccgccctggtgtcctcggtgcccaagcctggcaccgcccccaccagccttgtctctgcctggaacagcagcagtagcagcaagaaggtagcacagcccccactctcggcgcaggctaccggcagcggccagcccaccaggaaggctgggaaggggagcaggggcggcaggaagggcggcccgcccttcacacaggaggaggaggaggacggcggcccggccctgcaggagcttctgagcacacgccccacgggctccgtctcctccacactggggctggcctccatccaaccctctaaagttgggaagaagaagaaagtgggctcggagaagccaggcaccacattgccacagcccccgcccgctacctgtcccccaggggctttgcaggccccggaagctcctgccagcagagccgaggggccagttgccgtcgtcgttaatggacacatggagggcccggcccctgctcggagtgcccccaaggaaccccctgggctcccaaggcccctggggtccttcccctgccccacgccacaggaggacttcccagcgctcggcggcccctgcccaccccggatgccgccgcccccaggcttcagcgctgtggtgctcctgaagggcacgcctcccccacccccgccgggcctggtgcccccaatcagcaagccgccccctggcttctctggccttctgcctagcccccacccggcctgtgtccccagccccgccaccaccaccaccacaaaagcacccaggctgctgcctgccccacgggcgtacctagtccccgagaacttccgggagaggaaccttcagctcatccagtccatcagggacttcctgcagagcgacgaggcccgcttcagcgagttcaagagccactcaggggagttcagacagggcctgatctccgcagcccagtattacaagagttgccgggacctgctgggggagaatttccagaaggtctttaatgagctgctggtcctgctgcccgacacggccaagcagcaggagctcctgtctgcacacacggacttctgcaaccgcgagaagcctctgagcaccaagtccaagaagaacaagaagagcgcgtggcaggccaccacccagcaggcgggcctggactgccgtgtgtgccccacctgccagcaggtgctcgcgcatggcgatgccagcagccaccaggcgctgcatgctgcccgggacgacgacttcccctccctgcaagccatcgccaggatcatcacgtagctcccgccagcgtggccagagctgtcgcaccgtgagcgtccttcctccttcctctccgggctgccaggcagccaggtaaggcctggtgaggccacttggcctcttggttggccaggcccaccaggaagtcaccaggacagtccacccgccctgttggcacactcaagcgggagtccacccctgcctcagtggtgggccagtctcggtttgcattcttgtgcttttgggaggtgccaggggagggaagggctgggatgctgggacctgttgttgctggcaaagccagaggtcacagtggcctgatctgggccctcccaaagctgagggctgcagcccgtggggcctcagagctgaaagctgcggcgccactggtgccagagtcagatgtcacagatgtgttgtgtaaacagttggctgtttcatgcttcaagaatgttcaggattaaaagcagacaagaaattgtgctacttgaagttgaatctttttatgagacaagctgaatctgggatctcaaattgcctctgaccttttataagacagtttatcttcaaataaatttattttgcaataccacgc

SEQ ID NO: 203152 - DNA, 775 bp, Homo sapiens
  Payload ID: 20062
  Gene Name: zinc finger protein 598
  ENST ID: ENST00000567625
  CDS Start-End: 1-272
cacccacgccttccgcaccgagatcgacctcaaggcccacaggacggcctgccacagtcgcagccgcgccgaggcacgccagaaccgccacatcgacctgcagttcagctacgcgccacggcactcgcgccggaacgagggggtcgttggtggcgaagactacgaggaggtggacaggtacagccgccagggccgagtggcccgggctggcactcgcggagcccagcagagccgccgaggaagctggagggaagaagaggaccgagaagtagcagctgctgtccgggcctccgtggccgcacagcagcaggaggaggctcgcaggagtgaggatcaggaggaaggcggtaggcccaagaaggaggaggcagcggcgcggggacctgaggatccccgtggcccccggcgctcaccccggactcagggcgaaggcccaggccccaaggaaacctcgacaaatggtcctgtaagccaagaagccttctcggtgacaggcccagccgccccagggtgtgtgggggtgccaggcgccctcccaccacccagcccgaagctcaaggacgaagacttccccagcctctctgcctccacttcctcctcctgctccactgcagcaaccccgggccctgtggggttggcgctgccgtacgccatccctgccagaggcaggagtgccttccaggaggaggacttccccgccctggtgtcctcggtgcccaagcctggcaccgcccccaccagccttgtctctgcctggaacagcagcagtagcagc

SEQ ID NO: 203153 - DNA, 2717 bp, Homo sapiens
  Payload ID: 20062
  Gene Name: zinc finger protein 598
  ENST ID: ENST00000562103
  CDS Start-End: 168-2717
atggcggcggccggggggcgccgaggggcggcgcgcggacatggaggcggaggcggcggcagctcctgagcggggaggcgggagctgcgtgctgtgctgcggagacctggaggccacggcgctggggccgctgcgaccacccggtgtgctaccgctgctctaccaagatgcgggtgctctgcgagcagcgctactgcgccgtgtgccgcgaggagctgcgccaggtggtctttgggaagaagcttcctgcctttgccaccatccccatccaccagctgcagcatgagaagaaatatgatatctactttgcagatggaaaggtgtacgcattgtacaggcagctgctgcagcacgagtgcccgcggtgccccgagctgccacctttcagcctcttcggggacctggagcagcacatgcggaggcagcatgagctcttctgctgccgtctgtgcctccagcacctccagatcttcacatatgagcgcaagtggtactcgcgcaaggacctggcccggcatcgcatgcagggtgaccccgatgacacgtcgcaccgtgggcacccgctctgcaagttctgtgacgagcgctacctggacaatgatgagctgcttaagcacctgcgccgcgaccactacttctgccacttctgcgactcggacggggcccaggactactacagcgactatgcctacctgcgtgagcacttccgggagaagcactttctgtgtgaggaaggccgctgcagcacggagcagttcacccacgccttccgcaccgagatcgacctcaaggcccacaggacggcctgccacagtcgcagccgcgccgaggcacgccagaaccgccacatcgacctgcagttcagctacgcgccacggcactcgcgccggaacgagggggtcgttggtggcgaagactacgaggaggtggacaggtacagccgccagggccgagtggcccgggctggcactcgcggagcccagcagagccgccgaggaagctggaggtacaaaagggaagaagaggaccgagaagtagcagctgctgtccgggcctccgtggccgcacagcagcaggaggaggctcgcaggagtgaggatcaggaggaaggcggtaggcccaagaaggaggaggcagcggcgcggggacctgaggatccccgtggcccccggcgctcaccccggactcagggcgaaggcccaggccccaaggaaacctcgacaaatggtcctgtaagccaagaagccttctcggtgacaggcccagccgccccagggtgtgtgggggtgccaggcgccctcccaccacccagcccgaagctcaaggacgaagacttccccagcctctctgcctccacttcctcctcctgctccactgcagcaaccccgggccctgtggggttggcgctgccgtacgccatccctgccagaggcaggagtgccttccaggaggaggacttccccgccctggtgtcctcggtgcccaagcctggcaccgcccccaccagccttgtctctgcctggaacagcagcagtagcagcaagaaggtagcacagcccccactctcggcgcaggctaccggcagcggccagcccaccaggaaggctgggaaggggagcaggggcggcaggaagggcggcccgcccttcacacaggaggaggaggaggacggcggcccggccctgcaggagcttctgagcacacgccccacgggctccgtctcctccacactggggctggcctccatccaaccctctaaagttgggaagaagaagaaagtgggctcggagaagccaggcaccacattgccacagcccccgcccgctacctgtcccccaggggctttgcaggccccggaagctcctgccagcagagccgaggggccagttgccgtcgtcgttaatggacacatggagggcccggcccctgctcggagtgcccccaaggaaccccctgggctcccaaggcccctggggtccttcccctgccccacgccacaggaggacttcccagcgctcggcggcccctgcccaccccggatgccgccgcccccaggcttcagcgctgtggtgctcctgaagggcacgcctcccccacccccgccgggcctggtgcccccaatcagcaagccgccccctggcttctctggccttctgcctagcccccacccggcctgtgtccccagccccgccaccaccaccaccacaaaagcacccaggctgctgcctgccccacgggcgtacctagtccccgagaacttccgggagaggaaccttcagctcatccagtccatcagggacttcctgcagagcgacgaggcccgcttcagcgagttcaagagccactcaggggagttcagacagggcctgatctccgcagcccagtattacaagagttgccgggacctgctgggggagaatttccagaaggtctttaatgagctgctggtcctgctgcccgacacggccaagcagcaggagctcctgtctgcacacacggacttctgcaaccgcgagaagcctctgagcaccaagtccaagaagaacaagaagagcgcgtggcaggccaccacccagcaggcgggcctggactgccgtgtgtgccccacctgccagcaggtgctcgcgcatggcgatgccagcagccaccaggcgctgcatgctgcccgggacgacgacttcccctccctgcaagccatcgccaggatcatcacgtag

SEQ ID NO: 203154 - DNA, 3371 bp, Homo sapiens
  Payload ID: 20062
  Gene Name: zinc finger protein 598
  ENST ID: ENST00000563630
  CDS Start-End: 244-2793
ccggaaggggcgggcccgccgggagccaggccgctcggcgccacgaccggccgagaggggggccggatcccggaccatggcggcggccggggggcgccgaggggcggcgcgcggacatggaggcggaggcggcggcagctcctgagcggggaggcgggagctgcgtgctgtgctgcggagacctggaggccacggcgctggggccgctgcgaccacccggtgtgctaccgctgctctaccaagatgcgggtgctctgcgagcagcgctactgcgccgtgtgccgcgaggagctgcgccaggtggtctttgggaagaagcttcctgcctttgccaccatccccatccaccagctgcagcatgagaagaaatatgatatctactttgcagatggaaaggtgtacgcattgtacaggcagctgctgcagcacgagtgcccgcggtgccccgagctgccacctttcagcctcttcggggacctggagcagcacatgcggaggcagcatgagctcttctgctgccgtctgtgcctccagcacctccagatcttcacatatgagcgcaagtggtactcgcgcaaggacctggcccggcatcgcatgcagggtgaccccgatgacacgtcgcaccgtgggcacccgctctgcaagttctgtgacgagcgctacctggacaatgatgagctgcttaagcacctgcgccgcgaccactacttctgccacttctgcgactcggacggggcccaggactactacagcgactatgcctacctgcgtgagcacttccgggagaagcactttctgtgtgaggaaggccgctgcagcacggagcagttcacccacgccttccgcaccgagatcgacctcaaggcccacaggacggcctgccacagtcgcagccgcgccgaggcacgccagaaccgccacatcgacctgcagttcagctacgcgccacggcactcgcgccggaacgagggggtcgttggtggcgaagactacgaggaggtggacaggtacagccgccagggccgagtggcccgggctggcactcgcggagcccagcagagccgccgaggaagctggaggtacaaaagggaagaagaggaccgagaagtagcagctgctgtccgggcctccgtggccgcacagcagcaggaggaggctcgcaggagtgaggatcaggaggaaggcggtaggcccaagaaggaggaggcagcggcgcggggacctgaggatccccgtggcccccggcgctcaccccggactcagggcgaaggcccaggccccaaggaaacctcgacaaatggtcctgtaagccaagaagccttctcggtgacaggcccagccgccccagggtgtgtgggggtgccaggcgccctcccaccacccagcccgaagctcaaggacgaagacttccccagcctctctgcctccacttcctcctcctgctccactgcagcaaccccgggccctgtggggttggcgctgccgtacgccatccctgccagaggcaggagtgccttccaggaggaggacttccccgccctggtgtcctcggtgcccaagcctggcaccgcccccaccagccttgtctctgcctggaacagcagcagtagcagcaagaaggtagcacagcccccactctcggcgcaggctaccggcagcggccagcccaccaggaaggctgggaaggggagcaggggcggcaggaagggcggcccgcccttcacacaggaggaggaggaggacggcggcccggccctgcaggagcttctgagcacacgccccacgggctccgtctcctccacactggggctggcctccatccaaccctctaaagttgggaagaagaagaaagtgggctcggagaagccaggcaccacattgccacagcccccgcccgctacctgtcccccaggggctttgcaggccccggaagctcctgccagcagagccgaggggccagttgccgtcgtcgttaatggacacatggagggcccggcccctgctcggagtgcccccaaggaaccccctgggctcccaaggcccctggggtccttcccctgccccacgccacaggaggacttcccagcgctcggcggcccctgcccaccccggatgccgccgcccccaggcttcagcgctgtggtgctcctgaagggcacgcctcccccacccccgccgggcctggtgcccccaatcagcaagccgccccctggcttctctggccttctgcctagcccccacccggcctgtgtccccagccccgccaccaccaccaccacaaaagcacccaggctgctgcctgccccacgggcgtacctagtccccgagaacttccgggagaggaaccttcagctcatccagtccatcagggacttcctgcagagcgacgaggcccgcttcagcgagttcaagagccactcaggggagttcagacagggcctgatctccgcagcccagtattacaagagttgccgggacctgctgggggagaatttccagaaggtctttaatgagctgctggtcctgctgcccgacacggccaagcagcaggagctcctgtctgcacacacggacttctgcaaccgcgagaagcctctgagcaccaagtccaagaagaacaagaagagcgcgtggcaggccaccacccagcaggcgggcctggactgccgtgtgtgccccacctgccagcaggtgctcgcgcatggcgatgccagcagccaccaggcgctgcatgctgcccgggacgacgacttcccctccctgcaagccatcgccaggatcatcacgtagctcccgccagcgtggccagagctgtcgcaccgtgagcgtccttcctccttcctctccgggctgccaggcagccaggtaaggcctggtgaggccacttggcctcttggttggccaggcccaccaggaagtcaccaggacagtccacccgccctgttggcacactcaagcgggagtccacccctgcctcagtggtgggccagtctcggtttgcattcttgtgcttttgggaggtgccaggggagggaagggctgggatgctgggacctgttgttgctggcaaagccagaggtcacagtggcctgatctgggccctcccaaagctgagggctgcagcccgtggggcctcagagctgaaagctgcggcgccactggtgccagagtcagatgtcacagatgtgttgtgtaaacagttggctgtttcatgcttcaagaatgttcaggattaaaagcagacaagaaattgtgctacttgaagttgaatctttttatgagacaagctgaatctgggatctcaaattgcctctgaccttttataagacagtttatcttcaaataaatttattttgcaataccacgca

SEQ ID NO: 203155 - DNA, 889 bp, Homo sapiens
  Payload ID: 20062
  Gene Name: zinc finger protein 598
  ENST ID: ENST00000564556
  CDS Start-End: 1-611
tgcccaagcctggcaccgcccccaccagccttgtctctgcctggaacagcagcagtagcagcaagaaggtagcacagcccccactctcggcgcaggctaccggcagcggccagcccaccaggaaggctgggaaggggagcaggggcggcaggaagggcggcccgcccttcacacaggaggaggaggaggacggcggcccggccctgcaggagcttctgagcacacgccccacgggctccgtctcctccacactggggctggcctccatccaaccctctaaagttgggaagaagaagaaagtgggctcggagaagccaggcaccacattgccacagcccccgcccgctacctgtcccccaggggctttgcaggccccggaagctcctgccagcagagccgaggggccagttgccgtcgtcgttaatggacacatggagggcccggcccctgctcggagtgcccccaaggaaccccctgggctcccaaggcccctggggtccttcccctgccccacgccacaggaggacttcccagcgctcggcggcccctgcccaccccggatgccgccgcccccagacccaggctgctgcctgccccacgggcgtacctagtccccgagaacttccgggagaggaaccttcagctcatccagtccatcagggacttcctgcagagcgacgaggcccgcttcagcgagttcaagagccactcaggggagttcagacagggcctgatctccgcagcccagtattacaagagttgccgggacctgctgggggagaatttccagaaggtctttaatgagctgctggtcctgctgcccgacacggccaagcagcaggagctcctgtctgcacacacggacttctgcaaccgcgagaagcctctg

SEQ ID NO: 203156 - DNA, 3099 bp, Homo sapiens
  Payload ID: 20063
  Gene Name: zinc finger protein 599
  Uniprot ID: Q96NL3
  ENST ID: ENST00000329285
  CDS Start-End: 375-2141
cggcgtccagtcttcgtccgccgttaggttgcggctgctgtggttgccaacgctacactgggtagaacgccagacaggggccacttttcgagaccgagtagagacggacagtgaggaggataggacccacttacacgcttttatgtcagccgcgatcccacccccacaagcgtctgcaaaacccttcctggggccttggcgacagccctgtgtcctcacggcgcgcagaggcggcgccgcgaaccttgtgtgcattttacacgacggcggggactgaggtccctcgcagcccagagccggagcccggggtcggccgagcccgcaggaccggcttcctcgccgactctcacggcctcacccagccccctgggcccatggcggcgccggcgttggcattagtatcatttgaagacgtggttgtgaccttcactggagaggaatgggggcacctggacctggcccagaggaccctgtaccaggaggtgatgctggagacctgcaggctcctggtctcactggggcatcctgttcccaaaccagagctgatctatctactggaacatggacaggaactgtggacagtgaagagaggcctctcccaaagcacctgcgcaggtgaaaaagcaaaacccaagattacagagcctactgcttctcagctggccttctctgaggaatcctctttccaggaacttctggcacagagatcctcaagagattccaggttggggcaagctagagatgaggaaaagctaataaaaattcaggaagggaacttgaggccaggaacaaacccccacaaagagatatgccctgagaagttgagttataaacatgatgatttggagccagatgatagtctgggcttaagggttttacaggaacgagtcactccacaagatgctctccatgagtgtgactctcaaggaccaggaaaagaccccatgactgatgcaaggaataacccttacacatgcacggaatgtgggaaagggtttagcaagaagtgggcccttgttcggcatcaacagattcatgctggagtgaagccctatgagtgcaatgagtgtgggaaagcctgtcgttatatggctgatgtcattcgacatatgaggcttcatactggggaaaaaccatacaagtgtattgagtgtgggaaagccttcaaacgcaggtttcacctcacggagcaccagcgtattcacaccggagataagccctatgagtgcaaagaatgtggcaaagcattcacccaccgctcttcttttatccagcataatatgactcacactcgagaaaaaccctttttatgcaaagaatgtgggaaagctttttactacagctcctcatttgctcaacatatgaggattcatactggaaagaaactctatgagtgcggtgaatgtggaaaggccttcacgcaccgctccacatttatccagcacaatgtgacccacacaggagaaaaaccatttttatgtaaagaatgtggaaaaaccttttgcctcaactcatccttcactcagcacatgaggattcacactggagagaaaccctatgagtgcggtgaatgtggaaaggcctttactcatcgctccactttcatccgacataagaggacccataccggagagaagccctttgagtgcaaagaatgtgggaaggccttttgtgacagctcttccttaattcaacatatgaggattcacactggtgagaagccttatgagtgcagtgaatgtggaaaggcttttacacaccactctgtttttattcgacataataggacccacagtggacaaaaacccttggagtgcaaagaatgtgcaaaagccttttactatagctcttccttcactcgacacatgaggattcacactggagagaagccctatgtttgtagagaatgtggaaaggcttttacccaacctgcaaattttgttcggcataataggatccacactggagaaaaaccttttgaatgcaaagaatgtgagaaagccttctgtgacaactttgctttaactcagcacatgagaactcacactggagagaaaccctttgaatgcaatgaatgtggaaagaccttcagccacagttcatcgttcactcaccatcgaaagattcataccagagtttaaaagatacaggaaggcctattacaagtgtgtttgtctttagtgaactcatagtggtgacatacctttccttttgagtataactattgagggaaatattttggccagagagatgtcttagtatctgataatttatactaactagaaacagaattgtccctgtgaaatctttttatggcaggtaatcacttgtcatccaaagaattatattaaagattcacccagtttagagccttacactgtacctgagaataatcgaggggagagacctggtggttaacatgcatttaggtaaaatgtcaggaacaactttcctcttattaatactataaatccatctcaagcatattttaaaataatgagagatggaggaaacaatctagaagataaaagaaaaagatgtgcataacttgttttcagtttccctgtttatgacagtttgtcatttggcgggttgggggatggagcagggaataagacattgaaaaagtctcatcccctttgtgtgttttacatatatatatctctaagtccagagccaggagagttggaccattgagggcagctctgccaacatttagtaaaagtattcattgttccaaaactgtcatctctacccttgagggagtgtgtctttgtgagaaatataaaggcttgagtcatgaaatacttaacacatgtgcacatgtacacatgtacatttatatgcagtgaattgttactcgtggtagttaggttctgtgaattttctgtgcacactgaattagtgaatgctgaatgattgttgctaggggaaatacagcgttagcttctgtgagcctctgatccaaacatttttatcaaccagtcaacacataaccttcttctatgggtatttgtttgtttgtttgtttaaagacactttatcagtgtttcttgaataattataattattctttataataaaaatattttaattata

SEQ ID NO: 203157 - DNA, 948 bp, Homo sapiens
  Payload ID: 20063
  Gene Name: zinc finger protein 599
  ENST ID: ENST00000588760
  CDS Start-End: 360-608
gtccgccgttaggttgcggctgctgtggttgccaacgctacactgggtagaacgccagacaggggccacttttcgagaccgagtagagacggacagtgaggaggataggacccacttacacgcttttatgtcagccgcgatcccacccccacaagcgtctgcaaaacccttcctggggccttggcgacagccctgtgtcctcacggcgcgcagaggcggcgccgcgaaccttgtgtgcattttacacgacggcggggactgaggtccctcgcagcccagagccggagcccggggtcggccgagcccgcaggaccggcttcctcgccgactctcacggcctcacccagccccctgggcccatggcggcgccggcgttggcattagtatcatttgaagacgtggttgtgaccttcactggagaggaatgggggcacctggacctggcccagaggaccctgtaccaggaggtgatgctggagacctgcaggctcctggtctcactggggcatcctgttcccaaaccagagctgatctatctactggaacatggacaggaactgtggacagtgaagagaggcctctcccaaagcacctgcgcaggttggtgactgagagtctggcagcgggtatcagggcagcctgcagaccacccaggcatcactgtgtctgaaatgccatgggcagctattttgtggtcttgagcagtcatggagcccttgaccccatggtcccccgtcttcccacttctgtcacacactctttgcctttattcaggttggaatatgttaggtaggagacagattctaggctttaatgatttgccactcactagcctcatgactctggagaggttgtgtgacgtcactgtgcctttggtatataagttaggctgagttaatgaccttctctgaaaaataaactccaaaatcatgtgactcaacagattaa

SEQ ID NO: 203158 - DNA, 3476 bp, Homo sapiens
  Payload ID: 20063
  Gene Name: zinc finger protein 599
  Uniprot ID: Q96NL3
  ENST ID: ENST00000587354
  CDS Start-End: 389-676
gtgggcgggacttccggcgtccagtcttcgtccgccgttaggttgcggctgctgtggttgccaacgctacactgggtagaacgccagacaggggccacttttcgagaccgagtagagacggacagtgaggaggataggacccacttacacgcttttatgtcagccgcgatcccacccccacaagcgtctgcaaaacccttcctggggccttggcgacagccctgtgtcctcacggcgcgcagaggcggcgccgcgaaccttgtgtgcattttacacgacggcggggactgaggtccctcgcagcccagagccggagcccggggtcggccgagcccgcaggaccggcttcctcgccgactctcacggcctcacccagccccctgggcccatggcggcgccggcgttggcattagtatcatttgaagacgtggttgtgaccttcactggagaggaatgggggcacctggacctggcccagaggaccctgtaccaggaggtgatgctggagacctgcaggctcctggtctcactggggcatcctgttcccaaaccagagctgatctatctactggaacatggacaggaactgtggacagtgaagagaggcctctcccaaagcacctgcgcagcttccttctcacttctgtggaagagttatcatcctggccatggctaatttctccagcagaatctagattacactttctgccttctcaggtgtattagccatctactattaatatgtaacaatattaccacaaaccctgcagctgaaaacatcacttatttattatctcccacctatggattgggagtccaggcacagcttagctgggtcctctcaggcgtgtcataggcagctcatagctcatcatcaccatcagctcacttcttcaaatcaagccactgtgtgagactccagcaagacggatgttccagtcttataaaattacatatattttatcatgtacattccatcatctttgccatattctatactttagaagcaaatcgaggtcctgccaacattttaacaggggaactacaaaagggtgtgaacactatgacttggggatcatgagaagccatacgtgaatctctcagctgcatcagggaacatgcttcttcacttacttcctacctcttctatattttcatcccctctctactcaacattaaaaaaaaatgatgatgtttctgatacctgggggagacttttttttttttagtgctcttacgtctccagcagcatctacatattgttgactctatttcacctgaacagccaagcttgttggagaagtcttctcattctttgaagagacatctacacaagactttcctttatttattttttcccttatttttgtactgaggtgcaatttatacataataagtgtacaaatcataaagtttcatttctataaagttttatatatgtacaagtcagagaaaccatctcacagttcaagaaatacagtgttttcagcacttaacaggctccttgtgctcattctttgtcagtatccccttctataaaagtagtcagtgtttatactctatatcaccatacattagttttgaaggcatataaatagaaccccctagtacatactctgtcctgacttcttttgataatctttatgactcagattcattcatgtggttgcatatagttggagttagttcattaccatcattgaatgaatagactacatatacccattttcctattgatggacatttgacttggtctccatttttggaatattatgaagactactcttatgaatattcttgattgtattttttgttggatataaacccatatttctgttgggaatatacatacaagtggactggccagatcaagtgtgggcatatgattagctttaatcgaaaccaccagtttcagagtaactacaccatttcacatttccactagccacgtatgagagtcttcattgttccatgtacgcctgagcagttggtgtctttccctttactctttgatgcctggtagtggtgtttctcagcaccacagcacttaaagtgttcttgcccaggtcactgttgccatcctgattgctaaattcaactataatgataatagacagtggtctacagtttaccaaacatttattctttgtcacacgaatgaacttttgtttggtttttgggttttttttgagacaggatctcactctgtcgcctaggctagtgtgcagtggcacaatctcggctcactgcagcctctgcctcctgggttcaagtgattctcgtgcctcagcctcctgagtaactggaattacaggcatgcaccaccacacctggctgaattttttgtatttttagtagagatagggttttgctgtgttggccaggctggtaactcctggcctcaagtgatcttcctgcctcagcctcccaaagtgctgggattacaggtgtgagcccccacacccagccacaaatcaatattttgtatgctttttctcctaacaacttgtaggcaggaactgagagtatcccagtttttcagatgaggaaagtgaatcttagaaaagtgtgttagtctgctctggctgctgtaataaaatactatagactgcgtggcttatatagcagaaatgtgttttctctcaggtctagaggccgcaagtctaaggtcagggtaccagcattgttgggttctgataagggctgtcttctcagcttgcagatggccgccttctcactttgtgctcacatggccttccctcagtgccttcacttcttacaagaagtttaccatgttggccaggctggtcttgaactcccgaccttcagtgatccgcctgtcttggccttccaaagtgctgggattacaggcatgagccaccatgcctggcccccctctgactttcataattgtccctaggtgtgcagaattagaaaaattataaataatgatttatgacacattgtcatcattagtcaatgcgtgtcctggttttttgttttattttctttcattgcattttattaatatatttattcatcctcctttaaaaagattgtaatgaacacctacaaacctttcgccaagtacaagaacatgacctgcttcctgcatctgttgatgtgtttctttcctttcccattcctatgctgcctcccttgcatacatggccactttaagatttgttattccattgcttattctgtaggaagattcaggtttttttcataaatataggctattcagatgttctgtttttgtttgtccgttttggtaatttgagtaatgtaaaatatttgcctactttatctttgtcttcccattactttttaagattgtttcatctcataatggtaaattttgtattttatcacaataaaaagtcagaaaaatatatttaacatatctacatatctttttataatgccatttaaaactgataaacctcaaaaaaataaaaggttgttacattgta

SEQ ID NO: 203159 - DNA, 3829 bp, Homo sapiens
  Payload ID: 20064
  Gene Name: zinc finger protein 600
  Uniprot ID: Q6ZNG1
  ENST ID: ENST00000338230
  CDS Start-End: 269-2437
ggatcgcgtggagtgaaggtcctaccacggcgcgtgagttttgctctgccttggattaagtctgcacttcccaggtccccggcgcttctgcccctgggacgtgggatccccacggacctggaaattctcgcctgtcttcccttcacccagagcaaattgagacgtcccggattgattcctaaagactcatgttatgtgaagaagcagctcagaagaggaaaggaaaggagccaggcatggctcttcctcagatatctcttccaaacgcatgatgaaggaggtcttgtcaacagggcaaggcaatacagaagtgatccacacagggacattgcaaagatatcaaagttatcacattggagatttttgcttccaggaaattgagaaagaaattcatgatattgagtttcagtgtcaagaagatgaaagaaatggccatgaagcacccatgacaaaaataaaaaagttgactggtagcacagaccaacatgatcacaggcatgctggaaacaagcctattaaagatcagcttggatcaagcttttattcacatctgcctgaactccacataattcagatcaaaggtaaaattggtaatcaatttgagaagtctaccagtgatgctccctcggtttcaacatcccaaagaatttctcctaggccccaaatccatatttctaataactatgggaataattccccgaattcttcactactcccacaaaaacaggaagtatacatgagagaaaaatctttccaatgtaatgagagtggcaaagcctttaattgtagctcactcttaaggaaacaccagataccccatttaggagacaaacaatataaatgtgatgtatgtggcaagctctttaatcacaagcaataccttacatgccattgtagatgtcacactggagagaaaccttacaagtgtaatgagtgtggaaagtccttcagtcaggtatcatcccttacatgccatcgtagacttcacactgcagtaaaatctcacaagtgtaatgagtgtggcaagatctttggtcaaaattcagcccttgtaattcataaggcaattcatactggagaaaaaccttacaagtgtaatgaatgtgacaaagcttttaatcagcaatcaaaccttgcacgtcatcgtagaattcatactggagagaaaccttacaaatgtgaagaatgtgacaaagttttcagtcggaaatcaacccttgagtcacataagagaattcatactggagagaaaccatacaaatgtaaggtttgtgacacagctttcacatggaattctcagctggcaagacataaaagaattcacactggagagaaaacttacaagtgtaatgagtgtggcaagaccttcagtcacaagtcatcccttgtatgccatcatagacttcatggtggagagaaatcttacaaatgtaaggtctgtgacaaggcttttgcgtggaattcacacctggtaagacatactagaattcatagtggaggaaaaccttacaagtgtaatgaatgtgggaagacctttggtcaaaattcagatcttctaattcataagtcaattcatactggagagcaaccttacaaatatgaagaatgtgaaaaggttttcagttgtggatcaacccttgagacacataagataattcacaccggagagaaaccatacaaatgtaaggtttgtgacaaggcttttgcgtgtcattcctatctggcaaaacatactagaattcatagtggagagaaaccttacaagtgtaatgagtgcagcaagaccttccgtctgaggtcataccttgcaagccatcgcagagttcatagtggtgagaaaccttacaagtgtaatgagtgcagcaagaccttcagtcagaggtcataccttcattgccatcgtagacttcatagtggtgagaaaccttacaagtgtaatgagtgtggcaagaccttcagtcacaagccatcccttgttcaccatcgtagacttcatactggagagaaatcttacaaatgtacggtttgtgacaaggctttcgtgcgtaattcatacctggcaagacataccagaattcacactgcagagaaaccttacaagtgtaatgaatgtgggaaggcttttaatcaacaatcacaactttcacttcatcatagaattcatgctggggagaaactttacaaatgtgaaacatgtgacaaagttttcagtcgcaaatcacaccttaaaagacataggagaattcatcctggaaagaaaccatacaaatgtaaggtttgtgacaagacttttgggagtgattcacacctgaaacaacatactggacttcacactggagagaaaccttacaagtgtaatgagtgtggcaaagcctttagcaagcagtcaacacttattcaccatcaggcagttcatggtgtagggaaacttgactaatgtaatgattgtcacaaagtcttcagtaacgctacaaccattgcaaatcattggagaatctataatgaataaagatctaacaagtgtaataaatgtggcaaatttttcagacatcattcatacattgcagttcattgacacactcatactggagagaaaccttacaaatgtcatgactgtggcaaggtcttcagtcaagcttcatcctatgcaaaacataggagaattcatacaggagagaaacctcacatgtgtgatgattgtggcaaagcctttacttcatgttcacacctcattagacatcagagaatccctactggacagaaatcttacaaatgtcagaagtgtggcaaggtcttgagtccgaggtcactccttgcagaacatcagaaaattcatttttgagataactgttcccaatgcagtgagtatagcaaaccatcaagcattaattgacactagagtcagtccagcattgacttgagtttgtgttgacttaacattgagttcaacccttaattgacattcaagtgtttatgttaagaggattgggccaggtgtggtttctcacacctgtaattccagcacggttggaggccaaggcacataggtcacttgaggtcagaagtttgaaaccagcatggccaacagatgtcagccacttttcccagcctgttttttgattcttattttctatttttcttttttgagatagtactttttaaagagatagtacttttttgatatagtactttataaaagggagatcaggccaggcacggaggctcatgtaagtaatcccagcactttgggaggccgagacgggcccatgacaaggtcaggagatcgagaccgtcctggctaacacggtgaaaccccatctctactaaaaatataaaatattagccaggcgtggtggcaggtgcctgtagtcctagctgcttgggaggctgaggcaggagaatggtgtgaatcctggagacggagcttgcagggagccaacatcgtgccactgcactccggcctgggcgacagtgagaatctgtctcaaaaaaaaaaaaaaaaaaaggatatcaaagctggatggtggctcatccctgcaatcacaacactttggtagactgatgtgagtggatcacctaaggtcagaagttcaagagcaccctggctaacatggtgaaaccccatctctactaaaaatacaaaagttagccggggggtggtggtgtgcacctttagttccagctacttgagaggctgaggcacaagagtcgcttaaacctgggaggtagaggttgccgtgaggcaaaatcgtgccactgccctcagcctgggcagtagagtcagtctccatctcaaagaaaccagcaaacaaaaaatattaaaaaaaaa

SEQ ID NO: 203160 - DNA, 1787 bp, Homo sapiens
  Payload ID: 20064
  Gene Name: zinc finger protein 600
  ENST ID: ENST00000360272
  CDS Start-End: 47-1573
tgaggaagaaacccagaagaggaagaggaaagcaaaggagtcagggatggctcttcctcagggtctattgacattcagggacgtggccatagaattctctcaggaggagtggaaatgcctggaccctgctcagaggactctttacagggatgtgatgctggagaattataggaacctggtctccctggatatctcttccaaatgcatgatgaagacattcttctcaacagggcaaggcaatacagaagcgttccacacagggacattgcaaagacaagcaagtcatcacattggagatttttgcttccagaaaattgagaaagacattcatggcttccagtttcagtggaaagaagatgaaacaaatgaccatgcagcacccatgacagaaatcaaagagttgactggtagtacaggccaacatgatcaaaggcatgctggaaacaagcatattaaagatcagcttggattaagctttcattcgcatctgccaaaacatactataattcacactggagagaaaccttacaaatgtgaagaatgtgaaaaagttttcagtcgcaaatcacatcttgaaagacataagaggattcatactggagagaaaccatacaaatgtaaggtttgtgacaaggcttttgcatataattcatacctggcaaaacatagtataattcacactggagagaagccttacaagtgtaatgaatgtggcaaggtttttaatcaacaagcaaaccttgcatgtcatcatagagttcatactggagagaaaccttacaagtgtaatgagtgtggcaagaccttcagtcagatgtcaaaccttgtataccatcatagacttcatactggagagaaaccttacaaatgtaatgagtgtggcaagatctttggtcaaaattcagcccttgtaattcataaggcaattcatactggagaaaaaccttacaagtgtaatgaatgtgacaaagcttttaatcagcaatcaaaccttgcacgtcatcgtagaattcatactggagagaaaccttacaaatgtgaagaatgtgacaaagttttcagtcggaaatcaacccttgagtcacataagagaattcatactggagagaaaccatacaaatgtaaggtttgtgacaaggctttcgtgcgtaattcatacctggcaagacataccagaattcacactgcagagaaaccttacaagtgtaatgaatgtgggaaggcttttaatcaacaatcacaactttcacttcatcatagaattcatgctggggagaaactttacaaatgtgaaacatgtgacaaagttttcagtcgcaaatcacaccttaaaagacataggagaattcatacaggagagaaacctcacatgtgtgatgattgtggcaaagcctttacttcatgttcacacctcattagacatcagagaatccctactggacagaaatcttacaaatgtcagaagtgtggcaaggtcttgagtccgaggtcactccttgcagaacatcagaaaattcattttgataactgttcccaatgcagtgagtatagcaaaccatcaagcattaattgacactagagtcagtccagcattgacttgagtttgtgttgacttaacattgagttcaacccttaattgacattcaagtgtttatgttaagaggattgggccaggtgtggtttctcacacctgtaattccagcacggttggaggccaaggcacataggtcacttgaggtcagaagtttgaaaccagcatggccaacagatgtcagccacttttccca

SEQ ID NO: 203161 - DNA, 9340 bp, Homo sapiens
  Payload ID: 20065
  Gene Name: zinc finger protein 605
  Uniprot ID: Q86T29
  ENST ID: ENST00000360187
  CDS Start-End: 350-2275
gtagttctgcgcgttcacgtccccgatcgggccgtgtccgccgcggccctgcgaggtccgagggactcattctgatgaaggaaagagcgtccctgtgcagctgcgtgtccttcagttctttggctctgattccgtgtctggcttcatctaagtggcctggtccatgggcagtgaagaaatgtaaagtgcaatagccctctggaacaagacaattcatgtgagataagaaagaagagcccacaagaccaaggatgtattctcagtttacagaccactgaccagaggccactccagggtgtcaggactaagagaagtcacaaaacagcagatttcccaagagcagcggaaaatgatccagtcacagatatcatttgaggatgtggctgtggatttcacgctggaggaatggcagctacttaatcctactcagaagaacttgtacagagatgtgatgttggagaactatagcaatctggttttcttggaagtctggctagataatcccaaaatgtggctccgagataatcaagacaaccttaaaagtatggagagaggccataaatatgatgtttttggaaaaatatttaattcaagcataaacattgttcatgtaggactgcgatcccataaatgtggcacaggagaaaaaagtttgaaatgtccttttgatttgcttattccaaaaaataattgtgaaagaaagaaaattgatgaactcaataagaaattattgttctgtatcaaacctggcagaacccatggtgggataaaatactgtgattgcagtacatgtagaaaatccagcaacgaagagccatggctcactgctaatcacataacacacacaggagtctatttatgcatggaatgtggcagattttttaacaagaagtcacaacttgttatacaccagagaactcatacaggagagaagccctatcaatgcagtgagtgtggaaaagccttttcacagaagtcactgctcacggttcatcaaagaactcactcaggagaaaaaccgcatgggtgcagcgaatgtcagaaagcttttagtaggaagtcactcctcattttacatcagagaattcatactggagagaagccgtatggatgcagtgaatgtggaaaagccttcagtaggaagtcgcagcttaaaagacatcagataacgcacacaatagagaaaccctacagttgcagtgagtgtgggaaagcattctcccagaaattaaaactcatcacacatcagagagcgcacacaggagagaaaccctatccatgtagtcactgtggaaaagccttcttttggaagtcgcagctgattactcatcagaggacccacacagggaagaaaccttacggatgtggtgagtgtcaaaaagccttcagcaggaactcacttctcattaggcatcagaggattcatacaggagagaagccctacgaatgcaacgaatgtggtgaagccttcatcagaaaaccacagctgattaaacatcagataactcacacaggagagaagaactatcgatgcagtgattgtgaggaggccttctttaagaagtcagagttaataagacatcaaaaaattcacttaggagagaaaccatatggatgcattcaatgtgggaaaaccttctttgggaagtcccagctcctaacgcatcacagaacacacactggggagaagccttatgaatgcagtgagtgtgggaaggccttcacccagaagtcaagcctgatatcacatcagagaacacatacaggtgagaaaccctatgaatgcagtgaatgcaggaaaaccttcagtgagaagtcaagtctcattcatcatcagagaacccatactggagaaaagccctttgaatgtagtgaatgtaggaaagcttttgcctggaagccacagcttcttaggcatcagagaattcatacaggggagaaaccctatgaatgcagtgaatgtgggaaagcatttgttcagaaagtgcagctcattaagcatcaaagaaatcacacaggagagaaaacctatggatgcagcgattgtgcaaaagctttctttgagaaggcacagctgattatacatcagagaattcatacaggagagagaccatataaatgtggtgaatgtgggaaatctttcacaagaaagtcacaccttatgaggcatcagaggattcatacaggagataaatactatggatgcaatgagtgtgggaccaccttcaacaggaagtcgcagcttatgatacatcagagaaatcatataatataaaaatcatgactttggcgaatgcagaaaggttgctatcaagtgtcatactttctgacacttttgaggatgcatgtgggagagaaaccctattgaggcagtgactgttgaaaaagcttgaattgaggagtcaagagtcactaagcagaatttagaaagagaagtttttaaaaagcaaacagtgtaaaaaaagtcatctcccagaagacactactcgttacatattggatgactcattgaggtgaaaaccttattagtgttgtgatagtagagaagcttttagtcaaaagtcagtttattaaatgtttagaatacctaaacaggaagaaaattctattgttttttataacaaagtggaagatttcaagaaaggacaactcactgtacacttgagaataatacctacagaggttcatactgaagagtagtctcaataatgtaaagaatttgacaagcatgatgctattgaaatagttctgtaaggaagtggtgttctttatacatcaattattacaaaaagcagtgaattgtaagtgtgaggtgtgtttacttagatgtgaagagttctccttactgctgtgatggaataacaagggtcagatttcctctcctgccttaaacaactggaagctatacaatacgtataataggtaatggtttttagacataggacaagcacaggtttgtgatcctcaggagactgcagacagagtgaggtgagcaccatggtttctcagcctgcccccgcatggcagttcctaggttgcagttcagggaagggaaacaataaatctcgctgaattgaagagacaggactggcagttggggaggccacagcagctagaatttccaggggaaagtactggagagatgggatccttctagatacagggctcaagaagtctgctgggagtcccctgagtcctttgacttagtactgacttgcactgaggccaggaaaagaagcactggaaagcagcaggctgaacaattcctggaactcatgcagggctgggaatagtttatgttctcagcagccagagtggaaacagagtggaaacacatggagcatcaggtagaattctcagaaaggttttgttttagtagtgcagctaattaactctagattaaaagctactctggacctacagtgtccggcatccaaaaaaactaatgtgttatgcaaagaagcaataaaatatgacttataaccaggagaaaaatcagtagaaacccagaaaagacagaggtgatggaattagtagacaaggatattaaaagagctattgtaaatataaagtagaggaaaacataagattgatgaaacctgaggtataagagatatttttactggccaaaatggaacttctagggatgaaatcaacttctgattttgttaaaatcccgagtggagagattagatacagaaaaagaagaaaaaatcaatgaacttgaagagtaagaataaaaactaccaaagtgatatacagagagaaaaaaagacttagagaagaggaagagaataggaaaaccattacagtagtgtaatatatgtttaactggagtcccagaaggagaggagaaaatgaagaggcatgaagaagtatttgaataaataatggctaaagattttccaaatctggtgaaaacaatacccccacatattcaagaagctcaaatgacctgaagtagaataaacataatttacatcacagcagtgcacctcagagtcacattcatgaaaagcactgataaacagaatacttttaaaacaccttgagaaaaaaagataatacatacacatgaacaaagaatggcagcatatttctggtgagaactatgcaagctataagacaatggagtattatctctaaattccttaatgaaataaacaacaaaccctgcaacctagaattctgttactgtcaaaaacgttttcaaaaatgaaggcaaaataaagactgtttctgagaaactaaatcaaaggtaattttattacctgtagacctgtctttgggaaacattaaaggatgtttgagggcagcaggaaaataatacaaaacttaagtttgggtctgtacaaaggaatgaagttctgaaaatggtgaatatgtgggtaaatataaaagatatttctctctttttaaaatctttttaaaagggaattggctgcttaaagccaaagtaatgataacgtatttggagtttatttagaagtaaagtgtgatgacgataacacttaagtgtgaatttttaaatatagttgagtagactgcatcatctgagttagaagcctattccttcagggctcggggtagcttgaatttgtagcaggcacatgacagaaattgtatgtattgtggatctgcatgtgtgctgagtattccctatttctttgatcccttttcccccattttctgctctgctcccccctgaggctgtcttctagagactggggtttcttcataggtttgaacagtgggagataccagaggtgggaggagaaaaagttatttattaccgttcccttcctcctgcctggaccatggtagcttctgtgttcccgtaaggatacagcttcctttgggaagccccatctatggctgtagatctctcggtttcagttgacaccattccctctccatgatcttcagacttaactactactgggtgcttccccaacccactggttgggtgtctttaattgtgaacacatatttgtaaatagtgcctttattaattgttcttgagttaatattctgagtgtgccatttattttctgtgccatctgttaaatgatgagcatttaataaaattgtgataatcagttatcagtacaagtgccgcatagtgcataggctgaaatgtctcaagattccccacactacatatcagtattttctatctgtatctggacaatgcagtagaaattataacaaatacaaagttctttgtgcttttctgctgcatatgtcagtggctctggagattgttaccatctgctacatatataaatagacttgcagttattactaagctcctcttcagtaatagaaagacttatgaagtcttttactacctctgggttagccaaacaaccttcaaaaagcattgttatttaggttaaatatctgtggacaagaaacaagataatcagttactgagtgaagaaagacgggaatgatgtcccatacttcccagctctctaaagtgttatgctgtacaattaaaatacccctgacccatcatctgctaccattcgttgtggataattcatgtaatctctaacctgtgggcaagtctttacccttcagtagtcaagattacgttagagacttcgtccacgaatccacaccacctttcccatcagttctcaccggaaatatgctgccaaaaagaaaatcagcttttctaagatcaagccagagttgcttctcttacaaccttacggcgctaatgcattaagttgaagtcgactgccaaagaggcccagcagagggcagcacccccatcatttttttgaatttctcccttaggaattttgccttcctttgtcttctgtccaccaggccttctctccagctggacacaaacctcctttgaagggaaataattgccgttaggcttcacagtagtgctttttcctttcacttggatttgcattttaacctgcatttcgaagatttttatacatgttttctatttccgacaatgccaggaggcttcattgacgttgtagtctgtgttaataaacttgtgtatcactctgctctgatcttttaggaattaacttgcaaatgaaatgaatatgttgggactttggcataatttgaatatagcattgtgtgagttgtgattgtctcttcctaattgtgctgtaataacctgtgtatgagaataaaatgatttccaccatcaggattctcccatgcccccctttattttgccatagactaaaggggaaaggccattctcactctccttaccttagaaaattttatttgcctcatgatgactgtctgccgcttagaagtagacaatataaaatctcatcactatttcacaagaataaaattcaaatcagttatatccaaagtaacttttcaactgggggtggtgtctcacacctgtaatcccagtgcttggggaggccaaattgggaggaccgcttgagcccaggcgtttgagaccagctggacaacatagcaagactcatctctacaaaaaaaaaatttaattagccatgagaggctgggtgcagtgacgcaagcctgtaatcccagcactttgggaggccgaggtgggtggatcacctgagttcaggagttcgcgaccagcctgaataacatggtgaaaccccgtctctactaaatacaaaaaaattagccgggcatggtggcacatgcctgtaatccgagctacttgggaggctgagacaagagaatcacttgtacctgggaggaggaggttgcagtgagccgagatcacggcattgcactccagtctgggcaacaagaacaaaactccatctcaaaaaaaaagttagccatgatggtgcatgtctgtaatcccagctacttgggaagctgaggcagaagggtcacttgagcccaggagttcaaggctgcagtgagccatgatggggccactgcattccagcctgagtgacagagtgaaaccttgcctcttaaatgaataaaaataaagtaagctttcttcaacaagttttcttccaacgccacacactccatcaccatattaatttaaattatttagtatgtagcagatttactttgagaccaaatctgtgaagttggtgatgatatttaataattctttatttcccttatgggatctttgcaacttagaacacaattattactcattgtatccgggtcatttaacatcttgtcagaatgctaacattaaataaaccaggccaggcgcggtggctcacgcctgtaatcccagcactttgggaggccaaggcgggtggatcacgaggtcaggagatcgagaccatcctggctaacacggtgaaaccccgtctctactaaaaatacaaaaaattagccaggtgaggtggccagcgcctgtagtcccagctactcaggaggctgaggcaggagaatggcgtgaacctgggaggtggagcttgcagtgagccaagatcacaccactgcactccagcctgggtgatagagcgaggctctgtctcaaaaaaataaataaatcaggcgctgggcgcggtggctcacacctgtaatcataacactttgggaggctaaggcaggcagatcacaaggtcaggagttcgagaccagcctggccaatatggtgaaaccccatctctactaaaaatgcaaaaattagccgggcttggtggcacgtgtgtagtcccagctactccggaggctgaggcaggagaatcgcttgaacccaggaagccgatgttgcagtgagctgagatcacaccactgcactccagcctgggtgacagagcaagactccatcacacacacacacaaaaaaacagggaacaccaaacttatttagtgatacctaaatctcgaaatgtgcacagcaaaaagaatgtagctatcgaggcattcactgttaagatgaaaagaaatgtaagtgaagggacatttataacttgaagttctcatttaagaattactggccagggccgggcatggtggctcatgcctgtaatctcagcactttgggaggccaagatgggtggatcacgaggtcaggagattgagaccatcctggctaacaaggtgaaaccccgtctctactaaaaatacaaaaaattagccgcgcgtggtggcgggcgcctgtagtcccagctactcgggaggctgaggcaggagaatggcgtgaacccgggaggcggagcttgcagtgagctgagatcgcgccactgcactcactctggcctgagcgacaaagcgagactccatctcaaaaaaaaaaaaaaaaaaaaaaaaggcattactggccagatgtggtggctcatgcctgcaatcccaggactttgggaggcccagctgggaggagaggagagcttgagcccaagagtttgaggccagcctgggcaacatagtggcactttgttctccacaaaaataattaataaagcaagtaagcattcctatcactaaaagtacttaaaaaaacaaatcaagcttaaacttacaatagggggtgggagaagtgaattaactttttattttcattagtgcgtgctcatgtgaaaggagcagttaggcaatggagtgttaccactgcagccaggcaggtctagtgtagattcgtccccaaaccatggtatttgccaggcagctctgagggtatgaacaaggcatgtgcattgtgtcctgttgtgtgtaatgcgtttgtatgaagcagattctgtaagaagatgatgttggctgagatgtgggccagctgtacttcactgcttcattacaagggtaaggctggccaggtgcgatggctcacgcctgtcatcccagcactttgggaggccaaggtgggtggatcacttgagttcaggagctcaagagcagcctggccaacatggcaaaaccctatctctactaaacatacaaaacaaaaaaaatagccgggtgtggtggagcacctgtaaacccagctgctcgggaggctgaggtgggcaaatcacatgaacccaggagttggaggttgcagtgagccaagatggcaccaccactgcactccagcctgagcaacagagtgagactccgtctcaaaaaaagagaaaacaagggtggggctaaaaggctaatagctaactgaaaatgagcagctgtttttcattctgtgaggagcatcttgtataagccgtagtgtttgatccactcatcattgcatgggcagctgtgcgaggtcagacctgttactgacacttccttctgtgctctgtttgaaaagaaaatctctgtatgcaaatgttaactgagtaaactgtttcatgaattcatatgtgtgagtgtgatcactgggagcaatttgcaaataaactctggtttccattcc

SEQ ID NO: 203162 - DNA, 6156 bp, Homo sapiens
  Payload ID: 20065
  Gene Name: zinc finger protein 605
  Uniprot ID: Q86T29
  ENST ID: ENST00000392321
  CDS Start-End: 227-2245
gtagttctgcgcgttcacgtccccgatcgggccgtgtccgccgcggccctgcgaggtccgaggggcaatagccctctggaacaagacaattcatgtgagataagaaagaagagcccacaagaccaaggatgtattctcagtttacagaccactgaccagaggccactccagggtgtcaggactaagagaagtcacaaaacagcagatttcccaagagcagcggaaaatgatccagtcacagatatcatttgaggatgtggctgtggatttcacgctggaggaatggcagctacttaatcctactcagaagaacttgtacagagatgtgatgttggagaactatagcaatctggttttcttgggttttcaaattctcaaacctgatgcaatgttcaaactggaacaacaagatccatggataataggtcaagaaatcctaaatcagaacttttcagaagtctggctagataatcccaaaatgtggctccgagataatcaagacaaccttaaaagtatggagagaggccataaatatgatgtttttggaaaaatatttaattcaagcataaacattgttcatgtaggactgcgatcccataaatgtggcacaggagaaaaaagtttgaaatgtccttttgatttgcttattccaaaaaataattgtgaaagaaagaaaattgatgaactcaataagaaattattgttctgtatcaaacctggcagaacccatggtgggataaaatactgtgattgcagtacatgtagaaaatccagcaacgaagagccatggctcactgctaatcacataacacacacaggagtctatttatgcatggaatgtggcagattttttaacaagaagtcacaacttgttatacaccagagaactcatacaggagagaagccctatcaatgcagtgagtgtggaaaagccttttcacagaagtcactgctcacggttcatcaaagaactcactcaggagaaaaaccgcatgggtgcagcgaatgtcagaaagcttttagtaggaagtcactcctcattttacatcagagaattcatactggagagaagccgtatggatgcagtgaatgtggaaaagccttcagtaggaagtcgcagcttaaaagacatcagataacgcacacaatagagaaaccctacagttgcagtgagtgtgggaaagcattctcccagaaattaaaactcatcacacatcagagagcgcacacaggagagaaaccctatccatgtagtcactgtggaaaagccttcttttggaagtcgcagctgattactcatcagaggacccacacagggaagaaaccttacggatgtggtgagtgtcaaaaagccttcagcaggaactcacttctcattaggcatcagaggattcatacaggagagaagccctacgaatgcaacgaatgtggtgaagccttcatcagaaaaccacagctgattaaacatcagataactcacacaggagagaagaactatcgatgcagtgattgtgaggaggccttctttaagaagtcagagttaataagacatcaaaaaattcacttaggagagaaaccatatggatgcattcaatgtgggaaaaccttctttgggaagtcccagctcctaacgcatcacagaacacacactggggagaagccttatgaatgcagtgagtgtgggaaggccttcacccagaagtcaagcctgatatcacatcagagaacacatacaggtgagaaaccctatgaatgcagtgaatgcaggaaaaccttcagtgagaagtcaagtctcattcatcatcagagaacccatactggagaaaagccctttgaatgtagtgaatgtaggaaagcttttgcctggaagccacagcttcttaggcatcagagaattcatacaggggagaaaccctatgaatgcagtgaatgtgggaaagcatttgttcagaaagtgcagctcattaagcatcaaagaaatcacacaggagagaaaacctatggatgcagcgattgtgcaaaagctttctttgagaaggcacagctgattatacatcagagaattcatacaggagagagaccatataaatgtggtgaatgtgggaaatctttcacaagaaagtcacaccttatgaggcatcagaggattcatacaggagataaatactatggatgcaatgagtgtgggaccaccttcaacaggaagtcgcagcttatgatacatcagagaaatcatataatataaaaatcatgactttggcgaatgcagaaaggttgctatcaagtgtcatactttctgacacttttgaggatgcatgtgggagagaaaccctattgaggcagtgactgttgaaaaagcttgaattgaggagtcaagagtcactaagcagaatttagaaagagaagtttttaaaaagcaaacagtgtaaaaaaagtcatctcccagaagacactactcgttacatattggatgactcattgaggtgaaaaccttattagtgttgtgatagtagagaagcttttagtcaaaagtcagtttattaaatgtttagaatacctaaacaggaagaaaattctattgttttttataacaaagtggaagatttcaagaaaggacaactcactgtacacttgagaataatacctacagaggttcatactgaagagtagtctcaataatgtaaagaatttgacaagcatgatgctattgaaatagttctgtaaggaagtggtgttctttatacatcaattattacaaaaagcagtgaattgtaagtgtgaggtgtgtttacttagatgtgaagagttctccttactgctgtgatggaataacaagggtcagatttcctctcctgccttaaacaactggaagctatacaatacgtataataggtaatggtttttagacataggacaagcacaggtttgtgatcctcaggagactgcagacagagtgaggtgagcaccatggtttctcagcctgcccccgcatggcagttcctaggttgcagttcagggaagggaaacaataaatctcgctgaattgaagagacaggactggcagttggggaggccacagcagctagaatttccaggggaaagtactggagagatgggatccttctagatacagggctcaagaagtctgctgggagtcccctgagtcctttgacttagtactgacttgcactgaggccaggaaaagaagcactggaaagcagcaggctgaacaattcctggaactcatgcagggctgggaatagtttatgttctcagcagccagagtggaaacagagtggaaacacatggagcatcaggtagaattctcagaaaggttttgttttagtagtgcagctaattaactctagattaaaagctactctggacctacagtgtccggcatccaaaaaaactaatgtgttatgcaaagaagcaataaaatatgacttataaccaggagaaaaatcagtagaaacccagaaaagacagaggtgatggaattagtagacaaggatattaaaagagctattgtaaatataaagtagaggaaaacataagattgatgaaacctgaggtataagagatatttttactggccaaaatggaacttctagggatgaaatcaacttctgattttgttaaaatcccgagtggagagattagatacagaaaaagaagaaaaaatcaatgaacttgaagagtaagaataaaaactaccaaagtgatatacagagagaaaaaaagacttagagaagaggaagagaataggaaaaccattacagtagtgtaatatatgtttaactggagtcccagaaggagaggagaaaatgaagaggcatgaagaagtatttgaataaataatggctaaagattttccaaatctggtgaaaacaatacccccacatattcaagaagctcaaatgacctgaagtagaataaacataatttacatcacagcagtgcacctcagagtcacattcatgaaaagcactgataaacagaatacttttaaaacaccttgagaaaaaaagataatacatacacatgaacaaagaatggcagcatatttctggtgagaactatgcaagctataagacaatggagtattatctctaaattccttaatgaaataaacaacaaaccctgcaacctagaattctgttactgtcaaaaacgttttcaaaaatgaaggcaaaataaagactgtttctgagaaactaaatcaaaggtaattttattacctgtagacctgtctttgggaaacattaaaggatgtttgagggcagcaggaaaataatacaaaacttaagtttgggtctgtacaaaggaatgaagttctgaaaatggtgaatatgtgggtaaatataaaagatatttctctctttttaaaatctttttaaaagggaattggctgcttaaagccaaagtaatgataacgtatttggagtttatttagaagtaaagtgtgatgacgataacacttaagtgtgaatttttaaatatagttgagtagactgcatcatctgagttagaagcctattccttcagggctcggggtagcttgaatttgtagcaggcacatgacagaaattgtatgtattgtggatctgcatgtgtgctgagtattccctatttctttgatcccttttcccccattttctgctctgctcccccctgaggctgtcttctagagactggggtttcttcataggtttgaacagtgggagataccagaggtgggaggagaaaaagttatttattaccgttcccttcctcctgcctggaccatggtagcttctgtgttcccgtaaggatacagcttcctttgggaagccccatctatggctgtagatctctcggtttcagttgacaccattccctctccatgatcttcagacttaactactactgggtgcttccccaacccactggttgggtgtctttaattgtgaacacatatttgtaaatagtgcctttattaattgttcttgagttaatattctgagtgtgccatttattttctgtgccatctgttaaatgatgagcatttaataaaattgtgataatcagttatcagtacaagtgccgcatagtgcataggctgaaatgtctcaagattccccacactacatatcagtattttctatctgtatctggacaatgcagtagaaattataacaaatacaaagttctttgtgcttttctgctgcatatgtcagtggctctggagattgttaccatctgctacatatataaatagacttgcagttattactaagctcctcttcagtaatagaaagacttatgaagtcttttactacctctgggttagccaaacaaccttcaaaaagcattgttatttaggttaaatatctgtggacaagaaacaagataatcagttactgagtgaagaaagacgggaatgatgtcccatacttcccagctctctaaagtgttatgctgtacaattaaaatacccctgacccatcatctgctaccattcgttgtggataattcatgtaatctctaacctgtgggcaagtctttacccttcagtagtcaagattacgttagagacttcgtccacgaatccacaccacctttcccatcagttctcaccggaaatatgctgccaaaaagaaaatcagcttttctaagatcaagccagagttgcttctcttacaaccttacggcgctaatgcattaagttgaagtcgactgccaaagaggcccagcagagggcagcacccccatcatttttttgaatttctcccttaggaattttgccttcctttgtcttctgtccaccaggccttctctccagctggacacaaacctcctttgaagggaaataattgccgttaggcttcacagtagtgctttttcctttcacttggatttgcattttaacctgcatttcgaagatttttatacatgttttctatttccgacaatgccaggaggcttcattgacgttgtagtctgtgttaataaacttgtgtatcactctgctctgatcttttaggaattaacttgcaaatgaaatgaatatgttgggactttggcataatttgaatatagcattgtgtgagttgtgattgtctcttcctaattgtgctgtaataacctgtgtatgagaataaaatgatttccacc

SEQ ID NO: 203163 - DNA, 4248 bp, Homo sapiens
  Payload ID: 20066
  Gene Name: zinc finger protein 606
  Uniprot ID: Q8WXB4
  ENST ID: ENST00000341164
  CDS Start-End: 622-3000
gaggaaaactcacagggtgcgtcgctggtaacccatgctcccataaagcctggcctctggaaagagacttgggaacgagccctgacgttctcagccgtcgagcttcacagagaagggtagctcgaattaggttccttatcttaaagagaataacagcagtcactttctcacaatcttgcgaacgccaaatggaaggatccctcgagagcgctgagaactcgccgagctcctcccgggaaacccggtaccacgaggcgccattttgcggatgggcaaaccgaggcccgcggggccgcgacttacccaggcctttttgcagtgggaggcgacggtggaggagggtggtctgggaccgggacaacaaagtccatcctgccgccggcttcgacgcaggtgccagaaaggtcccaaccccgcccaggcagggcgaggcggcgcggcccaggaacctgtcatggcggcgccgctgcccgacgccggaagtgcccgcctggaactacagctcccagcagaccccgcggcgcgctccggtcgacgccggggaagcagccgccattgtccgcggctgaggttgggatttgctgtgttcctgggcaggtgcctggtcaatcagtcctcgggatggcagccatcaacccgtgggcctcctggggtgcccttacggaccaatcttgggggatgacagctgttgacccatgggcctcctgggctctgtgtcctcagtatcctgcctggcacgtggagggaagcctggaggaggggaggagggccactgggctcccagcagcccaggttcaggaaccagtgaccttcaaggacgtggccgtggacttcacccaagaagagtgggggcagctggaccttgttcagaggaccctgtaccgtgatgtgatgctggagacctatggtcacctgctctctgtgggaaatcagattgccaagcctgaggtcatctccctgttggagcaaggagaagagccgtggtcagtggagcaggcatgtcctcaacgcacttgtccagaatgggtgagaaatcttgaaagcaaagcattgatcccagcacagagcatttttgaggaagaacaatcccatggcatgaagttggaaagatatatatgggatgatccttggttctccaggttagaagttttgggatgtaaagaccaattagaaatgtaccacatgaaccagagtacagctatgaggcagatggtcttcatgcaaaagcaagtactatcccagagaagctctgaattctgtggacttggggcagagtttagccagaacttaaactttgttccatctcagagagtttctcagatagaacatttctataagcctgatacacatgctcaaagttggagatgtgactcagccataatgtatgcagataaggttacctgtgaaaataatgattatgacaaaactgtttatcagtccattcaacctatttaccctgcaagaatacaaactggagataatcttttcaaatgtactgatgctgttaaatctttcaatcatataatacattttggtgatcataaaggaattcacacaggagaaaaactctatgaatataaggaatgccatcaaatctttaaccagagcccatcatttaatgaacacccaaggcttcatgttggagaaaaccagtataattacaaagaatatgagaatatcttttatttctcatcctttatggaacatcaaaaaattggtactgtagagaaagcgtataaatacaatgaatgggagaaagtctttgggtatgactctttccttactcaacatacaagcacttacactgcagagaaaccctatgactacaatgaatgtgggacgtctttcatctggagctcttaccttattcaacataagaaaactcatactggagaaaaaccctatgaatgtgataaatgtggaaaagtttttaggaatcgctcagcccttacgaaacatgaacggactcacactggaataaaaccctatgaatgtaataaatgtggaaaagccttcagctggaattctcatcttattgtacataagagaattcatacaggagaaaaaccttatgtttgtaatgagtgtgggaaatctttcaactggaactctcatcttattggacatcagaggactcatacaggagagaaaccttttgaatgtactgaatgtgggaaatcattcagctggagctcccatcttattgcccatatgagaatgcatactggagagaaaccctttaaatgtgatgaatgtgaaaaagcttttagggactactcagcccttagtaaacatgaaagaactcattctggagcaaaaccatataaatgtactgaatgtggaaaatccttcagctggagctcccatcttattgcccatcagagaactcacacgggagagaaaccatataactgtcaggaatgtggcaaagcattcagagaacgctcagccctcactaaacatgagataattcattctggaattaagccctatgaatgtaataaatgtggaaaatcctgtagccagatggctcaccttgttagacatcaaaggactcatactggagaaaaaccctatgaatgcaataaatgtggaaaatccttcagtcagagctgtcaccttgttgctcatcggagaattcacactggtgagaaaccctataaatgtaatcagtgtgaaagatcctttaactgtagttctcacctcattgcacaccggagaactcatactggagagaaaccatacaggtgtaatgaatgtgggaaagcatttaatgagagttcatcccttattgtacacctaagaaaccatactggagaaaagccctacaaatgtaatcattgtgaaaaagcattttgtaagaattcttcccttattattcatcagagaatgcatagtggagagaaacgctttatatgcagtgaatgtggaaaagcctttagtggtcactcagccctacttcaacaccagagaaatcacagtgaagagaaactgaattgaatttatgcgagtttttcgtttcttgtacatttgacaacacattgaggaaaaccctataaacataatcaagaggggacatttttcattaagagttcagtaagacttctcccacattatttactagaaaatatcatcttagaagaaaccccatgaaggaaaagaatagggaaaagctttcagcagttatttagcccttactcaaaatcagataattaacaatgaaggaaactctaaactccccttatggtctaccagtaattcatacttgaggaccatgactgtggggaatgaggcatcttttagcaagagctctcaccaattgtagattggtgtgaattgctaagggaaaaaccttatgcagagaaaagtttttgactggaaatacactgttttgcatcaagctggagtactggatggaaaactctacaataacattttgtgcataattgtagaaatacagattttgttgttataaggggagggtctgggtgcccaggagtagaatatgaagtgctaaatctgaatgtaagaaaaataatagtattgaatggggtatttactgttgattaacctccttagagaaaattaatgaatgagatgactaacggtagaaaagttattgcctaggagtgtgagactgatgttgctggacagaaagtgatccttagcccagtgtgtcagcgtccattgttactcatcactgcattgttgggcaattagtttgtaatttgttttaggcaatcactataaattataattatggacactgcatcagtatacataacatgaaggaataaaaaggatacagaattgtatatacatacttactgtaacacatctaaaaaaatgtatatgggtaaggacctgaaagatccatggaaaagttaacccagttgagatttttaaaaagttttacaaatacatataacacttatgtgctgggctttcttttaaatgctttccaagtgttaacttgtttagtcccctttactctgagataggtactgttaccccagttttacaaatggctaagctgaagcagagatgttgaaggatcctacctaaggggcacaactagtaagggagtagagctgagattggctccagagttcttgttttcagccaccattttatgctgcctctccagtgattttttttcccattttcttcagtgtttctatagcagagatttgataataaaaagaaaatcctaaacaatgagaaataaagttacctggtttctctgtc

SEQ ID NO: 203164 - DNA, 2680 bp, Homo sapiens
  Payload ID: 20066
  Gene Name: zinc finger protein 606
  ENST ID: ENST00000547828
  CDS Start-End: 92-301
gtcgacgccggggaagcagccgccattgtccgcggctgaggttgggatttgctgtgttcctgggcaggtgcctggtcaatcagtcctcgggatggcagccatcaacccgtgggcctcctggggtgcccttacggaccaatcttgggggatgacagctgttgacccatgggcctcctgggctctgtgtcctcagtatcctgcctggcacgtggagggaagcctggaggaggggaggagggccactgggctcccagcagcccaggttcaggtgagatggggctgtcctgttcccagaggatgatgtccaggttatccctggtcatcccagttgatgcggctctccagtttacaacagttggagtttgggtagggaaggaagcaactggaagttaatccttcctgagagcaggtagggagaattaggccgtttttagtgattcggagccttagtgtcaaccagtctgtccacagtactgagctccaactctccctggcttgttgtggggcatgaagggcagcccttttggctggcagccccacttctctattgccaccttcactcatgtctttagcacccgatttaggctgatgctgtgcagtgcctgctgtgcctgctgtgaagggaacaaggacaggtgtgagccttcaccctgaggagctcccagacccttttccagggttattcactcagctaaggagatctcacggcctacctggagccacacgtgcagtgtgggacaggagaaacctgagacgggtagggtaggcctgcaggagcacagtcacctgatgagtcgggagatgggacagagtctgtgtggagctcagcttttactgtggaggggaaggctgcttcgtagacctgggccaagaggtgaaaagaatgcatcagccagttgggcacagcctggtgagtgggggtctggcctcctgcagcaccacaggggtcaggggtggcaggcagcacactgtgtgaccagtgtttgagtgagactgactccagttagattttaggctggagaggccaggccctgaatgcttgctgcagaacctcagaagtcttgggatcaggcggcaccagggtccaaaatgtggtgatgggtgtggaaagaagagggctgtgggaagcaggctggtgtttcaggcttcagtctgaccagggccttggagctatggaggagaggtataaggaaatcaaagcaggggcctttgtgattatggggacagggtggctcctgagagaaataggacaatggagttacttaggaaaggtgtcatctctctgccgtcctcctgcccagcctcctcaccagatgcagccacttaaaaaaatttttataatagctttattgagatggtactgacatattataaagtttatccttttaaagtgtgtaattcagtggtttctcgtatagtcacagaattgtgcaacaatcaccagtatctaattctagaacattttcatcaccctaaaaagaaatcctgtacccattagtagtcactccctgtttcccctactccctcccaaccactagtgtactttctgtctctatgaatttgcctagtctggacatttcataaaaatggaatcataatatggcacagccttttttgtctggcttttttcacttagcataatgtttgccttctcaagagttacccatattgtagcattgtgtcaatatttcttttaatgtaatgtaattacaatgtaaatgtaataagtgtaattacaatgtaattacattgtaaaaaatgactgaggcagccatttttaacttcctgttttcagttttttagagttgtctctgtatttctaaatgggagattttttaaattggttttttcctaattcattaaagttatatttactctgttaactccctgctatgaaagatgaagaaaaagagtttcattacttatttttaggtcttttatttttaagttaagataatgaatcaagcagatgtgagatacttggatataaaacaagatttaaaaatgatgtctctactttgtgcctccccctcaaattaaaaaatattattgaaaccgcccacagtttcaaatctggtgggtgaagtccatcataagtatgctgttcccacttggcagtgttgctatccctggtccaggtgagatgggaagcagaagggcctgaaccatatgatgcaaggtgattgttgcctggcatcagaacttgggcaactatgaggtttgctgctcttacaatgtacagtcattattaaatcctaagacagaataatcagtagtgaagctagactagcctgaaagatggcccctgaatcagactctgaggagtagaagttagctgtaataaaacactgcgaagaagccctgttaaccaccatgctacactctgctgttaatttatgctaggctttctgagaattatctaagttaatgctgagaaaataaaacagaattaaaaataacaacaccctccaatgtctgaagagttgtgatttctgataacatgctcctggctggcccccctccccacactctggattttttcctgtgggaaactcggatttgactgctgtgtgtttttaactaagtgagatcttcaggaatgcaaaagaaccctgtgtccctttattgttccctccaagttaagtatttattgaaataaagcatttatctggtgaaaaca

SEQ ID NO: 203165 - DNA, 2417 bp, Homo sapiens
  Payload ID: 20066
  Gene Name: zinc finger protein 606
  ENST ID: ENST00000550599
  CDS Start-End: 92-268
gtcgacgccggggaagcagccgccattgtccgcggctgaggttgggatttgctgtgttcctgggcaggtgcctggtcaatcagtcctcgggatggcagccatcaacccgtgggcctcctggggtgcccttacggaccaatcttgggggatgacagctgttgacccatgggcctcctggggaaccagtgaccttcaaggacgtggccgtggacttcacccaagaagagtgggggcagctggaccttgttcagaggaccctgtaccgtgatgtgatgctggagacctatggtcacctgctctctgtgggaaatcagattgccaagcctgaggtcatctccctgttggagcaaggagaagagccgtggtcagtggagcaggcatgtcctcaacgcacttgtccagaatgggtgagaaatcttgaaagcaaagcattgatcccagcacagagcatttttgaggaagaacaatcccatggcatgaagttggaaagatatatatgggatgatccttggttctccaggttagaagttttgggatgtaaagaccaattagaaatgtaccacatgaaccagagtacagctatgaggcagatggtcttcatgcaaaagcaagtactatcccagagaagctctgaattctgtggacttggggcagagtttagccagaacttaaactttgttccatctcagagagtttctcagatagaacatttctataagcctgatacacatgctcaaagttggagatgtgactcagccataatgtatgcagataaggttacctgtgaaaataatgattatgacaaaactgtttatcagtccattcaacctatttaccctgcaagaatacaaactggagataatcttttcaaatgtactgatgctgttaaatctttcaatcatataatacattttggtgatcataaaggaattcacacaggagaaaaactctatgaatataaggaatgccatcaaatctttaaccagagcccatcatttaatgaacacccaaggcttcatgttggagaaaaccagtataattacaaagaatatgagaatatcttttatttctcatcctttatggaacatcaaaaaattggtactgtagagaaagcgtataaatacaatgaatgggagaaagtctttgggtatgactctttccttactcaacatacaagcacttacactgcagagaaaccctatgactacaatgaatgtgggacgtctttcatctggagctcttaccttattcaacataagaaaactcatactggagaaaaaccctatgaatgtgataaatgtggaaaagtttttaggaatcgctcagcccttacgaaacatgaacggactcacactggaataaaaccctatgaatgtaataaatgtggaaaagccttcagctggaattctcatcttattgtacataagagaattcatacaggagaaaaaccttatgtttgtaatgagtgtgggaaatctttcaactggaactctcatcttattggacatcagaggactcatacaggagagaaaccttttgaatgtactgaatgtgggaaatcattcagctggagctcccatcttattgcccatatgagaatgcatactggagagaaaccctttaaatgtgatgaatgtgaaaaagcttttagggactactcagcccttagtaaacatgaaagaactcattctggagcaaaaccatataaatgtactgaatgtggaaaatccttcagctggagctcccatcttattgcccatcagagaactcacacgggagagaaaccatataactgtcaggaatgtggcaaagcattcagagaacgctcagccctcactaaacatgagataattcattctggaattaagccctatgaatgtaataaatgtggaaaatcctgtagccagatggctcaccttgttagacatcaaaggactcatactggagaaaaaccctatgaatgcaataaatgtggaaaatccttcagtcagagctgtcaccttgttgctcatcggagaattcacactggtgagaaaccctataaatgtaatcagtgtgaaagatcctttaactgtagttctcacctcattgcacaccggagaactcatactggagagaaaccatacaggtgtaatgaatgtgggaaagcatttaatgagagttcatcccttattgtacacctaagaaaccatactggagaaaagccctacaaatgtaatcattgtgaaaaagcattttgtaagaattcttcccttattattcatcagagaatgcatagtggagagaaacgctttatatgcagtgaatgtggaaaagcctttagtggtcactcagccctacttcaacaccagagaaatcacagtgaagagaaactgaattgaatttatgcgagtttttcgtttcttgtacatttgaca

SEQ ID NO: 203166 - DNA, 2009 bp, Homo sapiens
  Payload ID: 20066
  Gene Name: zinc finger protein 606
  ENST ID: ENST00000551380
  CDS Start-End: 484-2009
gcgctccggtcgacgccggggaagcagccgccattgtccgcggctgaggtgaggcctttgctcaggctgtggggccgccgtagctgcggggcttggggggtcaggagagccggctgggagaggcggcgtcagggtgggtcctgcgcctgccctttccgcgccggctttgcgccgtcgttgccgtcggttctccagccagcagcctgcctccggcctcccgcctccgggcgttcttcgttttctggtcggacgggcctgggtgaactctgctgcacgtcggctccgcgggcctttgtccccgaggccgcgccgggagctcccaagcgcactcctgggccggacctcggcgcgggacaaaagccaaacgccccaggcgggcagaccccgatcctgctgcgccgccttcaagggggaccgccggccgcgagccaggttgggatttgctgtgttcctgggcaggtgcctggtcaatcagtcctcgggatggcagccatcaacccgtgggcctcctggggtgcccttacggaccaatcttgggggatgacagctgttgacccatgggcctcctgggctctgtgtcctcagtatcctgcctggcacgtggagggaagcctggaggaggggaggagggccactgggctcccagcagcccaggttcaggaaccagtgaccttcaaggacgtggccgtggacttcacccaagaagagtgggggcagctggaccttgttcagaggaccctgtaccgtgatgtgatgctggagacctatggtcacctgctctctgtgggaaatcagattgccaagcctgaggtcatctccctgttggagcaaggagaagagccgtggtcagtggagcaggcatgtcctcaacgcacttgtccagaatgggtgagaaatcttgaaagcaaagcattgatcccagcacagagcatttttgaggaagaacaatcccatggcatgaagttggaaagatatatatgggatgatccttggttctccaggttagaagttttgggatgtaaagaccaattagaaatgtaccacatgaaccagagtacagctatgaggcagatggtcttcatgcaaaagcaagtactatcccagagaagctctgaattctgtggacttggggcagagtttagccagaacttaaactttgttccatctcagagagtttctcagatagaacatttctataagcctgatacacatgctcaaagttggagatgtgactcagccataatgtatgcagataaggttacctgtgaaaataatgattatgacaaaactgtttatcagtccattcaacctatttaccctgcaagaatacaaactggagataatcttttcaaatgtactgatgctgttaaatctttcaatcatataatacattttggtgatcataaaggaattcacacaggagaaaaactctatgaatataaggaatgccatcaaatctttaaccagagcccatcatttaatgaacacccaaggcttcatgttggagaaaaccagtataattacaaagaatatgagaatatcttttatttctcatcctttatggaacatcaaaaaattggtactgtagagaaagcgtataaatacaatgaatgggagaaagtctttgggtatgactctttccttactcaacatacaagcacttacactgcagagaaaccctatgactacaatgaatgtgggacgtctttcatctggagctcttaccttattcaacataagaaaactcatactggagaaaaaccctatgaatgtgataaatgtggaaaagtttttaggaatcgctcagcccttacgaaacatgaacggactcacactggaataaaaccctatgaatgtaataaatgtggaaaagccttcagctggaattctcatcttattgtacataagagaattcatacaggagaaaaaccttatgtttgtaatgagtgtgggaaatctttcaactggaactctcatcttattggacatcagaggactcatacaggaga

SEQ ID NO: 203167 - DNA, 651 bp, Homo sapiens
  Payload ID: 20066
  Gene Name: zinc finger protein 606
  ENST ID: ENST00000552184
  CDS Start-End: 452-651
attgtccgcggctgaggtgaggcctttgctcaggctgtggggccgccgtagctgcggggcttggggggtcaggagagccggctgggagaggcggcgtcagggtgggtcctgcgcctgccctttccgcgccggctttgcgccgtcgttgccgtcggttctccagccagcagcctgcctccggcctcccgcctccgggcgttcttcgttttctggtcggacgggcctgggtgaactctgctgcacgtcggctccgcgggcctttgtccccgaggccgcgccgggagctcccaagcgcactcctgggccggacctcggcgcgggacaaaagccaaacgccccaggcgggcagaccccgatcctgctgcgccgccttcaagggggaccgccggccgcgagccaggttgggatttgctgtgttcctgggcaggtgcctggtcaatcagtcctcgggatggcagccatcaacccgtgggcctcctggggtgcccttacggaccaatcttgggggatgacagctgttgacccatgggcctcctggggtgagtcaagagcctggtcagctgtgggctgccatattgtggcctctggctgtagtgctctgccacagctggggaatagaatggggaccaggtggggctttagggcaggtgg

SEQ ID NO: 203168 - DNA, 636 bp, Homo sapiens
  Payload ID: 20066
  Gene Name: zinc finger protein 606
  ENST ID: ENST00000546715
  CDS Start-End: 90-356
cgacgccggggaagcagccgccattgtccgcggctgaggttgggatttgctgtgttcctgggcaggtgcctggtcaatcagtcctcgggatggcagccatcaacccgtgggcctcctggggtgcccttacggaccaatcttgggggatgacagctgttgacccatgggcctcctggggtgagtcaagagcctggtcagctgtgggctgccatattgtggcctctggctgtagtgctctgccacagctggggaatagaatggggaccaggtggggctttagggcaggtggtccagatctgtctctgtgcagagctggaacaaggaggaatcagaaaactagtggccaggcgtggtgactcacgcctacagcactttgggaggccgaggcgagtggatcacgaggtcaggagatcgagaccatcctggctaacacggtgaaaccccgtctctactaaaacaaaatacaaaaaattagctgggcgtggtggtgggcgcctgtagtcccagctgctcgggaggctgaggcaggagaatggcgtgaagccaggaggcggagcgtgcagtgagccaagatcgtgccactgcactccagcctgggcgacagagcgagactcagtctcaaaaaaaaaaagaaaa

SEQ ID NO: 203169 - DNA, 1196 bp, Homo sapiens
  Payload ID: 20066
  Gene Name: zinc finger protein 606
  ENST ID: ENST00000547121
  CDS Start-End: 476-685
gtcgacgccggggaagcagccgccattgtccgcggctgaggtgaggcctttgctcaggctgtggggccgccgtagctgcggggcttggggggtcaggagagccggctgggagaggcggcgtcagggtgggtcctgcgcctgccctttccgcgccggctttgcgccgtcgttgccgtcggttctccagccagcagcctgcctccggcctcccgcctccgggcgttcttcgttttctggtcggacgggcctgggtgaactctgctgcacgtcggctccgcgggcctttgtccccgaggccgcgccgggagctcccaagcgcactcctgggccggacctcggcgcgggacaaaagccaaacgccccaggcgggcagaccccgatcctgctgcgccgccttcaagggggaccgccggccgcgagccaggttgggatttgctgtgttcctgggcaggtgcctggtcaatcagtcctcgggatggcagccatcaacccgtgggcctcctggggtgcccttacggaccaatcttgggggatgacagctgttgacccatgggcctcctgggctctgtgtcctcagtatcctgcctggcacgtggagggaagcctggaggaggggaggagggccactgggctcccagcagcccaggttcaggtgagatggggctgtcctgttcccagaggatgatgtccaggttatccctggtcatcccagttgatgcggctctccagtttacaacagttggagtttgggtagggaaggaagcaactggaagttaatccttcctgagagcaggtagggagaattaggccgtttttagtgattcggagccttagtgtcaaccagtctgtccacagtactgagctccaactctccctggcttgttgtggggcatgaagggcagcccttttggctggcagccccacttctctattgccaccttcactcatgtctttagcacccgatttaggctgatgctgtgcagtgcctgctgtgcctgctgtgaagggaacaaggacaggtgtgagccttcaccctgaggagctcccagacccttttccagggttattcactcagctaaggagatctcacggcctacctggagccacacgtgcagtgtgggacaggagaaacctgagacgggtagggtaggcctgcaggagcacagtcacctgatgagtcgggagatgggacagag

SEQ ID NO: 203170 - DNA, 4364 bp, Homo sapiens
  Payload ID: 20067
  Gene Name: zinc finger protein 607
  Uniprot ID: Q96SK3
  ENST ID: ENST00000355202
  CDS Start-End: 597-2687
gatctgcgcatgcgcactcgaggcaaggcggccactcccagaagtctccggggctcgagcggtgggtgggaggcgcggtccaagtggtcgctgccgtatttctcgtaggtttttaggattctggactccatttctcaccggtacctgcggtcctgactgttctggcttggactacatattacaaaggcaacggagaaaacttggacccctggctccggttccgggaccttttggttccacctgaagaaggcggcgcaggtcactgcgggagcctctgcagccccagcccgccgcccgcgtggtaccctgcgtggcggtgagagtggggctgcaggaggcgctcagagcgcggaggcccccaggcgggccgggcgagtctcccgcctcctcaggccctagggtgctggagctgcggaggaggggcccgtctctaggagacaggcggggagcgtgagagaccgcgcagcggcgacaggaccggcttgcctgtgtgacgtgggtgcagttgcgggactgtgaggggtcttggttcttttgactttgctcttctggtagagaaacgccaaggactgatcaactcttgccagtctcaaaccatgtcctatggatcaataacattcggggatgtggccatagacttctctcatcaggagtgggaatatctcagcctggttcagaagaccttgtaccaggaggtgatgatggagaactatgacaacttagtctcattggcaggacattccgtatctaagccagatttaatcaccttattggagcaaggaaaagagccatggatgattgtgagggaagaaacaagaggagagtgtacagatttggattcaagatgtgaaataatcagcgatgggaaaatgcagctttataggaaacactcatgtgttactctccatcagagaattcataatggacagaaaccatatgagtgtaagcaatgtcagaagtcctttagtcatcttacagaactcatggtacatcaaacaattcatactagtgaggaacctgatcaatgtgaaaagtttaggaaggcatttagccatcttacagaccttagaaagcatcagaaaattaatgctcgtgagaaaccttatgaatgtgaagaatgtgggaaggtcttcagttatcctgcaaaccttgctcaacatgggaaagttcatgttgagaaaccctatgaatgtaaagagtgtggggaagcttttaggactagccgtcaacttactgtacatcatagatttcattatggtgagaaaccctacgaatgtaaggaatgtggcaaggcctttagtgtgtatggacgacttagtcgacatcagagtattcacactggtgagaagccctttgaatgtaacaaatgtgggaagtcctttaggctcaaagcaggccttaaagtacatcagagtattcatactggagagaagccacatgaatgtaaggaatgtggaaaggcctttcgtcagttttcccaccttgtgggtcataaaagaattcatactggagaaaaaccctatgaatgcaaggaatgcgggaagggctttacatgtaggtatcaacttaccatgcatcagagaatttattcaggggagaaacactatgaatgtaaagaaaatggggaggcttttagtagtggccatcaacttactgcacctcatacatttgaaagtgttgagaaaccttataagtgtgaggaatgtgggaaagcctttagtgtgcatggacgacttactcgacatcagggtattcatagtggtaagaaaccctatgaatgtaacaaatgtgggaagtcctttaggctcaattcatcccttaaaatacatcaaaatattcataccggtgagaaaccctacaaatgtaaggaatgtgggaaggccttcagtcagcgtgcacaccttgcccatcataacagaattcatactggttacaaaccctttgaatgtaaagaatgtgggaagtcctttcgttgtgcctcatatcttgttatacatgagagaattcatacaggagagaaaccctatgtatgtcaagagtgtgggaagggttttagttatagccataaactcactatacatcgcagagttcatactggtgagaaaccttatgaatgtaaggaatgtgggaaggcctttagtgtatctggacaacttactcagcatctgagtattcacagtggtaagaaaccctttgaatgcaacaaatgcgggaagtcttttaggttcatttctgtacttaaagcccatcagaatattcatagcgctgagaaaccctacgaatgtaaggaatgtggcaaggcctttcgtcatgccacaagcctcatatatcatgaccgaactcatgctggtgaaaagtcctatgaatgtaaagaatgtggggaaacttttagtcatgcttcacatcttattattcatgagagaattcataccagtgataaaccctatgaatgtaaaagatgtgggaaggcatttcactgtgcctcatatcttgttagacatgaaagcgttcatgctgatggaaatccctatatgtgtgaagagtgtgggaaagcttttaatagtagccatgaacttagtatacatcatagagttcatactggtgagaaaccctttaaatgtaacaaatgcagaaggtcctttaggcttagatccatccttgaagtacatcagagaattcatatttgatagagaaattgtggcatatacaggtagtaaagaaagcacattgtgtcaatggatttatcccactgaacaatttgaatgaagacaatgtggaatggctttgagatacagttcagtttttattaggcatcaatttgtattggtgtgaacttttcaaaatgtaaatcatatatgcagtttctttggtatgacctgtgttaactcagattcagagaatttataatgtatttttttaataacataagaaaacttttctgatattcctctagttttggattgccaaaatattcacagtagaggaaaactgagaaaacgtaggaaaccattctttatacttgcatgtaaacatcttccagcaacaatcatttattgttaaacctggaaaaagccattacacaggaaacctctgttgatataagcgatgatgggaaaggctatttagccactctgcatatttaatgctcatgatcaacatctgcttcctatagctgggatgatatgggggaagatatttatcccttctggggatcatatataaatgatgatagtagtacctacagtatagtgctgttagaattacatgagttagatgtggaggtcagagtggaagcaggtgtgagagggtcccgcagaagaaaacatggctgccaaagtgtttgagtccatcggcaagtttggcctggccttagctgttgcaggaggcatggtgaactctgccttatgtaatgtggatgctgggcacagagctgccatctttgaccaattccgtggagtacagaacattgtggtaggggaagggactcactttctcatcccatgtgtacaaaaaccaattatctttgactgctgttctcaaccacgtagtgcgccagtcatcactggtagcaaagatttacagaatgtcaacatcacactgtgcatcctcttccggcccatcactagccagcttcctcgcatcttcaccagcattggagaggactacgatgagtgtgtgctgccgttcattaccacggagatcctcaagtcactggtggctcgctttgatgctggagaactaatcacccagagggagctggtctccagccaggtgagcaacaaccttatggagtgagcagccacctttgggctcattctggacgacgtgtctttgacacatctgaccttcttgaaggagttaacagacaggtggccccccaggaagcagagagcgccagatttgtggtggaaaaggcggccatcatctctgctgagggtgactccaaggcagctgagctgatcgccaactcactggccactgcaggggacggccagagcgagctgtgcaagctggaagctgcagaagacattgcataccagctctcatgctctcggaacatcacctgcctgccggcagggcagtccgtgctcctccagctgccctagtgaggccccagcctacctgcacctccgtgaggcaactgggccacagccccgatgattcgtaacaccacctttcgccctcaccccagaaatcactgaaatttcatgattggcttaaagtgaaggaagtaaaggtaaaatcacttcagatctctaaaaaacaaagaattacatgagttagtacatgaaaaaattatgggaaactacatgaaatatactgttacgttcaataaacattagcttctgtatataataatatca

SEQ ID NO: 203171 - DNA, 4003 bp, Homo sapiens
  Payload ID: 20067
  Gene Name: zinc finger protein 607
  Uniprot ID: Q96SK3
  ENST ID: ENST00000395835
  CDS Start-End: 249-2336
attgacccttggctccaggttccctgctgcttcctgtgccttcctcagcctagtacgactacaacagagaaatggtcccaatgggaaatcagatactgagtcttagatgaagatttccagtgagaagaaacagataggatgagaagcttagaagagtaattgcccttaagaaaggtcttggttcttttgactttgctcttctggtagagaaacgccaaggactgatcaactcttgccagtctcaaaccatgtcctatggatcaataacattcggggatgtggccatagacttctctcatcaggagtgggaatatctcagcctggttcagaagaccttgtaccaggaggtgatgatggagaactatgacaacttagtctcattgggacattccgtatctaagccagatttaatcaccttattggagcaaggaaaagagccatggatgattgtgagggaagaaacaagaggagagtgtacagatttggattcaagatgtgaaataatcagcgatgggaaaatgcagctttataggaaacactcatgtgttactctccatcagagaattcataatggacagaaaccatatgagtgtaagcaatgtcagaagtcctttagtcatcttacagaactcatggtacatcaaacaattcatactagtgaggaacctgatcaatgtgaaaagtttaggaaggcatttagccatcttacagaccttagaaagcatcagaaaattaatgctcgtgagaaaccttatgaatgtgaagaatgtgggaaggtcttcagttatcctgcaaaccttgctcaacatgggaaagttcatgttgagaaaccctatgaatgtaaagagtgtggggaagcttttaggactagccgtcaacttactgtacatcatagatttcattatggtgagaaaccctacgaatgtaaggaatgtggcaaggcctttagtgtgtatggacgacttagtcgacatcagagtattcacactggtgagaagccctttgaatgtaacaaatgtgggaagtcctttaggctcaaagcaggccttaaagtacatcagagtattcatactggagagaagccacatgaatgtaaggaatgtggaaaggcctttcgtcagttttcccaccttgtgggtcataaaagaattcatactggagaaaaaccctatgaatgcaaggaatgcgggaagggctttacatgtaggtatcaacttaccatgcatcagagaatttattcaggggagaaacactatgaatgtaaagaaaatggggaggcttttagtagtggccatcaacttactgcacctcatacatttgaaagtgttgagaaaccttataagtgtgaggaatgtgggaaagcctttagtgtgcatggacgacttactcgacatcagggtattcatagtggtaagaaaccctatgaatgtaacaaatgtgggaagtcctttaggctcaattcatcccttaaaatacatcaaaatattcataccggtgagaaaccctacaaatgtaaggaatgtgggaaggccttcagtcagcgtgcacaccttgcccatcataacagaattcatactggttacaaaccctttgaatgtaaagaatgtgggaagtcctttcgttgtgcctcatatcttgttatacatgagagaattcatacaggagagaaaccctatgtatgtcaagagtgtgggaagggttttagttatagccataaactcactatacatcgcagagttcatactggtgagaaaccttatgaatgtaaggaatgtgggaaggcctttagtgtatctggacaacttactcagcatctgagtattcacagtggtaagaaaccctttgaatgcaacaaatgcgggaagtcttttaggttcatttctgtacttaaagcccatcagaatattcatagcgctgagaaaccctacgaatgtaaggaatgtggcaaggcctttcgtcatgccacaagcctcatatatcatgaccgaactcatgctggtgaaaagtcctatgaatgtaaagaatgtggggaaacttttagtcatgcttcacatcttattattcatgagagaattcataccagtgataaaccctatgaatgtaaaagatgtgggaaggcatttcactgtgcctcatatcttgttagacatgaaagcgttcatgctgatggaaatccctatatgtgtgaagagtgtgggaaagcttttaatagtagccatgaacttagtatacatcatagagttcatactggtgagaaaccctttaaatgtaacaaatgcagaaggtcctttaggcttagatccatccttgaagtacatcagagaattcatatttgatagagaaattgtggcatatacaggtagtaaagaaagcacattgtgtcaatggatttatcccactgaacaatttgaatgaagacaatgtggaatggctttgagatacagttcagtttttattaggcatcaatttgtattggtgtgaacttttcaaaatgtaaatcatatatgcagtttctttggtatgacctgtgttaactcagattcagagaatttataatgtatttttttaataacataagaaaacttttctgatattcctctagttttggattgccaaaatattcacagtagaggaaaactgagaaaacgtaggaaaccattctttatacttgcatgtaaacatcttccagcaacaatcatttattgttaaacctggaaaaagccattacacaggaaacctctgttgatataagcgatgatgggaaaggctatttagccactctgcatatttaatgctcatgatcaacatctgcttcctatagctgggatgatatgggggaagatatttatcccttctggggatcatatataaatgatgatagtagtacctacagtatagtgctgttagaattacatgagttagatgtggaggtcagagtggaagcaggtgtgagagggtcccgcagaagaaaacatggctgccaaagtgtttgagtccatcggcaagtttggcctggccttagctgttgcaggaggcatggtgaactctgccttatgtaatgtggatgctgggcacagagctgccatctttgaccaattccgtggagtacagaacattgtggtaggggaagggactcactttctcatcccatgtgtacaaaaaccaattatctttgactgctgttctcaaccacgtagtgcgccagtcatcactggtagcaaagatttacagaatgtcaacatcacactgtgcatcctcttccggcccatcactagccagcttcctcgcatcttcaccagcattggagaggactacgatgagtgtgtgctgccgttcattaccacggagatcctcaagtcactggtggctcgctttgatgctggagaactaatcacccagagggagctggtctccagccaggtgagcaacaaccttatggagtgagcagccacctttgggctcattctggacgacgtgtctttgacacatctgaccttcttgaaggagttaacagacaggtggccccccaggaagcagagagcgccagatttgtggtggaaaaggcggccatcatctctgctgagggtgactccaaggcagctgagctgatcgccaactcactggccactgcaggggacggccagagcgagctgtgcaagctggaagctgcagaagacattgcataccagctctcatgctctcggaacatcacctgcctgccggcagggcagtccgtgctcctccagctgccctagtgaggccccagcctacctgcacctccgtgaggcaactgggccacagccccgatgattcgtaacaccacctttcgccctcaccccagaaatcactgaaatttcatgattggcttaaagtgaaggaagtaaaggtaaaatcacttcagatctctaaaaaacaaagaattacatgagttagtacatgaaaaaattatgggaaactacatgaaatatactgttacgttcaataaacattagcttctgtatat

SEQ ID NO: 203172 - DNA, 1190 bp, Homo sapiens
  Payload ID: 20067
  Gene Name: zinc finger protein 607
  ENST ID: ENST00000586559
  CDS Start-End: 186-494
acagagaaatggtcccaatgggaaatcagatactgagtcttagatgaagatttccagtgagaagaaacagataggatgagaagcttagaagagtaattgcccttaagaaaggtcttggttcttttgactttgctcttctggtagagaaacgccaaggactgatcaactcttgccagtctcaaaccatgtcctatggatcaataacattcggggatgtggccatagacttctctcatcaggagtgggaatatctcagcctggttcagaagaccttgtaccaggaggtgatgatggagaactatgacaacttagtctcattgggacattccgtatctaagccagatttaatcaccttattggagcaaggaaaagagccatggatgattgtgagggaagaaacaagaggagagtgtacagcagagctacagagtaaaaattgtggattccaactgagagacctgcaagacagtctccatttaagaaagaattgctagggaaacccaaagagaagacataaataaagactggaagaattgaagctgcaacacaaacacagctacagcacacaatgaacacggcctaactcctacgcagacgaacctcaaactttgcactgaagatttggattcaagatgtgaaataatcagcgatgggaaaatgcagctttataggaaacactcatgtgttactctccatcagagaattcataatggacagaaaccatatgagtgtaagcaatgtcagaagtcctttagtcatcttacagaactcatggtacatcaaacaattcatactagtgaggaacctgatcaatgtgaaaagtttaggaaggcatttagccatcttacagaccttagaaagcatcagaaaattaatgctcgtgagaaaccttatgaatgtgaagaatgtgggaaggtcttcagttatcctgcaaaccttgctcaacatgggaaagttcatgttgagaaaccctatgaatgtaaagagtgtggggaagcttttaggactagccgtcaacttactgtacatcatagatttcattatggtgagaaaccctacgaatgtaaggaatgtggcaaggcctttagtgtgtatggacgacttagtcgacatcagagtattcacactggtgagaagccctttgaatgtaacaaatgtgggaagtcctttaggctcaaagcaggccttaa

SEQ ID NO: 203173 - DNA, 549 bp, Homo sapiens
  Payload ID: 20067
  Gene Name: zinc finger protein 607
  ENST ID: ENST00000590670
  CDS Start-End: 212-549
ttgacccttggctccaggttccctgctgcttcctgtgccttcctcagcctagtacgactacaacagagaaatggtcccaatgggaaatcagatactgagtcttagatgaagatttccagtgagaagaaacagataggatgagaagcttagaagagtaattgcccttaagaaagatttggattcaagatgtgaaataatcagcgatgggaaaatgcagctttataggaaacactcatgtgttactctccatcagagaattcataatggacagaaaccatatgagtgtaagcaatgtcagaagtcctttagtcatcttacagaactcatggtacatcaaacaattcatactagtgaggaacctgatcaatgtgaaaagtttaggaaggcatttagccatcttacagaccttagaaagcatcagaaaattaatgctcgtgagaaaccttatgaatgtgaagaatgtgggaaggtcttcagttatcctgcaaaccttgctcaacatgggaaagttcatgttgagaaaccctatgaatgtaaagagtgtgggga

SEQ ID NO: 203174 - DNA, 741 bp, Homo sapiens
  Payload ID: 20067
  Gene Name: zinc finger protein 607
  ENST ID: ENST00000591664
  CDS Start-End: 530-741
gggaggcgcggtccaagtggtcgctgccgtatttctcgtaggtttttaggattctggactccatttctcaccggtacctgcggtcctgactgttctggcttggactacatattacaaaggcaacggagaaaacttggacccctggctccggttccgggaccttttggttccacctgaagaaggcggcgcaggtcactgcgggagcctctgcagccccagcccgccgcccgcgtggtaccctgcgtggcggtgagagtggggctgcaggaggcgctcagagcgcggaggcccccaggcgggccgggcgagtctcccgcctcctcaggccctagggtgctggagctgcggaggaggggcccgtctctaggagacaggcggggagcgtgagagaccgcgcagcggcgacaggaccggcttgcctgtgtgacgtgggtgcagttgcgggactgtgaggggtcttggttcttttgactttgctcttctggtagagaaacgccaaggactgatcaactcttgccagtctcaaaccatgtcctatggatcaataacattcggggatgtggccatagacttctctcatcaggagtgggaatatctcagcctggttcagaagaccttgtaccaggaggtgatgatggagaactatgacaacttagtctcattggatttggattcaagatgtgaaataatcagcgatgggaaaatgcagctttataggaaacactcatgtgttactctcca

SEQ ID NO: 203175 - DNA, 5958 bp, Homo sapiens
  Payload ID: 20068
  Gene Name: zinc finger protein 608
  Uniprot ID: Q9ULD9
  ENST ID: ENST00000306315
  CDS Start-End: 437-4975
aaaaggtgattatccttgtgttgttgataaagggattttctttttagctaccgtaagatgcttactgtcataggtttatttttcgggtttggttattttcctttaaacctgatattggactgtgaggacaatacatgagccaccttactctccatccttccctgtcccctttactgattccccaatactaatcgttttttattctggtaacacccagacaagaaatattcgacttttcccccccccttcacaggaaaaggtggacctggactgagggtgtaaaatccctggacacattcgtggggcaggaaaaagaagaggaagattagaagattttttttttctttgagagaaagcccagcggagataaacgaatgtcccctcatctccaaagaaaagttcatcggatttttattctagagagctcatcttcaggatgtcagtgaacatttctactgcaggaaaaggtgtggatccaaatacagttgatacttatgacagtggcgatgattgggaaatcggggttggaaatttaataattgatttggacgctgatttggagaaggacagacagaaatttgagatgaataattccaccaccaccactagtagcagcaactccaaggattgtggaggtccggcctccagtggggctggtgctaccgcagccttagctgatggcctaaaatttgcttctgttcaggcctctgctccccaggggaattcacacaaagagaccagcaaatcaaaagtgaaaaggagtaaaacttctaaggatgctaataaatctctgccttctgctgccttgtatgggattcccgagatcagcagcactggcaagaggcaggaagtccaagggcgccctggagaggcaactggcatgaattcagcgctgggtcaaagtgtgagcagcggcggcagcggcaacccaaacagcaatagtaccagcaccagcacctctgccgccaccgcgggggcaggctcctgtgggaaaagcaaagaggagaagccaggtaaaagccagagcagccgaggcgccaagcgggataaggatgcggggaaatccaggaaggacaagcacgacctgcttcagggccaccagaatggcagtggcagccaggccccttccggggggcacctctatggctttggggccaagagcaatggaggtggcgcgagccccttccactgcgggggcactgggagtggcagcgtcgccgctgcaggggaagttagcaaaagtgccccggattcagggctcatgggaaactctatgttggtaaagaaggaagaggaggaggaggagagccacaggcgaatcaagaaactgaaaactgagaaggttgaccccctgtttacagtgccagcgccaccaccgccgatttccagcagtctcacgcctcagattctaccctcctacttttccccatcttcatccaatattgcagcaccggttgaacagcttttggttcggactcgttctgtgggtgtcaatacatgtgaagttggagtagtgacagagccagagtgtcttgggccctgtgaacctgggaccagtgtgaatttggaagggatcgtgtggcatgaaacagaagaaggtgtcctagtggtcaatgtcacgtggaggaacaaaacgtacgtgggaaccctactggactgcaccaagcacgactgggcccctcccaggttttgtgagtcaccgacaagtgacctggagatgagagggggccggggcagagggaagagagcgaggtctgctgctgctgccccgggctccgaggccagcttcacagagtccagagggctgcagaataagaacagagggggggccaatgggaaagggaggcggggcagcctcaatgccagcggacgaaggacacccccaaattgtgctgctgaggatatcaaagccagcccttcctccaccaacaaaaggaaaaacaagcctccaatggagctggacctgaactccagctctgaggacaataagcctggaaagcgtgtccgcacaaattccagaagcactcccactacccctcaagggaaaccagagactacttttttggaccaaggctgctcttctccagtgttaatcgactgtccccacccaaactgcaacaaaaagtacaagcacattaacggcctgaggtaccaccaggctcatgcacacttagacccagaaaacaagctggagttcgagcctgacagtgaggacaagatctcggactgtgaggaaggattgagtaatgtggcacttgaatgcagtgagccaagcacaagtgtatctgcttatgaccagttgaaggcaccggcatcccctggtgctggaaacccacctgggaccccaaagggaaagagagagctgatgagcaatggcccaggttccattattggtgctaaagctgggaagaattctggcaaaaagaagggccttaacaatgaactgaacaaccttccagtaatctccaacatgacggctgcgttagacagttgctcggcagcagacggcagtttggctgctgagatgcctaaactggaagcagaaggattaattgacaagaaaaatttaggagataaagaaaagggcaaaaaagctaccaactgcaaaacggacaaaaacctctctaaactgaaaagtgcccggcccattgcccctgccccagcccccactcccccgcagctaatcgctatacccactgcaacctttacaacgaccaccactgggacaatacccggactgccctccctcacaacaactgttgttcaggctacaccaaagagtcctccgttaaaacccattcaaccaaagcccacaattatgggagagcccatcaccgtgaacccagctctggtgtcactcaaagacaaaaagaaaaaggagaagcgaaagctaaaggacaaagaagggaaagagacgggaagcccaaaaatggatgccaagctggggaaactagaggactccaagggggccagcaaagatttacctgggcattttttaaaggatcatctcaacaagaatgaagggctggcaaatggactgtcggagtctcaggagagccgcatggccagtatcaaagctgaggccgataaggtttacactttcacagacaacgctcccagcccttccatagggagcgcctcgaggctggaatgcagcactttggtgaacgggcaggcaccaatggcacctctgcatgtgttgacccagaatggggcagagagttcagctgcaaagacaagcagcccggcctattcagacatatctgatgctgctgacgatggtggttctgacagcaggtcggagggtatgagatcaaaggccagttccccatcagatattatttctagtaaggacagtgttgtaaaagggcattcttcaactacagcacaatcatctcaactgaaagagtcccattctccctattaccacagctatgatccttattattctccaagttacatgcaccctgggcaggtcggtgcccctgcagctggaaatagtgggagcacgcagggaatgaagatcaagaaggagtctgaggaagatgctgaaaagaaagacaaggcagagcagttagattctaagaaagtggaccacaattctgcatccttacagcctcagcaccagtcggtgatcacacaaagacatcctgccctggctcagtcactttattatggccagtatgcatatgggctctatatggaccagaagtctctgatggccaccagccctgcctatagacagcagtatgagaagtactatgaggaccagaggctggcagagcagaaaatggcccagactgggagaggagactgtgaaaggaaaagtgagctccccttgaaagagctgggcaaggaggaaactaaacagaaaaatatgccatcggccacaatctcaaaagctccctctactccggagcctaacaaaaaccattctaaactagggccatcagtgcctaataaaactgaggagacaggtaaatcgcagcttctctccaatcaccagcagcagcttcaggccgacagcttcaaagctaagcagatggaaaaccaccagcttattaaggaggctgtagaaatgaagtctgtcatggactctatgaagcagacaggtgtagacccaacctcgagatttaaacaagacccagattcaagaacatggcatcattatgtataccagcccaaatatctggatcagcaaaagtcagaagaacttgatagagagaagaaattaaaagaggatagtccgaggaaaactcctaataaagagagtggtgtgcccagccttcctgtatcgttaacaagcattaaagaggagcccaaagaggccaagcatcctgattctcaatcaatggaggagagcaagctgaaaaatgatgatcgaaagactcctgtgaactggaaggactctcggggaacaagagtggctgtctcctcacccatgagtcagcatcagtcatacatacagtacttgcatgcttatccttacccacagatgtacgaccccagccatcctgcataccgggctgtttctcccgtcctaatgcacagttatcctggggcatatctctctccaggatttcattatcctgtttatgggaagatgtcagggagagaagagacagagaaagtcaataccagccctagcgtcaacacgaaaacaaccactgaatctaaagcactggatttgctccagcagcatgctaaccaataccgcagcaagtctcctgctcctgtggaaaaggctacagctgagcgggaacgggaggcagaaagggaaagggatcgccactcccccttcggccagcggcacctgcacacgcaccaccacacccacgttggcatgggttacccgctaatcccgggtcaatatgacccttttcaaggcttgacctctgctgcccttgttgcctctcagcaggtggctgcccaggcatctgcatctggaatgtttcctggacaaagaagagaataacaagattggacatgtacattgtcatgtgactggatcacatggggaagcgctttatacagacatcagttccatggtgttaatttgaaatgccttaatggcaggcaaaaaccagtcatttcatttttgtaaattacagattttatcacagagtaacaaatgttgctgtaattaaacttctgttttatatatatatacgtatacatatctgtatatatacatatatatatatataaatataaatatattctttactttttgtatcagtaaccaggctcgcacacacagggtctgctgccacgtcgcaaaccactcagtaaaggaaattaaaaatgtatttgtcatgttaaaaagtgttagccacaaaaggctacttactttcttttccttttcctttaaaattgtaaataaataatgttatgtatcagtgtgcctgaaccttgcatatccttcacatatttcccataagcccctcagaaaggctaactgtgatgatgacactttggtacaatttagatgtctatttggtggctcctgttaaagacgcaccagtgtaaaatgttcctgtagtcactgtttgtacttgtgtattgtggaaaaagtacttttggaaggcatggggttgccagtaccacaaaaactgtgttgtatataatgtaaagattaaaatggggaaataatgagcatctgtgaataatgaggtgtcattttttgataatcttgaatggcaaataacccaatagcctgcgtaccagagacatctgtgattgttctattacttgaatagttctacagtctttttttttttttaatgtttacaattatccagttttagaagagagagactttaacgccattgcctggttacttgttttatgctgtaatctagtttattttatgtaaaatgtatattgaatgctttccttttttatacctgccttaaataatttggcaatcagaattaaaaagtttttttttttttaaat

SEQ ID NO: 203176 - DNA, 2737 bp, Homo sapiens
  Payload ID: 20068
  Gene Name: zinc finger protein 608
  ENST ID: ENST00000513986
  CDS Start-End: 617-2737
cgcctgtaggtttgctacatgggatcattactgatcacggtgactctgaagtctggaactgaaggcggaatgagaagttgggaaaacttttttctctaaactctctgttttttaaaaaactattattctcgatgcttgttaagaggaaaaaaaaacctttggtgcttctgttgtgaatgtgaaacattattttccagctgtacagtgacacattttttttaaggagaaaaggactgattcgtttgccaaaaggggggtggggaggtggaataatgttatcgagtgattattctggctgagatgtgttatttggtttcttccttcttgatcatttggtgtttaagtaaaatgaggcacaggcttgtttgccgagtggagtgggaaaggcattttgatttgctggcctaattaaaaaatgataaaggattaaaaggaaaaggtggacctggactgagggtgtaaaatccctggacacattcgtggggcaggaaaaagaagaggaagattagaagattttttttttctttgagagaaagcccagcggagataaacgaatgtcccctcatctccaaagaaaagttcatcggatttttattctagagagctcatcttcaggatgtcagtgaacatttctactgcaggaaaaggtgtggatccaaatacagttgatacttatgacagtggcgatgattgggaaatcggggttggaaatttaataattgatttggacgctgatttggagaaggacagacagaaatttgagatgaataattccaccaccaccactagtagcagcaactccaaggattgtggaggtccggcctccagtggggctggtgctaccgcagccttagctgatggcctaaaatttgcttctgttcaggcctctgctccccaggggaattcacacaaagagaccagcaaatcaaaagtgaaaaggagtaaaacttctaaggatgctaataaatctctgccttctgctgccttgtatgggattcccgagatcagcagcactggcaagaggcaggaagtccaagggcgccctggagaggcaactggcatgaattcagcgctgggtcaaagtgtgagcagcggcggcagcggcaacccaaacagcaatagtaccagcaccagcacctctgccgccaccgcgggggcaggctcctgtgggaaaagcaaagaggagaagccaggtaaaagccagagcagccgaggcgccaagcgggataaggatgcggggaaatccaggaaggacaagcacgacctgcttcagggccaccagaatggcagtggcagccaggccccttccggggggcacctctatggctttggggccaagagcaatggaggtggcgcgagccccttccactgcgggggcactgggagtggcagcgtcgccgctgcaggggaagttagcaaaagtgccccggattcagggctcatgggaaactctatgttggtaaagaaggaagaggaggaggaggagagccacaggcgaatcaagaaactgaaaactgagaaggttgaccccctgtttacagtgccagcgccaccaccgccgatttccagcagtctcacgcctcagattctaccctcctacttttccccatcttcatccaatattgcagcaccggttgaacagcttttggttcggactcgttctgtgggtgtcaatacatgtgaagttggagtagtgacagagccagagtgtcttgggccctgtgaacctgggaccagtgtgaatttggaagggatcgtgtggcatgaaacagaagaaggtgtcctagtggtcaatgtcacgtggaggaacaaaacgtacgtgggaaccctactggactgcaccaagcacgactgggcccctcccaggttttgtgagtcaccgacaagtgacctggagatgagagggggccggggcagagggaagagagcgaggtctgctgctgctgccccgggctccgaggccagcttcacagagtccagagggctgcagaataagaacagagggggggccaatgggaaagggaggcggggcagcctcaatgccagcggacgaaggacacccccaaattgtgctgctgaggatatcaaagccagcccttcctccaccaacaaaaggaaaaacaagcctccaatggagctggacctgaactccagctctgaggacaataagcctggaaagcgtgtccgcacaaattccagaagcactcccactacccctcaagggaaaccagagactacttttttggaccaaggctgctcttctccagtgttaatcgactgtccccacccaaactgcaacaaaaagtacaagcacattaacggcctgaggtaccaccaggctcatgcacacttagacccagaaaacaagctggagttcgagcctgacagtgaggacaagatctcggactgtgaggaaggattgagtaatgtggcacttgaatgcagtgagccaagcacaagtgtatctgcttatgaccagttgaaggcaccggcatcccctggtgctggaaacccacctgggaccccaaagggaaagagagagctgatgagcaatggcccaggttccattattggtgctaaagctgggaagaattctggcaaaaagaagggccttaacaatgaactgaacaaccttccagtaatctccaacatgacggctgcgttagacagttgctcggcagcagacggcagtttggctgctgagatgcctaaactggaagcagaaggattaattgac

SEQ ID NO: 203177 - DNA, 2605 bp, Homo sapiens
  Payload ID: 20068
  Gene Name: zinc finger protein 608
  ENST ID: ENST00000509799
  CDS Start-End: 459-2605
cactccccctgtgtgtgtgttgtgtttcagtcctgatttagtgttgcagaacaagcttgttgtgtgtgtgcaccagggggatttttgttttgctttttttaaattttaatttttgcttttataaaaaatacacaggacggtctgtgacatttgatggtccatcttctttaataataaatttgttgaagagattataatttccaaaataaagcggctgcaaccaaacacattcaatgcagttagaaggaaaaggtcaactcgatccaatacagaccgaaaaggtggacctggactgagggtgtaaaatccctggacacattcgtggggcaggaaaaagaagaggaagattagaagattttttttttctttgagagaaagcccagcggagataaacgaatgtcccctcatctccaaagaaaagttcatcggatttttattctagagagctcatcttcaggatgtcagtgaacatttctactgcaggaaaaggtgtggatccaaatacagttgatacttatgacagtggcgatgattgggaaatcggggttggaaatttaataattgatttggacgctgatttggagaaggacagacagaaatttgagatgaataattccaccaccaccactagtagcagcaactccaaggattgtggaggtccggcctccagtggggctggtgctaccgcagccttagctgatggcctaaaatttgcttctgttcaggcctctgctccccaggggaattcacacaaagagaccagcaaatcaaaagtgaaaaggagtaaaacttctaaggatgctaataaatctctgccttctgctgccttgtatgggattcccgagatcagcagcactggcaagaggcaggaagtccaagggcgccctggagaggcaactggcatgaattcagcgctgggtcaaagtgtgagcagcggcggcagcggcaacccaaacagcaatagtaccagcaccagcacctctgccgccaccgcgggggcaggctcctgtgggaaaagcaaagaggagaagccaggtaaaagccagagcagccgaggcgccaagcgggataaggatgcggggaaatccaggaaggacaagcacgacctgcttcagggccaccagaatggcagtggcagccaggccccttccggggggcacctctatggctttggggccaagagcaatggaggtggcgcgagccccttccactgcgggggcactgggagtggcagcgtcgccgctgcaggggaagttagcaaaagtgccccggattcagggctcatgggaaactctatgttggtaaagaaggaagaggaggaggaggagagccacaggcgaatcaagaaactgaaaactgagaaggttgaccccctgtttacagtgccagcgccaccaccgccgatttccagcagtctcacgcctcagattctaccctcctacttttccccatcttcatccaatattgcagcaccggttgaacagcttttggttcggactcgttctgtgggtgtcaatacatgtgaagttggagtagtgacagagccagagtgtcttgggccctgtgaacctgggaccagtgtgaatttggaagggatcgtgtggcatgaaacagaagaaggtgtcctagtggtcaatgtcacgtggaggaacaaaacgtacgtgggaaccctactggactgcaccaagcacgactgggcccctcccaggttttgtgagtcaccgacaagtgacctggagatgagagggggccggggcagagggaagagagcgaggtctgctgctgctgccccgggctccgaggccagcttcacagagtccagagggctgcagaataagaacagagggggggccaatgggaaagggaggcggggcagcctcaatgccagcggacgaaggacacccccaaattgtgctgctgaggatatcaaagccagcccttcctccaccaacaaaaggaaaaacaagcctccaatggagctggacctgaactccagctctgaggacaataagcctggaaagcgtgtccgcacaaattccagaagcactcccactacccctcaagggaaaccagagactacttttttggaccaaggctgctcttctccagtgttaatcgactgtccccacccaaactgcaacaaaaagtacaagcacattaacggcctgaggtaccaccaggctcatgcacacttagacccagaaaacaagctggagttcgagcctgacagtgaggacaagatctcggactgtgaggaaggattgagtaatgtggcacttgaatgcagtgagccaagcacaagtgtatctgcttatgaccagttgaaggcaccggcatcccctggtgctggaaacccacctgggaccccaaagggaaagagagagctgatgagcaatggcccaggttccattattggtgctaaagctgggaagaattctggcaaaaagaagggccttaacaatgaactgaacaaccttccagtaatctccaacatgacggctgcgttagacagttgctcggcagcagacggcagtttggctgctgagatgcctaaactggaagcagaaggattaattgacaagaaaaatttaggagataaagaaaa

SEQ ID NO: 203178 - DNA, 2686 bp, Homo sapiens
  Payload ID: 20068
  Gene Name: zinc finger protein 608
  ENST ID: ENST00000505686
  CDS Start-End: 93-1436
tttgagagaaagcccagcggagataaacgaatgtcccctcatctccaaagaaaagttcatcggatttttattctagagagctcatcttcaggatgtcagtgaacatttctactgcaggaaaaggtgtggatccaaatacagttgatacttatgacagtggcgatgattgggaaatcggggttggaaatttaataattgatttggacgctgatttggagaaggacagacagaaatttgagatgaataattccaccaccaccactagtagcagcaactccaaggattgtggaggtccggcctccagtggggctggtgctaccgcagccttagctgatggcctaaaatttgcttctgttcaggcctctgctccccaggggaattcacacaaagagaccagcaaatcaaaagtgaaaaggagtaaaacttctaaggatgctaataaatctctgccttctgctgccttgtatgggattcccgagatcagcagcactggcaagaggcaggaagtccaagggcgccctggagaggcaactggcatgaattcagcgctgggtcaaagtgtgagcagcggcggcagcggcaacccaaacagcaatagtaccagcaccagcacctctgccgccaccgcgggggcaggctcctgtgggaaaagcaaagaggagaagccaggtaaaagccagagcagccgaggcgccaagcgggataaggatgcggggaaatccaggaaggacaagcacgacctgcttcagggccaccagaatggcagtggcagccaggccccttccggggggcacctctatggctttggggccaagagcaatggaggtggcgcgagccccttccactgcgggggcactgggagtggcagcgtcgccgctgcaggggaagttagcaaaagtgccccggattcagggctcatgggaaactctatgttggtaaagaaggaagaggaggaggaggagagccacaggcgaatcaagaaactgaaaactgagaaggttgaccccctgtttacagtgccagcgccaccaccgccgatttccagcagtctcacgcctcagattctaccctcctacttttccccatcttcatccaatattgcagcaccggttgaacagcttttggttcggactcgttctgtgggtgtcaatacatgtgaagttggagtagtgacagagccagagtgtcttgggccctgtgaacctgggaccagtgtgaatttggaagggatcgtgtggcatgaaacagaagaaggtgtcctagtggtcaatgtcacgtggaggaacaaaacgtacgtgggaaccctactggactgcaccaagcacgactgggcccctcccaggacccagattcaagaacatggcatcattatgtataccagcccaaatatctggatcagcaaaagtcagaagaacttgatagagagaagaaattaaaagaggatagtccgaggaaaactcctaataaagagagtggtgtgcccagccttcctgtatcgttaacaagcattaaagaggagcccaaagaggccaagcatcctgattctcaatcaatggaggagagcaagctgaaaaatgatgatcgaaagactcctgtgaactggaaggactctcggggaacaagagtggctgtctcctcacccatgagtcagcatcagtcatacatacagtacttgcatgcttatccttacccacagatgtacgaccccagccatcctgcataccgggctgtttctcccgtcctaatgcacagttatcctggggcatatctctctccaggatttcattatcctgtttatgggaagatgtcagggagagaagagacagagaaagtcaataccagccctagcgtcaacacgaaaacaaccactgaatctaaagcactggatttgctccagcagcatgctaaccaataccgcagcaagtctcctgctgcttgacctctgctgcccttgttgcctctcagcaggtggctgcccaggcatctgcatctggaatgtttcctggacaaagaagataaagtcgcaaatggagacatttattttcataatgctaaagagaataacaagattggacatgtacattgtcatgtgactggatcacatggggaagcgctttatacagacatcagttccatggtgttaatttgaaatgccttaatggcaggcaaaaaccagtcatttcatttttgtaaattacagattttatcacagagtaacaaatgttgctgtaattaaacttctgttttatatatatatacgtatacatatctgtatatatacatatatatatatataaatataaatatattctttactttttgtatcagtaaccaggctcgcacacacagggtctgctgccacgtcgcaaaccactcagtaaaggaaattaaaaatgtatttgtcatgttaaaaagtgttagccacaaaaggctacttactttcttttccttttcctttaaaattgtaaataaataatgttatgtatcagtgtgcctgaaccttgcatatccttcacatatttcccataagcccctcagaaaggctaactgtgatgatgacactttggtacaatttagatgtctatttggtggctcctgttaaagacgcaccagtgtaaaatgttcctgtagtcactgtttgtacttgtgtattgtggaaaaagtacttttggaaggcatggggttg

SEQ ID NO: 203179 - DNA, 4726 bp, Homo sapiens
  Payload ID: 20068
  Gene Name: zinc finger protein 608
  Uniprot ID: Q9ULD9
  ENST ID: ENST00000504926
  CDS Start-End: 485-3742
gtgagcagcggcggcagcggcaacccaaacagcaatagtaccagcaccagcacctctgccgccaccgcgggggcaggctcctgtgggaaaagcaaagaggagaagccaggttgaccccctgtttacagtgccagcgccaccaccgccgatttccagcagtctcacgcctcagattctaccctcctacttttccccatcttcatccaatattgcagcaccggttgaacagcttttggttcggactcgttctgtgggtgtcaatacatgtgaagttggagtagtgacagagccagagtgtcttgggccctgtgaacctgggaccagtgtgaatttggaagggatcgtgtggcatgaaacagaagaaggtgtcctagtggtcaatgtcacgtggaggaacaaaacgtacgtgggaaccctactggactgcaccaagcacgactgggcccctcccaggttttgtgagtcaccgacaagtgacctggagatgagagggggccggggcagagggaagagagcgaggtctgctgctgctgccccgggctccgaggccagcttcacagagtccagagggctgcagaataagaacagagggggggccaatgggaaagggaggcggggcagcctcaatgccagcggacgaaggacacccccaaattgtgctgctgaggatatcaaagccagcccttcctccaccaacaaaaggaaaaacaagcctccaatggagctggacctgaactccagctctgaggacaataagcctggaaagcgtgtccgcacaaattccagaagcactcccactacccctcaagggaaaccagagactacttttttggaccaaggctgctcttctccagtgttaatcgactgtccccacccaaactgcaacaaaaagtacaagcacattaacggcctgaggtaccaccaggctcatgcacacttagacccagaaaacaagctggagttcgagcctgacagtgaggacaagatctcggactgtgaggaaggattgagtaatgtggcacttgaatgcagtgagccaagcacaagtgtatctgcttatgaccagttgaaggcaccggcatcccctggtgctggaaacccacctgggaccccaaagggaaagagagagctgatgagcaatggcccaggttccattattggtgctaaagctgggaagaattctggcaaaaagaagggccttaacaatgaactgaacaaccttccagtaatctccaacatgacggctgcgttagacagttgctcggcagcagacggcagtttggctgctgagatgcctaaactggaagcagaaggattaattgacaagaaaaatttaggagataaagaaaagggcaaaaaagctaccaactgcaaaacggacaaaaacctctctaaactgaaaagtgcccggcccattgcccctgccccagcccccactcccccgcagctaatcgctatacccactgcaacctttacaacgaccaccactgggacaatacccggactgccctccctcacaacaactgttgttcaggctacaccaaagagtcctccgttaaaacccattcaaccaaagcccacaattatgggagagcccatcaccgtgaacccagctctggtgtcactcaaagacaaaaagaaaaaggagaagcgaaagctaaaggacaaagaagggaaagagacgggaagcccaaaaatggatgccaagctggggaaactagaggactccaagggggccagcaaagatttacctgggcattttttaaaggatcatctcaacaagaatgaagggctggcaaatggactgtcggagtctcaggagagccgcatggccagtatcaaagctgaggccgataaggtttacactttcacagacaacgctcccagcccttccatagggagcgcctcgaggctggaatgcagcactttggtgaacgggcaggcaccaatggcacctctgcatgtgttgacccagaatggggcagagagttcagctgcaaagacaagcagcccggcctattcagacatatctgatgctgctgacgatggtggttctgacagcaggtcggagggtatgagatcaaaggccagttccccatcagatattatttctagtaaggacagtgttgtaaaagggcattcttcaactacagcacaatcatctcaactgaaagagtcccattctccctattaccacagctatgatccttattattctccaagttacatgcaccctgggcaggtcggtgcccctgcagctggaaatagtgggagcacgcagggaatgaagatcaagaaggagtctgaggaagatgctgaaaagaaagacaaggcagagcagttagattctaagaaagtggaccacaattctgcatccttacagcctcagcaccagtcggtgatcacacaaagacatcctgccctggctcagtcactttattatggccagtatgcatatgggctctatatggaccagaagtctctgatggccaccagccctgcctatagacagcagtatgagaagtactatgaggaccagaggctggcagagcagaaaatggcccagactgggagaggagactgtgaaaggaaaagtgagctccccttgaaagagctgggcaaggaggaaactaaacagaaaaatatgccatcggccacaatctcaaaagctccctctactccggagcctaacaaaaaccattctaaactagggccatcagtgcctaataaaactgaggagacaggtaaatcgcagcttctctccaatcaccagcagcagcttcaggccgacagcttcaaagctaagcagatggaaaaccaccagcttattaaggaggctgtagaaatgaagtctgtcatggactctatgaagcagacaggtgtagacccaacctcgagatttaaacaagacccagattcaagaacatggcatcattatgtataccagcccaaatatctggatcagcaaaagtcagaagaacttgatagagagaagaaattaaaagaggatagtccgaggaaaactcctaataaagagagtggtgtgcccagccttcctgtatcgttaacaagcattaaagaggagcccaaagaggccaagcatcctgattctcaatcaatggaggagagcaagctgaaaaatgatgatcgaaagactcctgtgaactggaaggactctcggggaacaagagtggctgtctcctcacccatgagtcagcatcagtcatacatacagtacttgcatgcttatccttacccacagatgtacgaccccagccatcctgcataccgggctgtttctcccgtcctaatgcacagttatcctggggcatatctctctccaggatttcattatcctgtttatgggaagatgtcagggagagaagagacagagaaagtcaataccagccctagcgtcaacacgaaaacaaccactgaatctaaagcactggatttgctccagcagcatgctaaccaataccgcagcaagtctcctgctcctgtggaaaaggctacagctgagcgggaacgggaggcagaaagggaaagggatcgccactcccccttcggccagcggcacctgcacacgcaccaccacacccacgttggcatgggttacccgctaatcccgggtcaatatgacccttttcaaggcttgacctctgctgcccttgttgcctctcagcaggtggctgcccaggcatctgcatctggaatgtttcctggacaaagaagagaataacaagattggacatgtacattgtcatgtgactggatcacatggggaagcgctttatacagacatcagttccatggtgttaatttgaaatgccttaatggcaggcaaaaaccagtcatttcatttttgtaaattacagattttatcacagagtaacaaatgttgctgtaattaaacttctgttttatatatatatacgtatacatatctgtatatatacatatatatatatataaatataaatatattctttactttttgtatcagtaaccaggctcgcacacacagggtctgctgccacgtcgcaaaccactcagtaaaggaaattaaaaatgtatttgtcatgttaaaaagtgttagccacaaaaggctacttactttcttttccttttcctttaaaattgtaaataaataatgttatgtatcagtgtgcctgaaccttgcatatccttcacatatttcccataagcccctcagaaaggctaactgtgatgatgacactttggtacaatttagatgtctatttggtggctcctgttaaagacgcaccagtgtaaaatgttcctgtagtcactgtttgtacttgtgtattgtggaaaaagtacttttggaaggcatggggttgccagtaccacaaaaactgtgttgtatataatgtaaagattaaaatggggaaataatgagcatctgtgaataatgaggtgtcattttttgataatcttgaatggcaaataacccaatagcctgcgtaccagagacatctgtgattgttctattacttgaatagttctacagtctttttttttttttaatgtttacaattatccagttttagaagagagagactttaacgccattgcctggttacttgttttatgctgtaatctagtttattttatgtaaaatgtatattgaatgctttccttttttatacctgccttaaataatttggcaatcagaattaaaaagtttttttttttttaaata

SEQ ID NO: 203180 - DNA, 3190 bp, Homo sapiens
  Payload ID: 20068
  Gene Name: zinc finger protein 608
  ENST ID: ENST00000613878
  CDS Start-End: 124-1467
agaagaggaagattagaagattttttttttctttgagagaaagcccagcggagataaacgaatgtcccctcatctccaaagaaaagttcatcggatttttattctagagagctcatcttcaggatgtcagtgaacatttctactgcaggaaaaggtgtggatccaaatacagttgatacttatgacagtggcgatgattgggaaatcggggttggaaatttaataattgatttggacgctgatttggagaaggacagacagaaatttgagatgaataattccaccaccaccactagtagcagcaactccaaggattgtggaggtccggcctccagtggggctggtgctaccgcagccttagctgatggcctaaaatttgcttctgttcaggcctctgctccccaggggaattcacacaaagagaccagcaaatcaaaagtgaaaaggagtaaaacttctaaggatgctaataaatctctgccttctgctgccttgtatgggattcccgagatcagcagcactggcaagaggcaggaagtccaagggcgccctggagaggcaactggcatgaattcagcgctgggtcaaagtgtgagcagcggcggcagcggcaacccaaacagcaatagtaccagcaccagcacctctgccgccaccgcgggggcaggctcctgtgggaaaagcaaagaggagaagccaggtaaaagccagagcagccgaggcgccaagcgggataaggatgcggggaaatccaggaaggacaagcacgacctgcttcagggccaccagaatggcagtggcagccaggccccttccggggggcacctctatggctttggggccaagagcaatggaggtggcgcgagccccttccactgcgggggcactgggagtggcagcgtcgccgctgcaggggaagttagcaaaagtgccccggattcagggctcatgggaaactctatgttggtaaagaaggaagaggaggaggaggagagccacaggcgaatcaagaaactgaaaactgagaaggttgaccccctgtttacagtgccagcgccaccaccgccgatttccagcagtctcacgcctcagattctaccctcctacttttccccatcttcatccaatattgcagcaccggttgaacagcttttggttcggactcgttctgtgggtgtcaatacatgtgaagttggagtagtgacagagccagagtgtcttgggccctgtgaacctgggaccagtgtgaatttggaagggatcgtgtggcatgaaacagaagaaggtgtcctagtggtcaatgtcacgtggaggaacaaaacgtacgtgggaaccctactggactgcaccaagcacgactgggcccctcccaggacccagattcaagaacatggcatcattatgtataccagcccaaatatctggatcagcaaaagtcagaagaacttgatagagagaagaaattaaaagaggatagtccgaggaaaactcctaataaagagagtggtgtgcccagccttcctgtatcgttaacaagcattaaagaggagcccaaagaggccaagcatcctgattctcaatcaatggaggagagcaagctgaaaaatgatgatcgaaagactcctgtgaactggaaggactctcggggaacaagagtggctgtctcctcacccatgagtcagcatcagtcatacatacagtacttgcatgcttatccttacccacagatgtacgaccccagccatcctgcataccgggctgtttctcccgtcctaatgcacagttatcctggggcatatctctctccaggatttcattatcctgtttatgggaagatgtcagggagagaagagacagagaaagtcaataccagccctagcgtcaacacgaaaacaaccactgaatctaaagcactggatttgctccagcagcatgctaaccaataccgcagcaagtctcctgctcctgtggaaaaggctacagctgagcgggaacgggaggcagaaagggaaagggatcgccactcccccttcggccagcggcacctgcacacgcaccaccacacccacgttggcatgggttacccgctaatcccgggtcaatatgacccttttcaaggcttgacctctgctgcccttgttgcctctcagcaggtggctgcccaggcatctgcatctggaatgtttcctggacaaagaagagaataacaagattggacatgtacattgtcatgtgactggatcacatggggaagcgctttatacagacatcagttccatggtgttaatttgaaatgccttaatggcaggcaaaaaccagtcatttcatttttgtaaattacagattttatcacagagtaacaaatgttgctgtaattaaacttctgttttatatatatatacgtatacatatctgtatatatacatatatatatatataaatataaatatattctttactttttgtatcagtaaccaggctcgcacacacagggtctgctgccacgtcgcaaaccactcagtaaaggaaattaaaaatgtatttgtcatgttaaaaagtgttagccacaaaaggctacttactttcttttccttttcctttaaaattgtaaataaataatgttatgtatcagtgtgcctgaaccttgcatatccttcacatatttcccataagcccctcagaaaggctaactgtgatgatgacactttggtacaatttagatgtctatttggtggctcctgttaaagacgcaccagtgtaaaatgttcctgtagtcactgtttgtacttgtgtattgtggaaaaagtacttttggaaggcatggggttgccagtaccacaaaaactgtgttgtatataatgtaaagattaaaatggggaaataatgagcatctgtgaataatgaggtgtcattttttgataatcttgaatggcaaataacccaatagcctgcgtaccagagacatctgtgattgttctattacttgaatagttctacagtctttttttttttttaatgtttacaattatccagttttagaagagagagactttaacgccattgcctggttacttgttttatgctgtaatctagtttattttatgtaaaatgtatattgaatgctttccttttttatacctgccttaaataatttggcaatcagaattaaaaagtttttttttttttaaat

SEQ ID NO: 203181 - DNA, 8746 bp, Homo sapiens
  Payload ID: 20069
  Gene Name: zinc finger protein 609
  Uniprot ID: O15014
  ENST ID: ENST00000326648
  CDS Start-End: 129-4364
gcaatgatgttgtccactgggcatgtactgaccaatgtggcaggtctgagaacatagctgaagctgaaaataggaaagctgggggcaaggaagagccttgaatcttgaggtgggacgttgactctaagatgtccttgagcagtggagcctccggagggaaaggagtggatgcaaacccggttgagacatacgacagtggggatgaatgggacattggagtagggaatctcatcattgacctggacgccgatctggaaaaggaccagcagaaactggaaatgtcaggctcaaaggaggtggggataccggctcccaatgctgtggccacactaccagacaacatcaagtttgtgaccccagtgccaggtcctcaagggaaggaaggcaaatcaaaatccaaaaggagtaagagtggcaaagacactagcaaacccactccagggacttccctgttcactccaagtgagggggcagctagcaagaaagaggtgcaggggcgctcaggagatggtgccaatgctggaggcctggttgctgctattgctcccaagggctcagagaaggcggctaaggcatcccgcagtgtagccggttccaaaaaggagaaggagaacagctcatctaagagcaagaaggagagaagcgaaggagtggggacttgttcagaaaaggatcctggggtcctccagccagttcccttgggaggacggggtggtcagtatgatggaagtgcaggggtggatacaggagctgtggagccacttgggagtatagctattgagcctggggcagcgctcaatcctttgggaactaaaccggagccagaggaaggggagaatgagtgtcgcctgctaaagaaagtcaagtctgaaaagatggagtcccctgtttccacaccagcagtgctgccaatacaccttttggtgccagtggtcaacaatgacatctcatctccctgtgagcagatcatggttcgtacccgatcagttggggtcaacacatgtgatgtggctctggccacagagcctgagtgcttgggcccctgtgaacctggaactagcgtcaaccttgaaggcatcgtgtggcaggaaacagaagatgggatgttggtggtaaatgtaacgtggaggaacaagacatatgtaggtacactccttgactgcacacgacatgattgggcacccccaaggttctgtgactccccgaccagtgacctggaaatgcgcaatggccggggtagaggcaaacgcatgcgtcccaacagtaatacacctgtcaatgagacagccacagcctctgacagcaaagggaccagtaacagcagcaaaacccgggcaggagccaatagcaaaggccgtcggggcagccagaattcttcagagcaccgcccacctgccagcagcacttctgaggatgtcaaggccagcccttcctcagctaataagcggaaaaacaaacccctttcagacatggagctgaattctagctcagaggactccaaagggagcaagcgtgtccgtactaattccatgggctcagccactggcccccttcctgggacaaaggtagaacccactgttctggacagaaactgcccctcccccgtcctaattgactgtccccacccaaactgcaacaagaagtacaagcacatcaatggacttaagtaccaccaagctcatgcccatacagatgatgacagcaagccggaagcggatggggacagtgagtacggagaggaacctattctccatgcagatcttgggagctgcaacggtgcatctgtctcacaaaaaggttccttgtcccctgcccgctcagctacccccaaagttcgacttgtagagccccatagcccttctccttcaagcaaattcagcacaaaaggcctctgtaagaaaaagttgagtggggaaggggacacagaccttggggccttatccaatgatggctctgatgatggaccctcagtgatggatgaaacaagcaatgatgcctttgattctttagaaaggaagtgtatggaaaaagaaaaatgtaaaaaaccctctagtttaaaacctgaaaagattccttccaagagcctaaagtcagcccgtcccattgcccctgccatccccccacagcaaatctacaccttccagacagccaccttcacagcagcgagcccaggctcttcctcaggcttgaccgccacagtggcacaagccatgcccaacagtccccaactcaagcccattcagcccaagcccactgttatgggagaacctttcacagtcaaccctgccttgactccagccaaggacaagaaaaagaaagacaaaaaaaagaaggaatcttcaaaggaacttgaaagtcctctgacccctgggaaggtgtgtcgagcagaggaaggcaaaagcccattcagggaatcttcaggagatgggatgaaaatggaggggctcctaaatggctcatcagacccccaccaaagccgactggctagcatcaaggctgaagccgacaagatctacagtttcacggacaatgcccccagcccttccattggaggcagtagccgccttgaaaacactacccctactcagcccctgactcccttacatgtggtgacccagaatggagctgaagccagctcagtcaaaaccaacagccctgcatactctgacatctctgatgctggggaggatggggagggcaaggtagacagtgtcaaatcaaaggacgccgaacagttggttaaagaaggggctaagaaaactctttttccccctcagcctcagagcaaagactcaccatattaccaaggctttgagagttactattctccaagttatgcacagtccagccctggggctctgaaccccagcagccaggcaggagtggagagccaggccctgaagacaaaaagggatgaggaacctgagagcatagaagggaaagtgaagaacgatatctgtgaagaaaagaagcccgagctgagcagttccagtcagcagccctcggtcatccagcagcgtcccaatatgtacatgcagtccctgtactacaaccagtatgcctatgtacccccctatggctacagcgaccagagttaccacacccaccttctgagcactaacacggcttaccggcagcagtacgaagaacagcagaaacgccagagcttagagcagcagcagcggggagtggacaagaaggcagagatgggcctgaaggagcgggaggcagcactcaaggaagagtggaagcaaaagccgtcaattccaccaactctcaccaaggcccccagcctgacagacctggtgaaatcaggacctggcaaggccaaggagccaggggctgacccagccaaatcagtcatcattcccaagttagatgactcttcaaaactcccgggccaggcccctgaaggccttaaagtgaagctgagtgatgccagccacctaagcaaggaggcctctgaggccaagacaggtgctgagtgtggtcgacaggcagagatggatccaatactctggtaccgacaggaggcagagccccggatgtggacatatgtttatcctgccaagtactcagacatcaagtcagaggatgagcggtggaaggaggagcgggaccgcaaattgaaggaggaaaggagtcggagtaaggactctgtccccaaggaagatgggaaggaaagcacaagtagtgactgcaagctgcccacgtcagaggagtctcgccttgggagcaaggagccccggccaagtgtccatgtgcctgtgtcctccccacttacccagcaccagtcctacatcccctacatgcacggctattcctacagtcagtcctacgaccccaaccaccccagctaccggagcatgcctgctgtgatgatgcagaactacccaggttcctacctgccttccagctactctttttccccatatggcagcaaggtctcaggtggtgaagatgctgacaaggcacgagccagccccagtgtgacttgtaaatccagctcagagtccaaagccctggacatcttgcagcagcatgccagtcactacaagagcaagtctcccacgataagtgataaaacttctcaggagagagatcgaggaggctgtggggtggttgggggtggtggcagctgtagcagcgtcgggggagcaagtgggggtgaacggagtgttgaccggccccgcacctctccttcccagcgcctgatgtccacacaccaccaccaccaccacttggggtactcattgctcccagcacagtacaacttaccctatgcagcagggctttcttctacagccattgttgccagccaacaaggctcaactccctcactctacccaccccccaggaggtgagaatgacaccaagtgcccggataaagtcagcttcacgggcccggactggcttacccaaggaggtgctgaaggtgccgtttagacatcagttaaatggtgttgatcatcctgtttgccgtttccaccatgactgaaggcagacccttggctatctcacctccaccagacctccggactacctgaccctacctcttcctcaggagctggagagctggtacttagcaaaaatatttattctctcagccacagttatgactattgtggcctctgtggagatgaaggcacgggaagcaaccaggggaacatggcctcagcccagagaagccactgctctgttccccaagcccttggtctgctgctggagcagtaccagcccccccgcccaccagggagggacccccacccccaagcactgggtaaggtctgaagacagcacagcagccatacccctcaccatcattaccaccatcaccagattctgcatctccctagtgctttgcaccctgggaattggcagcatgtggaggaactagaatctcaggaaagaaattgggggttgttttctacataattgtgaaaacaaggtcttcaaatgtggagacttctccccatttacatgagcacatataaacgctcacaacctagcctggaaaggaagaccaaggcatctgccccaacatggccttgagctgcctgtgaggcagggggcaggggttccaacaccagcacagggctccccagggacactgggagcaagctggtgctggagcatgaatgacgtctgtgaagtagaacctgcgtccccactaagtcctgctgcttcttattccccaactccttgcccttttcccttccctcctaaccccttggtgcctttcccagggggatccccacactggtcttgcctcttcttttccactgcttggctcttaagcctcaggcagataaactagtattccccccagcttggggaaccttggagtctgccaggtcaccttagggcaaggcccagaaggcagcccctgggagcacccagcagttcttggagatgtcctgtcatctagccatctgatatcttcctcatttgaggccacagatatatacagcccaattcctctgtctacaagtacatgattttatatagctcagtctataacctccatgtgggccaatataagctgtgtttcttggtaacacatattttgtttgaggggccactggccatgggaggttatttgttccttagaccctggaataacacatccaagccattacttattagagtctcagaatgtactcagtggagctgtgctttgaggcagccaacatttctctgctctccttagaaatgcagtctcccaatggaagctttatactctttgtactgggaaagtgaggatgatttggtagctttattggggtcatgtcttccccaaggtgtggggagcttagcttacttggcttttgaggtatcatccctctgttctcccctcctatctttccatgaccctctggattgagagagagagataaagactgacagacaccagtgtaggctggaaaagggagtgtgtgaccagagtgccaaaagtgactaggagcaggaacttggctccgactcagtttggaaaatgggaaataggggacagtaagcacaatgcccagtagtagttgatttccaaggaccctggaaccctacacttgagaggcttagggtcaccatctgctcaagaggatcccctctgatctacaggccttttccctaggtttctgcctcctcgtttttgttcaagttgggttctgagtcctccccaaaaaccattgttttagacctcttggcagggccccaaaacagcctccctcatacccatcattccctctgccttctgctgccctcatgggcagtgctctgagcagtgacctccctttcctccgtggaagtagctagtgcagacaccgtcatcccaccccacctgagtcaccccaaccaagagggtgactgaatttcagcctgattatgccctcctggggctcctgtgaggtggagccaaggttccctctctgttcctgtttgtttttaaatattgttgtgtgttttgtatctgtggcactggcctgcagcatactctgtatatattgtaaagaaaccgttaggagtaattttcttttgcattgggcaggcatggccctgcattcctgccctttccactcattctgtaacacagaggacgaacttctgtattagctgggcagccttgggttctccagaagagaacaggtttttcttttcctttttaatttttcttcttaaacatttggctctttgatcctcatatccaagtctcccctgaagagtaggagctgctcagaagagcaggtgaaagccaccatggcagatcctgatgcctgccgggcctagtcttccctctgaaataacatgaagcagcagctgtggagattcttgacaagtgctgagtgaaagatttgctgcccacctctacatggggaggagaaacacaggtgggagctacctgtggcatccatgacctagtcagagggatgagatgctcagcaggggtccccatcctatcccaccccacaaacaaaggctggaaaaatttgctaccaagggccaagaccaccagaccaagcctgtttatgagccacccctgcccaggccctcacagacattgctcacggggcttcccatagaggagaagctaaagagggagggggcctcatccccagatagatcaggcaaggcttggagagctgctctttaggatccacatcaactacttcctcattttaaggtatggcagttcccttcatccccttttcctgccttgtacatgtacatgtatgaaatttccttctcttaccgaactctctccacacatcacaaggtcaaagaaccacacgcttagaagggtaagagggcaccctatgaaatgaaatggtgatttcttgagtctcttttttccacgtttaaggggccatggcaggacttagagttgcgagttaagactgcagagggctagagaattatttcatacaggctttgaggccacccatgtcacttatcccgtataccctctcaccatccccttgtctactctgatgcccccaagatgcaactgggcagctagttggccccataattctgggcctttgttgtttgttttaattacttgggcatcccaggaagctttccagtgatctcctaccatgggcccccctcctgggatcaagcccctcccaggccctgtccccagcccctcctgccccagcccacccgcttgccttggtgctcagccctcccattgggagcaggttggggcgagctggaggcccgggctggaggggcagtgttgctgttcatagattttgttccattggcgttgctctgttgaatttaatttcagtcttcctgattcttcccttctgtaaagtgtacattaccaagttccttgtttttttatatatatatataaatatatatatatacaaactgtactctttttgcctttgtacattcaggcaagaagagaaaataaatctttttaagagacaatcacaaatctgtgagggctgctggttatttctcctggagtttgctgctgagctgcctcttccttcctcccaattttcctgttctccctcagctctcctgatcttcctggccctgctccatatgcatcctcagcttcactttccctggctgatggcaagctgttgaatccagtgtccagactacctgccttgtaacccttttctgcccagcattgttttctggcttggccactggcttagcccaggagctttactctgtgccctggcctcccctctcttcacctttagatttccattcaccgaagtggctttggacccctgggtactctgggacctgtttcctggaggccctggcttgggacactcacctgtgaaactatgcagctgggagctctctgcctaagagtttgcactatttaaacctgcctgggagttaggacggatggttttaggaatgaccggaaaactacccctaaaactcccccgacattccagcctctagaatgctctgatccagagctcagtggatgattcccagctggtggactcctgtggctaccccatcagaacaagggctaagggtttatgggtcaagagtatttgatcagaattttaaagggtggtatactctgaaacacagcccaaccaaaccattgtttggccgctttctcttttcctctaccttcctcatccccacttttttccctttctctctacttcctcttcttaattggctttggaattgaaatatatttttaaattatttgttgtatttattgaataaagtttttaatgtccctgttcttaaa

SEQ ID NO: 203182 - DNA, 3863 bp, Homo sapiens
  Payload ID: 20069
  Gene Name: zinc finger protein 609
  ENST ID: ENST00000416172
  CDS Start-End: 225-1220
cgggaacggatggcggcctgggccccgtagcagcggcggctctacggcccggggccccgggcgggcggaggtggcggctcccgggaccggccgcgcgcaatgatgttgtccactgggcatgtactgaccaatgtggcaggtctgagaacatagctgaagctgaaaataggaaagctgggggcaaggaagagccttgaatcttgaggtgggacgttgactctaagatgtccttgagcagtggagcctccggagggaaaggagtggatgcaaacccggttgagacatacgacagtggggatgaatgggacattggagtagggaatctcatcattgacctggacgccgatctggaaaaggaccagcagaaactggaaatgtcaggctcaaaggaggtggggataccggctcccaatgctgtggccacactaccagacaacatcaagtttgtgaccccagtgccaggtcctcaagggaaggaaggcaaatcaaaatccaaaaggagtaagagtggcaaagacactagcaaacccactccagggacttccctgttcactccaagtgagggggcagctagcaagaaagaggtgcaggggcgctcaggagatggtgccaatgctggaggcctggttgctgctattgctcccaagggctcagagaaggcggctaaggcatcccgcagtgtagccggttccaaaaaggagaaggagaacagctcatctaagagcaagaaggagagaagcgaaggagtggggacttgttcagaaaaggatcctggggtcctccagccagttcccttgggaggacggggtggtcagtatgatggaagtgcaggggtggatacaggagctgtggagccacttgggagtatagctattgagcctggggcagcgctcaatcctttgggaactaaaccggagccagaggaaggggagaatgagtgtcgcctgctaaagaaagtcaagtctgaaaaggtaagaggtggccagatatggctgcccactgactgccagtcagaactgccctggactaactgccaaatactatgtgtactctgtgggaggctcattagtgtgtgggtaatgaccaattacaaggtcagagcagctggtaatgataatgtggttttcttccaaattagaggattcccctacagactcatttacagcaggcctggacattgtggaacaggatatttgttgttgggggcagctactttgtagaatgaactttctgtagtctgagttgagaccttcccaccttgtctttgcccacctcagacacttgttggtagagattggcatcagacctttatttgtttcccagcttgactggcatttcatcatcagactcataatagttgataaacaatacgcctttggtgataatgtagattgagtacggttcttgatgggataaatggtgctgttgggtctctggtagaacaaagggctaaatttcatggcatatctacgaagtgttctattgccggctaccaaagagcgaaggggcacattttgagggcaagaggtactcattgtactttgaggtacttagatcttatgagttattgttgtggttatgacagtttggcctaggaagagattggccattaaaggtgtagcttcatgccaggtatctcccacaactattaggaatcaaagtctcctcgtggtttaatagctgccaacagtgtaatgataccttgccttctgcttgacttggaaggacaggtgcctgcagccccaggaggggttagaactgagtccctcctctgggaagatgatcttagttcatgctttaggaaatggaacttgcagggctggaggagaatgggtgtgagtctagggtcagctcaggcagcattaaacttcagcagcttattcctgcaaaacagtggccttgtggtgagctgttcattggctcttgattttctgctctgtgctctgctcatcctgtgctttcagctgatcccagcagatgcagtataaattgatttctctgtaattagatcagctgcagcagggaatacctatttccatatgtaagtgttaataaataaaggctggatgtgtatgtttgggtggtggtgccctcttagtgcctgtattccagtggtagctcatgctttctttgctgtcggtattttggtctttgcctctggcacatctgtagctcttagcaacatctgggcttctccagtagcaggtctgtgagtttcttccactaataatacagtggctcattcccttttaccagtggcagctgccagagaggctgcctgtgtttaggtggcagatgctatagtccacttcagcagagtcaggttccagctggttactagcttggctcatcctgtgctggctgtgatttgctattttctctcgggtacagatggataatactgttttaaagaggcttaggagtactagcagttgttgcttctgttccaggcccattagactgttccctacatctggcttcaagaaactcttgccatatatccatattcataatcattattcttcctgtgctaaaaagtacttctgaggatgaccttcattctcctatctaaattttagagtacttatgttgcaaccttctaagcccagtgatagtctgtggatgaaaggattaatattgcttagctttatgttggatttaagtgtaaatgtccatgattgtctctaacagagaagcaaatggaacccattttctcacatagaggtgcagggactgattgggtggctgcccttcagattataattgggctgaaagatgcagtatgttcagctaagaatacatcctggtgccagggagttttgtcccttaataatgttgctttgccatataagctttgcctcccagggagactctgagaatggggcagcagaatgagaaagaaaagggaaagagactgtgcttcagtttttgaaagatagagaaaattgctggcaattacttttagaagcagaaaatttgctatacagtttcatgtaaccataagcaagaacctgctttctcaattccttcccctgttccctcaacccttttggacagtctggtcctgagggtgcctttccatattacctttggctattgaaataaataattatttaaataaatgtttggaagttgctaggagattaaaacatgctgtgcagggagagaacatttctggactgggaggagcagaagaggcaagttaaaggaaaggaagttaggaaccatgcagaggagcggtttttgagaaacaacaatctccggtttggggcataataggtgctcagtgagtatttgatgattagtactataatttataagcaaagtctttgaaaacttctttaaaattttctctctgagaaatgggcttgcctgtggtttgggacgtttctatgtagggataacaaacagaaccaaaatagcaaaacagatgttttgatataatctaagaattgcatcctctcaactgggaactgtcatgaagaggaagaactcataaaatttgggaagtttcttgactgaattctgtggtgcagagtagcagtgttgactactagccaatgaggaagatttgaatattgaaattactggctgggcctggtgattcatgcctgtaatcccagcactttgggaggcctaggtgggcagattgcttaagctcaggagtttgagaccagcctaggcaacatggtgaaaccctgtctctacaaaaattagccgggcattggtggtgtgcacccgtaatcccagctactggggaggctgaggtggaaggatagcttgagcctgcgaggtggaggttgcattgagctgagacggcaccactggactccagcctaggcaatagagccagaccttgtctc

SEQ ID NO: 203183 - DNA, 2150 bp, Homo sapiens
  Payload ID: 20070
  Gene Name: zinc finger protein 610
  Uniprot ID: Q8N9Z0
  ENST ID: ENST00000321287
  CDS Start-End: 407-1795
agacccggaagcggatcgcgtgggtagaaggtcacaccgcagcgcgtcagtttccctttgtttagattcaatctgggcttcccagctcccccgcgcttctgtacccgggatctgagagtcaacacagaccttgaaatccccgcaccgctccctccaccccgtgtaaattcaggcgtctccgtgagagtccggcgctcgcttccctgtgtgttaaaatcgctcggcgacgggtcctgtccccgctcgttctgccttgggccagacacaggagtgttgccatgttgtccaaactggtctcgaaattctggagtcaagcagtctgcctgcctcgttctccaaacgtgctgggattacaggcatgagccactacgcctggccaagtattcggattgacttataaacagtcatgctatgtgatgaagaagcccagaagaggaaagcaaaggagtcagggatggctcttcctcagggacgcttgacattcatggacgtggccatcgaattctctcaggaggagtggaaatccctggaccctggacagagggctttatacagggacgtgatgttggagaactacaggaacctggtctttctgggaatctgtcttcctgacctaagtattatttccatgttgaagcaaaggagagagcccttgattctgcaaagtcaagttaaaatagtaaaaaatacagatggaagggaatgtgtcagaagcgtgaacacagggaggagctgtgtattgggaagcaatgcagaaaacaagcctattaaaaatcaacttggattaacccttgaggcacatctgtctgaattgcagctgtttcaagccggaaggaaaatttacagaagtaatcaagttgaaaagtttacaaaccatcgttcctcagtttcaccacttcaaaaaatttcttctagtttcacaacacacatttttaataaatatagaaatgatcttattgatttcccattactcccacaagaagagaaagcatacattagaggaaaatcttatgaatatgaatgtagtgaagatggtgaagtttttagagtccgtgcaagccttactaaccatcaagtaatccatactgcagagaaaccttacaaatgtactgaatgtggcaaggtcttcagtcgcaattcacaccttgtagaacattggagaattcatactggacagaagccttacaaatgtagtgaatgtgacaaggtgtttaatcgcaattcaaaccttgcacgacatcaaagaattcatactggagagaagcctcacaaatgtaacgaatgtggcaaagcttttagagagtgttcgggacttactacccatcttgtaatccatactggagagaaaccttacaaatgtaatgagtgtggcaagaacttcaggcacaaattttctctaaccaatcatcagagaagtcacacggcggaaaaaccttacaaatgtaatgaatgtggcaaggtctttagtctgctttcataccttgcacggcatcaaataattcatagtacagagaagccctacaaatgtaacgaatgtggaagagcatttcacaagcgtccgggccttatggcccatcttctaatccatactggagagaaaccttacaaatgtaatgaatgtgacaaagtctttgggcgcaaattatacctaaccaaccatcagagaattcatactggagagagaccttacaagtgtaatgcatgtggcaaggtcttcaatcaaaatccacacctttcacgacatcggaaaattcatgctggagagaattcactgcgtaccttacagatggaatgaatgtggcaaaatctttagttagaattcacacctagcacaacattggaggactcaggagaaaaaccttacaaatatcataaatgtggcaaagaatttagtttgcattgaagcctcatcactcatctcttgatccacactgaaaggaaaccctacaaatgtaaagttaataacatatataaataatctataaagagagaacagttatatcagaatagagcatttaatgaaaactaccagtatagcatattcttgagtaggattcacatttaactgctggcaccgtaatttgtaactctttgatttagaatgtacatacttctcatgttttaagtaataaagtttaaagttttttttt

SEQ ID NO: 203184 - DNA, 1855 bp, Homo sapiens
  Payload ID: 20070
  Gene Name: zinc finger protein 610
  Uniprot ID: Q8N9Z0
  ENST ID: ENST00000327920
  CDS Start-End: 376-1764
aggcagctttaacctgggtgtgggtgaggatgacactgtgatgctcctagaggtggttcatgaggaatggacgaataagtggttggaactgatatgagaacacatagctgaagaagagacacaggagtgttgccatgttgtccaaactggtctcgaaattctggagtcaagcagtctgcctgcctcgttctccaaacgtgctgggattacaggcatgagccactacgcctggccaagtattcggtatttataaaatctacagtagtacacagttatgtcgtaggccatcacattcggtcaccacacactcactgactcatccagagcaatttctagtcctgcaagcgccattcatggattgacttataaacagtcatgctatgtgatgaagaagcccagaagaggaaagcaaaggagtcagggatggctcttcctcagggacgcttgacattcatggacgtggccatcgaattctctcaggaggagtggaaatccctggaccctggacagagggctttatacagggacgtgatgttggagaactacaggaacctggtctttctgggaatctgtcttcctgacctaagtattatttccatgttgaagcaaaggagagagcccttgattctgcaaagtcaagttaaaatagtaaaaaatacagatggaagggaatgtgtcagaagcgtgaacacagggaggagctgtgtattgggaagcaatgcagaaaacaagcctattaaaaatcaacttggattaacccttgaggcacatctgtctgaattgcagctgtttcaagccggaaggaaaatttacagaagtaatcaagttgaaaagtttacaaaccatcgttcctcagtttcaccacttcaaaaaatttcttctagtttcacaacacacatttttaataaatatagaaatgatcttattgatttcccattactcccacaagaagagaaagcatacattagaggaaaatcttatgaatatgaatgtagtgaagatggtgaagtttttagagtccgtgcaagccttactaaccatcaagtaatccatactgcagagaaaccttacaaatgtactgaatgtggcaaggtcttcagtcgcaattcacaccttgtagaacattggagaattcatactggacagaagccttacaaatgtagtgaatgtgacaaggtgtttaatcgcaattcaaaccttgcacgacatcaaagaattcatactggagagaagcctcacaaatgtaacgaatgtggcaaagcttttagagagtgttcgggacttactacccatcttgtaatccatactggagagaaaccttacaaatgtaatgagtgtggcaagaacttcaggcacaaattttctctaaccaatcatcagagaagtcacacggcggaaaaaccttacaaatgtaatgaatgtggcaaggtctttagtctgctttcataccttgcacggcatcaaataattcatagtacagagaagccctacaaatgtaacgaatgtggaagagcatttcacaagcgtccgggccttatggcccatcttctaatccatactggagagaaaccttacaaatgtaatgaatgtgacaaagtctttgggcgcaaattatacctaaccaaccatcagagaattcatactggagagagaccttacaagtgtaatgcatgtggcaaggtcttcaatcaaaatccacacctttcacgacatcggaaaattcatgctggagagaattcactgcgtaccttacagatggaatgaatgtggcaaaatctttagttagaattcacacctagcacaacattggaggactcaggagaaaaaccttacaaatatcataaatgtggcaaag

SEQ ID NO: 203185 - DNA, 2191 bp, Homo sapiens
  Payload ID: 20070
  Gene Name: zinc finger protein 610
  Uniprot ID: Q8N9Z0
  ENST ID: ENST00000403906
  CDS Start-End: 457-1845
agattcaatctgggcttcccagctcccccgcgcttctgtacccgggatctgagagtcaacacagaccttgaaatccccgcaccgctccctccaccccgtgtaaattcaggcgtctccgtgagagtccggcgctcgcttccctgtgtgttaaaatcgctcggcgacgggtcctgtccccgctcgttctgccttgggccagacacaggagtgttgccatgttgtccaaactggtctcgaaattctggagtcaagcagtctgcctgcctcgttctccaaacgtgctgggattacaggcatgagccactacgcctggccaagtattcggtatttataaaatctacagtagtacacagttatgtcgtaggccatcacattcggtcaccacacactcactgactcatccagagcaatttctagtcctgcaagcgccattcatggattgacttataaacagtcatgctatgtgatgaagaagcccagaagaggaaagcaaaggagtcagggatggctcttcctcagggacgcttgacattcatggacgtggccatcgaattctctcaggaggagtggaaatccctggaccctggacagagggctttatacagggacgtgatgttggagaactacaggaacctggtctttctgggaatctgtcttcctgacctaagtattatttccatgttgaagcaaaggagagagcccttgattctgcaaagtcaagttaaaatagtaaaaaatacagatggaagggaatgtgtcagaagcgtgaacacagggaggagctgtgtattgggaagcaatgcagaaaacaagcctattaaaaatcaacttggattaacccttgaggcacatctgtctgaattgcagctgtttcaagccggaaggaaaatttacagaagtaatcaagttgaaaagtttacaaaccatcgttcctcagtttcaccacttcaaaaaatttcttctagtttcacaacacacatttttaataaatatagaaatgatcttattgatttcccattactcccacaagaagagaaagcatacattagaggaaaatcttatgaatatgaatgtagtgaagatggtgaagtttttagagtccgtgcaagccttactaaccatcaagtaatccatactgcagagaaaccttacaaatgtactgaatgtggcaaggtcttcagtcgcaattcacaccttgtagaacattggagaattcatactggacagaagccttacaaatgtagtgaatgtgacaaggtgtttaatcgcaattcaaaccttgcacgacatcaaagaattcatactggagagaagcctcacaaatgtaacgaatgtggcaaagcttttagagagtgttcgggacttactacccatcttgtaatccatactggagagaaaccttacaaatgtaatgagtgtggcaagaacttcaggcacaaattttctctaaccaatcatcagagaagtcacacggcggaaaaaccttacaaatgtaatgaatgtggcaaggtctttagtctgctttcataccttgcacggcatcaaataattcatagtacagagaagccctacaaatgtaacgaatgtggaagagcatttcacaagcgtccgggccttatggcccatcttctaatccatactggagagaaaccttacaaatgtaatgaatgtgacaaagtctttgggcgcaaattatacctaaccaaccatcagagaattcatactggagagagaccttacaagtgtaatgcatgtggcaaggtcttcaatcaaaatccacacctttcacgacatcggaaaattcatgctggagagaattcactgcgtaccttacagatggaatgaatgtggcaaaatctttagttagaattcacacctagcacaacattggaggactcaggagaaaaaccttacaaatatcataaatgtggcaaagaatttagtttgcattgaagcctcatcactcatctcttgatccacactgaaaggaaaccctacaaatgtaaagttaataacatatataaataatctataaagagagaacagttatatcagaatagagcatttaatgaaaactaccagtatagcatattcttgagtaggattcacatttaactgctggcaccgtaatttgtaactctttgatttagaatgtacatacttctcatgttttaagtaataaagtttaaag

SEQ ID NO: 203186 - DNA, 581 bp, Homo sapiens
  Payload ID: 20070
  Gene Name: zinc finger protein 610
  ENST ID: ENST00000593698
  CDS Start-End: 327-581
tcgtgaaggaaggaggaacacactccaagttcttatcacagcacacaagtcattcatgtagcaaactatacacaggagtgttgccatgttgtccaaactggtctcgaaattctggagtcaagcagtctgcctgcctcgttctccaaacgtgctgggattacaggcatgagccactacgcctggccaagtattcggtatttataaaatctacagtagtacacagttatgtcgtaggccatcacattcggtcaccacacactcactgactcatccagagcaatttctagtcctgcaagcgccattcatggattgacttataaacagtcatgctatgtgatgaagaagcccagaagaggaaagcaaaggagtcagggatggctcttcctcagggacgcttgacattcatggacgtggccatcgaattctctcaggaggagtggaaatccctggaccctggacagagggctttatacagggacgtgatgttggagaactacaggaacctggtctttctgggaatctgtcttcctgacctaagtattatttccatgttgaagcaaaggagagagcccttgattctg

SEQ ID NO: 203187 - DNA, 2723 bp, Homo sapiens
  Payload ID: 20070
  Gene Name: zinc finger protein 610
  Uniprot ID: Q8N9Z0
  ENST ID: ENST00000601151
  CDS Start-End: 453-1712
tcaatctgggcttcccagctcccccgcgcttctgtacccgggatctgagagtcaacacagaccttgaaatccccgcaccgctccctccaccccgtgtaaattcaggcgtctccgtgagagtccggcgctcgcttccctgtgtgttaaaatcgctcggcgacgggtcctgtccccgctcgttctgccttgggccagacacaggagtgttgccatgttgtccaaactggtctcgaaattctggagtcaagcagtctgcctgcctcgttctccaaacgtgctgggattacaggcatgagccactacgcctggccaagtattcggtatttataaaatctacagtagtacacagttatgtcgtaggccatcacattcggtcaccacacactcactgactcatccagagcaatttctagtcctgcaagcgccattcatggattgacttataaacagtcatgctatgtgatgaagaagcccagaagaggaaagcaaaggagtcagggatggctcttcctcagggacgcttgacattcatggacgtggccatcgaattctctcaggaggagtggaaatccctggaccctggacagagggctttatacagggacgtgatgttggagaactacaggaacctggtctttctggggaggagctgtgtattgggaagcaatgcagaaaacaagcctattaaaaatcaacttggattaacccttgaggcacatctgtctgaattgcagctgtttcaagccggaaggaaaatttacagaagtaatcaagttgaaaagtttacaaaccatcgttcctcagtttcaccacttcaaaaaatttcttctagtttcacaacacacatttttaataaatatagaaatgatcttattgatttcccattactcccacaagaagagaaagcatacattagaggaaaatcttatgaatatgaatgtagtgaagatggtgaagtttttagagtccgtgcaagccttactaaccatcaagtaatccatactgcagagaaaccttacaaatgtactgaatgtggcaaggtcttcagtcgcaattcacaccttgtagaacattggagaattcatactggacagaagccttacaaatgtagtgaatgtgacaaggtgtttaatcgcaattcaaaccttgcacgacatcaaagaattcatactggagagaagcctcacaaatgtaacgaatgtggcaaagcttttagagagtgttcgggacttactacccatcttgtaatccatactggagagaaaccttacaaatgtaatgagtgtggcaagaacttcaggcacaaattttctctaaccaatcatcagagaagtcacacggcggaaaaaccttacaaatgtaatgaatgtggcaaggtctttagtctgctttcataccttgcacggcatcaaataattcatagtacagagaagccctacaaatgtaacgaatgtggaagagcatttcacaagcgtccgggccttatggcccatcttctaatccatactggagagaaaccttacaaatgtaatgaatgtgacaaagtctttgggcgcaaattatacctaaccaaccatcagagaattcatactggagagagaccttacaagtgtaatgcatgtggcaaggtcttcaatcaaaatccacacctttcacgacatcggaaaattcatgctggagagaattcactgcgtaccttacagatggaatgaatgtggcaaaatctttagttagaattcacacctagcacaacattggaggactcaggagaaaaaccttacaaatatcataaatgtggcaaagaatttagtttgcattgaagcctcatcactcatctcttgatccacactgaaaggaaaccctacaaatgtaaagttaataacatatataaataatctataaagagagaacagttatatcagaatagagcatttaatgaaaactaccagtatagcatattcttgagtaggattcacatttaactgctggcaccgtaatttgtaactctttgatttagaatgtacatacttctcatgttttaagtaataaagtttaaagtttttttttagttttttcttttttttttgagacgaagtctcgctgtattacccaggctggagtgcagtggcatgatcttggctcactgcaacctccgtctcccggattcaagcaattctcctgcctcagcctcctgagtagctgggattacaggcatgtgccactactgcccggctaatttttgtatttttagtcgagacggggtttccctccgttggccaggccggtttcaaactcctgacctcaagtgatccactggccttggcctcccaaagtgctgggattataggtgtgagccacagcgcccggcctagtttaaatttttcttagtgtgaatgaattacatcctttctaccagcgttgtttaatcttacctcaggaggatactttatagtagagaataataacccattatgattttaaggttgaagcagccagaaaagtgtgtgtgtgtgtatgtgtgtgagacataaaacaacatacgcttctgggtgcaatatacttaagtaagtatgatgttgagtaattacacttagtacttgagttagtttctctgtactctggtgtaggatgtttatgtgggtaaagtcaaaatcactttaatagtacaatttcagccttgtacaccctcaaatgtgtgtgagtgttaaagagtatgccctgta

SEQ ID NO: 203188 - DNA, 1643 bp, Homo sapiens
  Payload ID: 20070
  Gene Name: zinc finger protein 610
  Uniprot ID: Q8N9Z0
  ENST ID: ENST00000613461
  CDS Start-End: 29-1288
gacatttaggattgacttataaacagtcatgctatgtgatgaagaagcccagaagaggaaagcaaaggagtcagggatggctcttcctcagggacgcttgacattcatggacgtggccatcgaattctctcaggaggagtggaaatccctggaccctggacagagggctttatacagggacgtgatgttggagaactacaggaacctggtctttctggggaggagctgtgtattgggaagcaatgcagaaaacaagcctattaaaaatcaacttggattaacccttgaggcacatctgtctgaattgcagctgtttcaagccggaaggaaaatttacagaagtaatcaagttgaaaagtttacaaaccatcgttcctcagtttcaccacttcaaaaaatttcttctagtttcacaacacacatttttaataaatatagaaatgatcttattgatttcccattactcccacaagaagagaaagcatacattagaggaaaatcttatgaatatgaatgtagtgaagatggtgaagtttttagagtccgtgcaagccttactaaccatcaagtaatccatactgcagagaaaccttacaaatgtactgaatgtggcaaggtcttcagtcgcaattcacaccttgtagaacattggagaattcatactggacagaagccttacaaatgtagtgaatgtgacaaggtgtttaatcgcaattcaaaccttgcacgacatcaaagaattcatactggagagaagcctcacaaatgtaacgaatgtggcaaagcttttagagagtgttcgggacttactacccatcttgtaatccatactggagagaaaccttacaaatgtaatgagtgtggcaagaacttcaggcacaaattttctctaaccaatcatcagagaagtcacacggcggaaaaaccttacaaatgtaatgaatgtggcaaggtctttagtctgctttcataccttgcacggcatcaaataattcatagtacagagaagccctacaaatgtaacgaatgtggaagagcatttcacaagcgtccgggccttatggcccatcttctaatccatactggagagaaaccttacaaatgtaatgaatgtgacaaagtctttgggcgcaaattatacctaaccaaccatcagagaattcatactggagagagaccttacaagtgtaatgcatgtggcaaggtcttcaatcaaaatccacacctttcacgacatcggaaaattcatgctggagagaattcactgcgtaccttacagatggaatgaatgtggcaaaatctttagttagaattcacacctagcacaacattggaggactcaggagaaaaaccttacaaatatcataaatgtggcaaagaatttagtttgcattgaagcctcatcactcatctcttgatccacactgaaaggaaaccctacaaatgtaaagttaataacatatataaataatctataaagagagaacagttatatcagaatagagcatttaatgaaaactaccagtatagcatattcttgagtaggattcacatttaactgctggcaccgtaatttgtaactctttgatttagaatgtacatacttctcatgttttaagtaataaagtttaaagttttttttt

SEQ ID NO: 203189 - DNA, 1772 bp, Homo sapiens
  Payload ID: 20070
  Gene Name: zinc finger protein 610
  Uniprot ID: Q8N9Z0
  ENST ID: ENST00000616431
  CDS Start-End: 29-1417
gacatttaggattgacttataaacagtcatgctatgtgatgaagaagcccagaagaggaaagcaaaggagtcagggatggctcttcctcagggacgcttgacattcatggacgtggccatcgaattctctcaggaggagtggaaatccctggaccctggacagagggctttatacagggacgtgatgttggagaactacaggaacctggtctttctgggaatctgtcttcctgacctaagtattatttccatgttgaagcaaaggagagagcccttgattctgcaaagtcaagttaaaatagtaaaaaatacagatggaagggaatgtgtcagaagcgtgaacacagggaggagctgtgtattgggaagcaatgcagaaaacaagcctattaaaaatcaacttggattaacccttgaggcacatctgtctgaattgcagctgtttcaagccggaaggaaaatttacagaagtaatcaagttgaaaagtttacaaaccatcgttcctcagtttcaccacttcaaaaaatttcttctagtttcacaacacacatttttaataaatatagaaatgatcttattgatttcccattactcccacaagaagagaaagcatacattagaggaaaatcttatgaatatgaatgtagtgaagatggtgaagtttttagagtccgtgcaagccttactaaccatcaagtaatccatactgcagagaaaccttacaaatgtactgaatgtggcaaggtcttcagtcgcaattcacaccttgtagaacattggagaattcatactggacagaagccttacaaatgtagtgaatgtgacaaggtgtttaatcgcaattcaaaccttgcacgacatcaaagaattcatactggagagaagcctcacaaatgtaacgaatgtggcaaagcttttagagagtgttcgggacttactacccatcttgtaatccatactggagagaaaccttacaaatgtaatgagtgtggcaagaacttcaggcacaaattttctctaaccaatcatcagagaagtcacacggcggaaaaaccttacaaatgtaatgaatgtggcaaggtctttagtctgctttcataccttgcacggcatcaaataattcatagtacagagaagccctacaaatgtaacgaatgtggaagagcatttcacaagcgtccgggccttatggcccatcttctaatccatactggagagaaaccttacaaatgtaatgaatgtgacaaagtctttgggcgcaaattatacctaaccaaccatcagagaattcatactggagagagaccttacaagtgtaatgcatgtggcaaggtcttcaatcaaaatccacacctttcacgacatcggaaaattcatgctggagagaattcactgcgtaccttacagatggaatgaatgtggcaaaatctttagttagaattcacacctagcacaacattggaggactcaggagaaaaaccttacaaatatcataaatgtggcaaagaatttagtttgcattgaagcctcatcactcatctcttgatccacactgaaaggaaaccctacaaatgtaaagttaataacatatataaataatctataaagagagaacagttatatcagaatagagcatttaatgaaaactaccagtatagcatattcttgagtaggattcacatttaactgctggcaccgtaatttgtaactctttgatttagaatgtacatacttctcatgttttaagtaataaagtttaaagttttttttt

SEQ ID NO: 203190 - DNA, 3153 bp, Homo sapiens
  Payload ID: 20071
  Gene Name: zinc finger protein 611
  Uniprot ID: Q8N823
  ENST ID: ENST00000319783
  CDS Start-End: 318-2435
aatgctgtgtatttacttgaactcatacatcagaagatagtgatcttaacacattatgtttgggaagtttaaaatatctcttccaaatgcttgatgaaaaaggtgggaggatcacttgagccagggagttgaaggctgcagtgagccctgtttttgccaccacactccagcttggagaggtgaggggctgtcctctggatggcaattgatgaaggatgagtctgtgccctgaaggggagatcagtccagcccagctccccactgctgcctcgtgtgtggtggcttctccaggagagaggattgattcctaaagactcatgttacgtgaggaagcagctcagaagaggaaaggaaaggagccaggcatggctcttcctcagggacgcttgactttccgggatgtggctatagaattctcattggcagagtggaaatgcctgaacccttcacagagggctttgtacagggaagtgatgttggagaactacaggaacctggaggctgtggatatctcttccaaatgcatgatgaaggaggtcttgtcaacagggcaaggcaatacagaagtgatccacacagggacattgcaaagacatgaaagtcatcacattggagatttttgcttccaggaaattgagaaagaaattcatgacattgagtttcagtgtcaagaagatgaaagaaatggccttgaagcacccatgacaaaaataaaaaagttgactggtagcacagaccaacatgatcacaggcatgctggaaacaagcctattaaagatcagcttggatcaagcttttattcacatctgcctgaactccacatatttcagatcaaaggtgaaattggtaatcaacttgagaagtctactaatgatgctccctcagtttcaacattccaaagaatttcctgtaggccccaaacccagatttctaataactatgggaataatcccctgaattcttcattactcccacaaaaacaggaagtacacatgagagaaaaatctttccaatgtaataagagtggcaaagcctttaattgtagctcactcttaaggaaacaccagataccccatttaggagacaaacaatataaatgtgatgtatgtggcaagctctttaatcacgagcaataccttgcatgccatgatagatgtcacactgttgagaaaccttacaagtgtaaagagtgtggcaagaccttcagtcaggagtcatcccttacctgccatcgtagacttcatactggagtaaaacgttacaattgtaatgagtgtggcaagatctttggtcaaaattcagcccttctaattgataaggcaattgatactggagaaaatccttacaagtgtaatgaatgtgacaaggcttttaatcaacaatcacaactttcacatcatagaattcatactggagagaaaccttacaaatgtgaagaatgtgacaaagttttcagtcggaaatcaaccattgagacacataagagaattcatactggagagaaaccatacagatgtaaggtttgtgacacagctttcacgtggcattcacagctggctcgacatagaagaattcatactgcaaagaaaacttataaatgtaatgagtgtggcaagaccttcagtcacaagtcatcccttgtatgccatcatagacttcatggtggagagaaatcttacaaatgtaaggtttgtgacaaggcttttgtgtggagttcacaactggcaaaacatactagaattgactgtggagaaaaaccttacaagtgtaatgaatgtgggaagacctttggtcaaaattcagatcttttaattcataagtcaattcatactggggagcaaccttacaaatgtgatgaatgtgaaaaggttttcagtcgtaaatcaagccttgagacacataagataggtcatactggagagaaaccatacaaatgtaaggtttgtgacaaggcttttgcgtgtcattcctatctggcaaaacatactagaattcatagtggagagaaaccttacaagtgtaatgagtgcagcaagaccttcagtcacaggtcataccttgtatgccatcatagagttcatagtggtgagaaaccttacaagtgtaatgagtgcagcaagaccttcagtcgcaggtcatcccttcattgccatcgtagacttcatagtggtgagaaaccttacaagtgtaatgagtgtggcaataccttccgtcactgctcatcccttatataccatcgtagacttcatactggagagaaatcttacaaatgtacaatttgtgacaaggctttcgtgcgtaattcactcctgtcaagacataccagaattcacactgcagagaaaccttacaagtgtaatgaatgtgggaaggcttttaatcaacaatcacacctttcacgtcatcatagaattcatactggagagaaaccttagaaatgtgaagcatgtgacaaagtttccatttggaaatcacaccttaaagacataggagaatttatactggagagaaagcttacaaatgtaaggtttctgacaagacttgggagtgattcacacctggaacaacatactggacttcacactggagagaaaccttacaagtgtaatgagtgtggcaaagcctttggcaagcagtcaacacttattcaccatcaggcaattcatggtgtagggaaacttgactaatgtaatgattgtcacaaagtcttcagtaatgctacaacgattacaaatcattggagaatccataatgaagagagatcttacaagtgtaataaatgtggcaaatttttcagagatcgttcacatattgcaggtcatcggtgaactcatactggagagaaaccttacaaatgtcatgactgtgccaaggtcttcagtcaagcttcatcctatgcaaaacataggagaatttatacaggagagaaacctcacaagtgtgatgattgtggcaaagcctttgcttcacgttcacacgtcattagacatcagagaatctatactggacagaaatcttacaaatgtcatcagtgtggcaaggtcttcagtccaagatcactccatgcagaacatcagaaaattcatttttgagataaccgttcccaatgaaatgagtatagcaaaccatcaagcattaattgacattggagtc

SEQ ID NO: 203191 - DNA, 4517 bp, Homo sapiens
  Payload ID: 20071
  Gene Name: zinc finger protein 611
  Uniprot ID: Q8N823
  ENST ID: ENST00000543227
  CDS Start-End: 276-2393
agattaacgcaaacccggaagcggatcgggtggagtgtaggtcatatcgccgcgttgactagataacgaaggacaatgcatatatacaaaattgctgtattgcctggtgatatgcagctgtacctgtgacatcataattgcaccctccgacatgatatctcttccaaatgcttgatgaaaaaggtgggaggatcacttgagccagggagttgaaggctgcagtgagccctgtttttgccaccacactccagcttgggattgattcctaaagactcatgttacgtgaggaagcagctcagaagaggaaaggaaaggagccaggcatggctcttcctcagggacgcttgactttccgggatgtggctatagaattctcattggcagagtggaaatgcctgaacccttcacagagggctttgtacagggaagtgatgttggagaactacaggaacctggaggctgtggatatctcttccaaatgcatgatgaaggaggtcttgtcaacagggcaaggcaatacagaagtgatccacacagggacattgcaaagacatgaaagtcatcacattggagatttttgcttccaggaaattgagaaagaaattcatgacattgagtttcagtgtcaagaagatgaaagaaatggccttgaagcacccatgacaaaaataaaaaagttgactggtagcacagaccaacatgatcacaggcatgctggaaacaagcctattaaagatcagcttggatcaagcttttattcacatctgcctgaactccacatatttcagatcaaaggtgaaattggtaatcaacttgagaagtctactaatgatgctccctcagtttcaacattccaaagaatttcctgtaggccccaaacccagatttctaataactatgggaataatcccctgaattcttcattactcccacaaaaacaggaagtacacatgagagaaaaatctttccaatgtaataagagtggcaaagcctttaattgtagctcactcttaaggaaacaccagataccccatttaggagacaaacaatataaatgtgatgtatgtggcaagctctttaatcacgagcaataccttgcatgccatgatagatgtcacactgttgagaaaccttacaagtgtaaagagtgtggcaagaccttcagtcaggagtcatcccttacctgccatcgtagacttcatactggagtaaaacgttacaattgtaatgagtgtggcaagatctttggtcaaaattcagcccttctaattgataaggcaattgatactggagaaaatccttacaagtgtaatgaatgtgacaaggcttttaatcaacaatcacaactttcacatcatagaattcatactggagagaaaccttacaaatgtgaagaatgtgacaaagttttcagtcggaaatcaaccattgagacacataagagaattcatactggagagaaaccatacagatgtaaggtttgtgacacagctttcacgtggcattcacagctggctcgacatagaagaattcatactgcaaagaaaacttataaatgtaatgagtgtggcaagaccttcagtcacaagtcatcccttgtatgccatcatagacttcatggtggagagaaatcttacaaatgtaaggtttgtgacaaggcttttgtgtggagttcacaactggcaaaacatactagaattgactgtggagaaaaaccttacaagtgtaatgaatgtgggaagacctttggtcaaaattcagatcttttaattcataagtcaattcatactggggagcaaccttacaaatgtgatgaatgtgaaaaggttttcagtcgtaaatcaagccttgagacacataagataggtcatactggagagaaaccatacaaatgtaaggtttgtgacaaggcttttgcgtgtcattcctatctggcaaaacatactagaattcatagtggagagaaaccttacaagtgtaatgagtgcagcaagaccttcagtcacaggtcataccttgtatgccatcatagagttcatagtggtgagaaaccttacaagtgtaatgagtgcagcaagaccttcagtcgcaggtcatcccttcattgccatcgtagacttcatagtggtgagaaaccttacaagtgtaatgagtgtggcaataccttccgtcactgctcatcccttatataccatcgtagacttcatactggagagaaatcttacaaatgtacaatttgtgacaaggctttcgtgcgtaattcactcctgtcaagacataccagaattcacactgcagagaaaccttacaagtgtaatgaatgtgggaaggcttttaatcaacaatcacacctttcacgtcatcatagaattcatactggagagaaaccttagaaatgtgaagcatgtgacaaagtttccatttggaaatcacaccttaaagacataggagaatttatactggagagaaagcttacaaatgtaaggtttctgacaagacttgggagtgattcacacctggaacaacatactggacttcacactggagagaaaccttacaagtgtaatgagtgtggcaaagcctttggcaagcagtcaacacttattcaccatcaggcaattcatggtgtagggaaacttgactaatgtaatgattgtcacaaagtcttcagtaatgctacaacgattacaaatcattggagaatccataatgaagagagatcttacaagtgtaataaatgtggcaaatttttcagagatcgttcacatattgcaggtcatcggtgaactcatactggagagaaaccttacaaatgtcatgactgtgccaaggtcttcagtcaagcttcatcctatgcaaaacataggagaatttatacaggagagaaacctcacaagtgtgatgattgtggcaaagcctttgcttcacgttcacacgtcattagacatcagagaatctatactggacagaaatcttacaaatgtcatcagtgtggcaaggtcttcagtccaagatcactccatgcagaacatcagaaaattcatttttgagataaccgttcccaatgaaatgagtatagcaaaccatcaagcattaattgacattggagtcaattcagcattgacttgagtttgtgttgacttaacattgagttcaagcctttattgacattcaagtgtttatgttaagaggatggggccaggtgtggtggctccgacctgtaatcccagcacgtcgggaggccaaggcacataggtcacttgaggtcaggagtttgaaaccagcatggccaacagatgtgagccacttttctcagcctgttttttgtttcttattttctattatttttttgagccagtactttttaaagagatagtacttttttcagttagtactttttgaaagggatatatcatagtaatttttaaaagggatatgaggccaggcacggaggctcatgcctataatcccagcactttgggaggccgaggcaggcagatcacggggtcaggagatcgagactttcctggctaacagggtgaatccctgtctctactaaaaatacaaaaaattagctgggcatggtggctggcgcctgtagtcccagctactccagatgctgaggcaggagaatggcatgaacctgtgaggcggagcttgcagggagtcgagatcgcaccactgggctccagcctgggcgacagagtgagagtctatctcaaaaaaaaaaaaaaaaaaaaggatatcaaagcctcggtacgtggtggctcatccctgcaatcagagtactttggtcgacccatgtgaactggtcacctaaggtcacaatttcaaaagcaccctaacatggtgaaaccccatctctactaaaaatacaaaagttagccgggggtgttggtgtgcacctttagttccagctacttgggaggctggggcatgagaattgcttaaacctaggaggtagaagttgcagtgaaccaaaattgtgccactatactgcagcctgggtggcagagtgagtctccatctcaaacaaacaaaaaataacaaaaaaagacctcaaaaatgcttttcttctcgtataatggacttccttctttttctttctggttcctcttcatttctctctttattttttatttatttatttatttattttgcagtttgagtttgagataaatctaagttataaaagttgtatttcttaatacataatgacttctgaaagatgcctttgcagcatcctataatcagctcacatcattcgtttctgtacttgtatattttccagttattttccggttgaccccagaattcgttagatttttttaaaaaacaatttcaaaatagttgctgttttaaattagttgcatccagttcatatcaatgtctgcatgctttctagtctttgttatttattgaaaacctttggtacctaaacttaagtttgattgtttcagtgtgtacttggtaaatatgtcagtggccttttaactaaacatcaaaatgtactttaa

SEQ ID NO: 203192 - DNA, 4417 bp, Homo sapiens
  Payload ID: 20071
  Gene Name: zinc finger protein 611
  Uniprot ID: Q8N823
  ENST ID: ENST00000540744
  CDS Start-End: 176-2293
agattaacgcaaacccggaagcggatcgggtggagtgtaggtcatatcgccgcgatatctcttccaaatgcttgatgaaaaaggtgggaggatcacttgagccagggagttgaaggctgcagtgagccctgtttttgccaccacactccagcttgggattgattcctaaagactcatgttacgtgaggaagcagctcagaagaggaaaggaaaggagccaggcatggctcttcctcagggacgcttgactttccgggatgtggctatagaattctcattggcagagtggaaatgcctgaacccttcacagagggctttgtacagggaagtgatgttggagaactacaggaacctggaggctgtggatatctcttccaaatgcatgatgaaggaggtcttgtcaacagggcaaggcaatacagaagtgatccacacagggacattgcaaagacatgaaagtcatcacattggagatttttgcttccaggaaattgagaaagaaattcatgacattgagtttcagtgtcaagaagatgaaagaaatggccttgaagcacccatgacaaaaataaaaaagttgactggtagcacagaccaacatgatcacaggcatgctggaaacaagcctattaaagatcagcttggatcaagcttttattcacatctgcctgaactccacatatttcagatcaaaggtgaaattggtaatcaacttgagaagtctactaatgatgctccctcagtttcaacattccaaagaatttcctgtaggccccaaacccagatttctaataactatgggaataatcccctgaattcttcattactcccacaaaaacaggaagtacacatgagagaaaaatctttccaatgtaataagagtggcaaagcctttaattgtagctcactcttaaggaaacaccagataccccatttaggagacaaacaatataaatgtgatgtatgtggcaagctctttaatcacgagcaataccttgcatgccatgatagatgtcacactgttgagaaaccttacaagtgtaaagagtgtggcaagaccttcagtcaggagtcatcccttacctgccatcgtagacttcatactggagtaaaacgttacaattgtaatgagtgtggcaagatctttggtcaaaattcagcccttctaattgataaggcaattgatactggagaaaatccttacaagtgtaatgaatgtgacaaggcttttaatcaacaatcacaactttcacatcatagaattcatactggagagaaaccttacaaatgtgaagaatgtgacaaagttttcagtcggaaatcaaccattgagacacataagagaattcatactggagagaaaccatacagatgtaaggtttgtgacacagctttcacgtggcattcacagctggctcgacatagaagaattcatactgcaaagaaaacttataaatgtaatgagtgtggcaagaccttcagtcacaagtcatcccttgtatgccatcatagacttcatggtggagagaaatcttacaaatgtaaggtttgtgacaaggcttttgtgtggagttcacaactggcaaaacatactagaattgactgtggagaaaaaccttacaagtgtaatgaatgtgggaagacctttggtcaaaattcagatcttttaattcataagtcaattcatactggggagcaaccttacaaatgtgatgaatgtgaaaaggttttcagtcgtaaatcaagccttgagacacataagataggtcatactggagagaaaccatacaaatgtaaggtttgtgacaaggcttttgcgtgtcattcctatctggcaaaacatactagaattcatagtggagagaaaccttacaagtgtaatgagtgcagcaagaccttcagtcacaggtcataccttgtatgccatcatagagttcatagtggtgagaaaccttacaagtgtaatgagtgcagcaagaccttcagtcgcaggtcatcccttcattgccatcgtagacttcatagtggtgagaaaccttacaagtgtaatgagtgtggcaataccttccgtcactgctcatcccttatataccatcgtagacttcatactggagagaaatcttacaaatgtacaatttgtgacaaggctttcgtgcgtaattcactcctgtcaagacataccagaattcacactgcagagaaaccttacaagtgtaatgaatgtgggaaggcttttaatcaacaatcacacctttcacgtcatcatagaattcatactggagagaaaccttagaaatgtgaagcatgtgacaaagtttccatttggaaatcacaccttaaagacataggagaatttatactggagagaaagcttacaaatgtaaggtttctgacaagacttgggagtgattcacacctggaacaacatactggacttcacactggagagaaaccttacaagtgtaatgagtgtggcaaagcctttggcaagcagtcaacacttattcaccatcaggcaattcatggtgtagggaaacttgactaatgtaatgattgtcacaaagtcttcagtaatgctacaacgattacaaatcattggagaatccataatgaagagagatcttacaagtgtaataaatgtggcaaatttttcagagatcgttcacatattgcaggtcatcggtgaactcatactggagagaaaccttacaaatgtcatgactgtgccaaggtcttcagtcaagcttcatcctatgcaaaacataggagaatttatacaggagagaaacctcacaagtgtgatgattgtggcaaagcctttgcttcacgttcacacgtcattagacatcagagaatctatactggacagaaatcttacaaatgtcatcagtgtggcaaggtcttcagtccaagatcactccatgcagaacatcagaaaattcatttttgagataaccgttcccaatgaaatgagtatagcaaaccatcaagcattaattgacattggagtcaattcagcattgacttgagtttgtgttgacttaacattgagttcaagcctttattgacattcaagtgtttatgttaagaggatggggccaggtgtggtggctccgacctgtaatcccagcacgtcgggaggccaaggcacataggtcacttgaggtcaggagtttgaaaccagcatggccaacagatgtgagccacttttctcagcctgttttttgtttcttattttctattatttttttgagccagtactttttaaagagatagtacttttttcagttagtactttttgaaagggatatatcatagtaatttttaaaagggatatgaggccaggcacggaggctcatgcctataatcccagcactttgggaggccgaggcaggcagatcacggggtcaggagatcgagactttcctggctaacagggtgaatccctgtctctactaaaaatacaaaaaattagctgggcatggtggctggcgcctgtagtcccagctactccagatgctgaggcaggagaatggcatgaacctgtgaggcggagcttgcagggagtcgagatcgcaccactgggctccagcctgggcgacagagtgagagtctatctcaaaaaaaaaaaaaaaaaaaaggatatcaaagcctcggtacgtggtggctcatccctgcaatcagagtactttggtcgacccatgtgaactggtcacctaaggtcacaatttcaaaagcaccctaacatggtgaaaccccatctctactaaaaatacaaaagttagccgggggtgttggtgtgcacctttagttccagctacttgggaggctggggcatgagaattgcttaaacctaggaggtagaagttgcagtgaaccaaaattgtgccactatactgcagcctgggtggcagagtgagtctccatctcaaacaaacaaaaaataacaaaaaaagacctcaaaaatgcttttcttctcgtataatggacttccttctttttctttctggttcctcttcatttctctctttattttttatttatttatttatttattttgcagtttgagtttgagataaatctaagttataaaagttgtatttcttaatacataatgacttctgaaagatgcctttgcagcatcctataatcagctcacatcattcgtttctgtacttgtatattttccagttattttccggttgaccccagaattcgttagatttttttaaaaaacaatttcaaaatagttgctgttttaaattagttgcatccagttcatatcaatgtctgcatgctttctagtctttgttatttattgaaaacctttggtacctaaacttaagtttgattgtttcagtgtgtacttggtaaatatgtcagtggccttttaactaaacatcaaaatgtactttaa

SEQ ID NO: 203193 - DNA, 4380 bp, Homo sapiens
  Payload ID: 20071
  Gene Name: zinc finger protein 611
  Uniprot ID: Q8N823
  ENST ID: ENST00000453741
  CDS Start-End: 346-2256
aaacccggaagcggatcgggtggagtgtaggtcatatcgccgcgttgactagataacgaaggacaatgcatatatacaaaattgctgtattgcctggtgatatgcagctgtacctgtgacatcataattgcaccctccgacatgatatctcttccaaatgcttgatgaaaaaggtgggaggatcacttgagccagggagttgaaggctgcagtgagccctgtttttgccaccacactccagcttgggattgattcctaaagactcatgttacgtgaggaagcagctcagaagaggaaaggaaaggagccaggcatggctcttcctcagatatctcttccaaatgcatgatgaaggaggtcttgtcaacagggcaaggcaatacagaagtgatccacacagggacattgcaaagacatgaaagtcatcacattggagatttttgcttccaggaaattgagaaagaaattcatgacattgagtttcagtgtcaagaagatgaaagaaatggccttgaagcacccatgacaaaaataaaaaagttgactggtagcacagaccaacatgatcacaggcatgctggaaacaagcctattaaagatcagcttggatcaagcttttattcacatctgcctgaactccacatatttcagatcaaaggtgaaattggtaatcaacttgagaagtctactaatgatgctccctcagtttcaacattccaaagaatttcctgtaggccccaaacccagatttctaataactatgggaataatcccctgaattcttcattactcccacaaaaacaggaagtacacatgagagaaaaatctttccaatgtaataagagtggcaaagcctttaattgtagctcactcttaaggaaacaccagataccccatttaggagacaaacaatataaatgtgatgtatgtggcaagctctttaatcacgagcaataccttgcatgccatgatagatgtcacactgttgagaaaccttacaagtgtaaagagtgtggcaagaccttcagtcaggagtcatcccttacctgccatcgtagacttcatactggagtaaaacgttacaattgtaatgagtgtggcaagatctttggtcaaaattcagcccttctaattgataaggcaattgatactggagaaaatccttacaagtgtaatgaatgtgacaaggcttttaatcaacaatcacaactttcacatcatagaattcatactggagagaaaccttacaaatgtgaagaatgtgacaaagttttcagtcggaaatcaaccattgagacacataagagaattcatactggagagaaaccatacagatgtaaggtttgtgacacagctttcacgtggcattcacagctggctcgacatagaagaattcatactgcaaagaaaacttataaatgtaatgagtgtggcaagaccttcagtcacaagtcatcccttgtatgccatcatagacttcatggtggagagaaatcttacaaatgtaaggtttgtgacaaggcttttgtgtggagttcacaactggcaaaacatactagaattgactgtggagaaaaaccttacaagtgtaatgaatgtgggaagacctttggtcaaaattcagatcttttaattcataagtcaattcatactggggagcaaccttacaaatgtgatgaatgtgaaaaggttttcagtcgtaaatcaagccttgagacacataagataggtcatactggagagaaaccatacaaatgtaaggtttgtgacaaggcttttgcgtgtcattcctatctggcaaaacatactagaattcatagtggagagaaaccttacaagtgtaatgagtgcagcaagaccttcagtcacaggtcataccttgtatgccatcatagagttcatagtggtgagaaaccttacaagtgtaatgagtgcagcaagaccttcagtcgcaggtcatcccttcattgccatcgtagacttcatagtggtgagaaaccttacaagtgtaatgagtgtggcaataccttccgtcactgctcatcccttatataccatcgtagacttcatactggagagaaatcttacaaatgtacaatttgtgacaaggctttcgtgcgtaattcactcctgtcaagacataccagaattcacactgcagagaaaccttacaagtgtaatgaatgtgggaaggcttttaatcaacaatcacacctttcacgtcatcatagaattcatactggagagaaaccttagaaatgtgaagcatgtgacaaagtttccatttggaaatcacaccttaaagacataggagaatttatactggagagaaagcttacaaatgtaaggtttctgacaagacttgggagtgattcacacctggaacaacatactggacttcacactggagagaaaccttacaagtgtaatgagtgtggcaaagcctttggcaagcagtcaacacttattcaccatcaggcaattcatggtgtagggaaacttgactaatgtaatgattgtcacaaagtcttcagtaatgctacaacgattacaaatcattggagaatccataatgaagagagatcttacaagtgtaataaatgtggcaaatttttcagagatcgttcacatattgcaggtcatcggtgaactcatactggagagaaaccttacaaatgtcatgactgtgccaaggtcttcagtcaagcttcatcctatgcaaaacataggagaatttatacaggagagaaacctcacaagtgtgatgattgtggcaaagcctttgcttcacgttcacacgtcattagacatcagagaatctatactggacagaaatcttacaaatgtcatcagtgtggcaaggtcttcagtccaagatcactccatgcagaacatcagaaaattcatttttgagataaccgttcccaatgaaatgagtatagcaaaccatcaagcattaattgacattggagtcaattcagcattgacttgagtttgtgttgacttaacattgagttcaagcctttattgacattcaagtgtttatgttaagaggatggggccaggtgtggtggctccgacctgtaatcccagcacgtcgggaggccaaggcacataggtcacttgaggtcaggagtttgaaaccagcatggccaacagatgtgagccacttttctcagcctgttttttgtttcttattttctattatttttttgagccagtactttttaaagagatagtacttttttcagttagtactttttgaaagggatatatcatagtaatttttaaaagggatatgaggccaggcacggaggctcatgcctataatcccagcactttgggaggccgaggcaggcagatcacggggtcaggagatcgagactttcctggctaacagggtgaatccctgtctctactaaaaatacaaaaaattagctgggcatggtggctggcgcctgtagtcccagctactccagatgctgaggcaggagaatggcatgaacctgtgaggcggagcttgcagggagtcgagatcgcaccactgggctccagcctgggcgacagagtgagagtctatctcaaaaaaaaaaaaaaaaaaaaggatatcaaagcctcggtacgtggtggctcatccctgcaatcagagtactttggtcgacccatgtgaactggtcacctaaggtcacaatttcaaaagcaccctaacatggtgaaaccccatctctactaaaaatacaaaagttagccgggggtgttggtgtgcacctttagttccagctacttgggaggctggggcatgagaattgcttaaacctaggaggtagaagttgcagtgaaccaaaattgtgccactatactgcagcctgggtggcagagtgagtctccatctcaaacaaacaaaaaataacaaaaaaagacctcaaaaatgcttttcttctcgtataatggacttccttctttttctttctggttcctcttcatttctctctttattttttatttatttatttatttattttgcagtttgagtttgagataaatctaagttataaaagttgtatttcttaatacataatgacttctgaaagatgcctttgcagcatcctataatcagctcacatcattcgtttctgtacttgtatattttccagttattttccggttgaccccagaattcgttagatttttttaaaaaacaatttcaaaatagttgctgttttaaattagttgcatccagttcatatcaatgtctgcatgctttctagtctttgttatttattgaaaacctttggtacctaaacttaagtttgattgtttcagtgtgtacttggtaaatatgtcagtggccttttaactaaacatcaaaatgtactttaa

SEQ ID NO: 203194 - DNA, 538 bp, Homo sapiens
  Payload ID: 20071
  Gene Name: zinc finger protein 611
  ENST ID: ENST00000596702
  CDS Start-End: 266-412
aaacccggaagcggatcgggtggagtgtaggtcatatcgccgcgttgactagataacgaaggacaatgcatatatacaaaattgctgtattgcctggtgatatgcagctgtacctgtgacatcataattgcaccctccgacatgatatctcttccaaatgcttgatgaaaaaggtgggaggatcacttgagccagggagttgaaggctgcagtgagccctgtttttgccaccacactccagcttgggattgattcctaaagactcatgttacgtgaggaagcagctcagaagaggaaaggaaaggagccaggcatggctcttcctcaggtagagtctcactttgtcacccaggctggagtgcagtggtgtgatcctggctcactgcaacctctacctcccaggtttaagtgattcttgtgcttcagcctcctgaatagctgtgactacagatatctcttccaaatgcatgatgaaggaggtcttgtcaacagggcaaggcaatacagaagtgatccacacagggacattgcaaagaca

SEQ ID NO: 203195 - DNA, 560 bp, Homo sapiens
  Payload ID: 20071
  Gene Name: zinc finger protein 611
  ENST ID: ENST00000600943
  CDS Start-End: 170-397
acgcaaacccggaagcggatcgggtggagtgtaggtcatatcgccgcgatatctcttccaaatgcttgatgaaaaaggtgggaggatcacttgagccagggagttgaaggctgcagtgagccctgtttttgccaccacactccagcttgggattgattcctaaagactcatgttacgtgaggaagcagctcagaagaggaaaggaaaggagccaggcatggctcttcctcaggtagagtctcactttgtcacccaggctggagtgcagtggtgtgatcctggctcactgcaacctctacctcccagatatctcttccaaatgcatgatgaaggaggtcttgtcaacagggcaaggcaatacagaagtgatccacacagggacattgcaaagacatgaaagtcatcacattggagatttttgcttccaggaaattgagaaagaaattcatgacattgagtttcagtgtcaagaagatgaaagaaatggccttgaagcacccatgacaaaaataaaaaagttgactggtagcacagaccaacatgatcacaggcatgctgga

SEQ ID NO: 203196 - DNA, 2395 bp, Homo sapiens
  Payload ID: 20071
  Gene Name: zinc finger protein 611
  Uniprot ID: Q8N823
  ENST ID: ENST00000595798
  CDS Start-End: 280-2190
agccagggagttgaaggctgcagtgagccctgtttttgccaccacactccagcttggagaggtgaggggctgtcctctggatggcaattgatgaaggatgagtctgtgccctgaaggggagatcagtccagcccagctccccactgctgcctcgtgtgtggtggcttctccaggagagaggattgattcctaaagactcatgttacgtgaggaagcagctcagaagaggaaaggaaaggagccaggcatggctcttcctcagatatctcttccaaatgcatgatgaaggaggtcttgtcaacagggcaaggcaatacagaagtgatccacacagggacattgcaaagacatgaaagtcatcacattggagatttttgcttccaggaaattgagaaagaaattcatgacattgagtttcagtgtcaagaagatgaaagaaatggccttgaagcacccatgacaaaaataaaaaagttgactggtagcacagaccaacatgatcacaggcatgctggaaacaagcctattaaagatcagcttggatcaagcttttattcacatctgcctgaactccacatatttcagatcaaaggtgaaattggtaatcaacttgagaagtctactaatgatgctccctcagtttcaacattccaaagaatttcctgtaggccccaaacccagatttctaataactatgggaataatcccctgaattcttcattactcccacaaaaacaggaagtacacatgagagaaaaatctttccaatgtaataagagtggcaaagcctttaattgtagctcactcttaaggaaacaccagataccccatttaggagacaaacaatataaatgtgatgtatgtggcaagctctttaatcacgagcaataccttgcatgccatgatagatgtcacactgttgagaaaccttacaagtgtaaagagtgtggcaagaccttcagtcaggagtcatcccttacctgccatcgtagacttcatactggagtaaaacgttacaattgtaatgagtgtggcaagatctttggtcaaaattcagcccttctaattgataaggcaattgatactggagaaaatccttacaagtgtaatgaatgtgacaaggcttttaatcaacaatcacaactttcacatcatagaattcatactggagagaaaccttacaaatgtgaagaatgtgacaaagttttcagtcggaaatcaaccattgagacacataagagaattcatactggagagaaaccatacagatgtaaggtttgtgacacagctttcacgtggcattcacagctggctcgacatagaagaattcatactgcaaagaaaacttataaatgtaatgagtgtggcaagaccttcagtcacaagtcatcccttgtatgccatcatagacttcatggtggagagaaatcttacaaatgtaaggtttgtgacaaggcttttgtgtggagttcacaactggcaaaacatactagaattgactgtggagaaaaaccttacaagtgtaatgaatgtgggaagacctttggtcaaaattcagatcttttaattcataagtcaattcatactggggagcaaccttacaaatgtgatgaatgtgaaaaggttttcagtcgtaaatcaagccttgagacacataagataggtcatactggagagaaaccatacaaatgtaaggtttgtgacaaggcttttgcgtgtcattcctatctggcaaaacatactagaattcatagtggagagaaaccttacaagtgtaatgagtgcagcaagaccttcagtcacaggtcataccttgtatgccatcatagagttcatagtggtgagaaaccttacaagtgtaatgagtgcagcaagaccttcagtcgcaggtcatcccttcattgccatcgtagacttcatagtggtgagaaaccttacaagtgtaatgagtgtggcaataccttccgtcactgctcatcccttatataccatcgtagacttcatactggagagaaatcttacaaatgtacaatttgtgacaaggctttcgtgcgtaattcactcctgtcaagacataccagaattcacactgcagagaaaccttacaagtgtaatgaatgtgggaaggcttttaatcaacaatcacacctttcacgtcatcatagaattcatactggagagaaaccttagaaatgtgaagcatgtgacaaagtttccatttggaaatcacaccttaaagacataggagaatttatactggagagaaagcttacaaatgtaaggtttctgacaagacttgggagtgattcacacctggaacaacatactggacttcacactggagagaaaccttacaagtgtaatgagtgtggcaaagcctttggcaagcagtcaa

SEQ ID NO: 203197 - DNA, 531 bp, Homo sapiens
  Payload ID: 20071
  Gene Name: zinc finger protein 611
  ENST ID: ENST00000601643
  CDS Start-End: 144-531
aaacccggaagcggatcgggtggagtgtaggtcatatcgccgcggattgattcctaaagactcatgttacgtgaggaagcagctcagaagaggaaaggaaaggagccaggcatggctcttcctcagatatctcttccaaatgcatgatgaaggaggtcttgtcaacagggcaaggcaatacagaagtgatccacacagggacattgcaaagacatgaaagtcatcacattggagatttttgcttccaggaaattgagaaagaaattcatgacattgagtttcagtgtcaagaagatgaaagaaatggccttgaagcacccatgacaaaaataaaaaagttgactggtagcacagaccaacatgatcacaggcatgctggaaacaagcctattaaagatcagcttggatcaagcttttattcacatctgcctgaactccacatatttcagatcaaaggtgaaattggtaatcaacttgagaagtctactaatgatgctccctcagtttcaacattccaaagaatttcctgta

SEQ ID NO: 203198 - DNA, 860 bp, Homo sapiens
  Payload ID: 20071
  Gene Name: zinc finger protein 611
  ENST ID: ENST00000597343
  CDS Start-End: 240-434
gtaggtcatatcgccgcgttgactagataacgaaggacaatgcatatatacaaaattgctgtattgcctggtgatatgcagctgtacctgtgacatcataattgcaccctccgacatgatatctcttccaaatgcttgatgaaaaaggtgggaggatcacttgagccagggagttgaaggctgcagtgagccctgtttttgccaccacactccagcttgggattgattcctaaagactcatgttacgtgaggaagcagctcagaagaggaaaggaaaggagccaggcatggctcttcctcagggacgcttgactttccgggatgtggctatagaattctcattggcagagtggaaatgcctgaacccttcacagagggctttgtacagggaagtgatgttggagaactacaggaacctggaggctgtgggctgaagtgcaatggcacaatctgagttcaccgcaacctccacctcccggattcaaatggttctcctgcctcagcctcccgagaagctgggattacaggtagagtctcactttgtcacccaggctggagtgcagtggtgtgatcctggctcactgcaacctctacctcccaggtttaagtgattcttgtgcttcagcctcctgaatagctgtgactacagatatctcttccaaatgcatgatgaaggaggtcttgtcaacagggcaaggcaatacagaagtgatccacacagggacattgcaaagacatgaaagtcatcacattggagatttttgcttccaggaaattgagaaagaaattcatgacattgagtttcagtgtcaagaagatgaaagaaatggccttgaagcacccatgacaaaaataaaaaa

SEQ ID NO: 203199 - DNA, 4796 bp, Homo sapiens
  Payload ID: 20071
  Gene Name: zinc finger protein 611
  ENST ID: ENST00000595001
  CDS Start-End: 383-577
ggaagcggatcgggtggagtgtaggtcatatcgccgcgttgactagataacgaaggacaatgcatatatacaaaattgctgtattgcctggtgatatgcagctgtacctgtgacatcataattgcaccctccgacatgatatctcttccaaatgcttgatgaaaaaggtgggaggatcacttgagccagggagttgaaggctgcagtgagccctgtttttgccaccacactccagcttggagaggtgaggggctgtcctctggatggcaattgatgaaggatgagtctgtgccctgaaggggagatcagtccagcccagctccccactgctgcctcgtgtgtggtggcttctccaggagagaggattgattcctaaagactcatgttacgtgaggaagcagctcagaagaggaaaggaaaggagccaggcatggctcttcctcagggacgcttgactttccgggatgtggctatagaattctcattggcagagtggaaatgcctgaacccttcacagagggctttgtacagggaagtgatgttggagaactacaggaacctggaggctgtgggctgaagtgcaatggcacaatctgagttcaccgcaacctccacctcccggattcaaatggttctcctgcctcagcctcccgagaagctgggattacaggtagagtctcactttgtcacccaggctggagtgcagtggtgtgatcctggctcactgcaacctctacctcccagatatctcttccaaatgcatgatgaaggaggtcttgtcaacagggcaaggcaatacagaagtgatccacacagggacattgcaaagacatgaaagtcatcacattggagatttttgcttccaggaaattgagaaagaaattcatgacattgagtttcagtgtcaagaagatgaaagaaatggccttgaagcacccatgacaaaaataaaaaagttgactggtagcacagaccaacatgatcacaggcatgctggaaacaagcctattaaagatcagcttggatcaagcttttattcacatctgcctgaactccacatatttcagatcaaaggtgaaattggtaatcaacttgagaagtctactaatgatgctccctcagtttcaacattccaaagaatttcctgtaggccccaaacccagatttctaataactatgggaataatcccctgaattcttcattactcccacaaaaacaggaagtacacatgagagaaaaatctttccaatgtaataagagtggcaaagcctttaattgtagctcactcttaaggaaacaccagataccccatttaggagacaaacaatataaatgtgatgtatgtggcaagctctttaatcacgagcaataccttgcatgccatgatagatgtcacactgttgagaaaccttacaagtgtaaagagtgtggcaagaccttcagtcaggagtcatcccttacctgccatcgtagacttcatactggagtaaaacgttacaattgtaatgagtgtggcaagatctttggtcaaaattcagcccttctaattgataaggcaattgatactggagaaaatccttacaagtgtaatgaatgtgacaaggcttttaatcaacaatcacaactttcacatcatagaattcatactggagagaaaccttacaaatgtgaagaatgtgacaaagttttcagtcggaaatcaaccattgagacacataagagaattcatactggagagaaaccatacagatgtaaggtttgtgacacagctttcacgtggcattcacagctggctcgacatagaagaattcatactgcaaagaaaacttataaatgtaatgagtgtggcaagaccttcagtcacaagtcatcccttgtatgccatcatagacttcatggtggagagaaatcttacaaatgtaaggtttgtgacaaggcttttgtgtggagttcacaactggcaaaacatactagaattgactgtggagaaaaaccttacaagtgtaatgaatgtgggaagacctttggtcaaaattcagatcttttaattcataagtcaattcatactggggagcaaccttacaaatgtgatgaatgtgaaaaggttttcagtcgtaaatcaagccttgagacacataagataggtcatactggagagaaaccatacaaatgtaaggtttgtgacaaggcttttgcgtgtcattcctatctggcaaaacatactagaattcatagtggagagaaaccttacaagtgtaatgagtgcagcaagaccttcagtcacaggtcataccttgtatgccatcatagagttcatagtggtgagaaaccttacaagtgtaatgagtgcagcaagaccttcagtcgcaggtcatcccttcattgccatcgtagacttcatagtggtgagaaaccttacaagtgtaatgagtgtggcaataccttccgtcactgctcatcccttatataccatcgtagacttcatactggagagaaatcttacaaatgtacaatttgtgacaaggctttcgtgcgtaattcactcctgtcaagacataccagaattcacactgcagagaaaccttacaagtgtaatgaatgtgggaaggcttttaatcaacaatcacacctttcacgtcatcatagaattcatactggagagaaaccttagaaatgtgaagcatgtgacaaagtttccatttggaaatcacaccttaaagacataggagaatttatactggagagaaagcttacaaatgtaaggtttctgacaagacttgggagtgattcacacctggaacaacatactggacttcacactggagagaaaccttacaagtgtaatgagtgtggcaaagcctttggcaagcagtcaacacttattcaccatcaggcaattcatggtgtagggaaacttgactaatgtaatgattgtcacaaagtcttcagtaatgctacaacgattacaaatcattggagaatccataatgaagagagatcttacaagtgtaataaatgtggcaaatttttcagagatcgttcacatattgcaggtcatcggtgaactcatactggagagaaaccttacaaatgtcatgactgtgccaaggtcttcagtcaagcttcatcctatgcaaaacataggagaatttatacaggagagaaacctcacaagtgtgatgattgtggcaaagcctttgcttcacgttcacacgtcattagacatcagagaatctatactggacagaaatcttacaaatgtcatcagtgtggcaaggtcttcagtccaagatcactccatgcagaacatcagaaaattcatttttgagataaccgttcccaatgaaatgagtatagcaaaccatcaagcattaattgacattggagtcaattcagcattgacttgagtttgtgttgacttaacattgagttcaagcctttattgacattcaagtgtttatgttaagaggatggggccaggtgtggtggctccgacctgtaatcccagcacgtcgggaggccaaggcacataggtcacttgaggtcaggagtttgaaaccagcatggccaacagatgtgagccacttttctcagcctgttttttgtttcttattttctattatttttttgagccagtactttttaaagagatagtacttttttcagttagtactttttgaaagggatatatcatagtaatttttaaaagggatatgaggccaggcacggaggctcatgcctataatcccagcactttgggaggccgaggcaggcagatcacggggtcaggagatcgagactttcctggctaacagggtgaatccctgtctctactaaaaatacaaaaaattagctgggcatggtggctggcgcctgtagtcccagctactccagatgctgaggcaggagaatggcatgaacctgtgaggcggagcttgcagggagtcgagatcgcaccactgggctccagcctgggcgacagagtgagagtctatctcaaaaaaaaaaaaaaaaaaaaggatatcaaagcctcggtacgtggtggctcatccctgcaatcagagtactttggtcgacccatgtgaactggtcacctaaggtcacaatttcaaaagcaccctaacatggtgaaaccccatctctactaaaaatacaaaagttagccgggggtgttggtgtgcacctttagttccagctacttgggaggctggggcatgagaattgcttaaacctaggaggtagaagttgcagtgaaccaaaattgtgccactatactgcagcctgggtggcagagtgagtctccatctcaaacaaacaaaaaataacaaaaaaagacctcaaaaatgcttttcttctcgtataatggacttccttctttttctttctggttcctcttcatttctctctttattttttatttatttatttatttattttgcagtttgagtttgagataaatctaagttataaaagttgtatttcttaatacataatgacttctgaaagatgcctttgcagcatcctataatcagctcacatcattcgtttctgtacttgtatattttccagttattttccggttgaccccagaattcgttagatttttttaaaaaacaatttcaaaatagttgctgttttaaattagttgcatccagttcatatcaatgtctgcatgctttctagtctttgttatttattgaaaacctttggtacctaaacttaagtttgattgtttcagtgtgtacttggtaaatatgtcagtggccttttaactaaacatcaaaatgtactttaa

SEQ ID NO: 203200 - DNA, 2546 bp, Homo sapiens
  Payload ID: 20071
  Gene Name: zinc finger protein 611
  ENST ID: ENST00000601249
  CDS Start-End: 77-346
agccagggagttgaaggctgcagtgagccctgtttttgccaccacactccagcttgggattgattcctaaagactcatgttacgtgaggaagcagctcagaagaggaaaggaaaggagccaggcatggctcttcctcagggacgcttgactttccgggatgtggctatagaattctcattggcagagtggaaatgcctgaacccttcacagagggctttgtacagggaagtgatgttggagaactacaggaacctggaggctgtggagtctcactttgtcacccaggctggagtgcagtggtgtgatcctggctcactgcaacctctacctcccaggtttaagtgattcttgtgcttcagcctcctgaatagctgtgactacaggcatgggccaccatacctggctaatttttatatctcttccaaatgcatgatgaaggaggtcttgtcaacagggcaaggcaatacagaagtgatccacacagggacattgcaaagacatgaaagtcatcacattggagatttttgcttccaggaaattgagaaagaaattcatgacattgagtttcagtgtcaagaagatgaaagaaatggccttgaagcacccatgacaaaaataaaaaagttgactggtagcacagaccaacatgatcacaggcatgctggaaacaagcctattaaagatcagcttggatcaagcttttattcacatctgcctgaactccacatatttcagatcaaaggtgaaattggtaatcaacttgagaagtctactaatgatgctccctcagtttcaacattccaaagaatttcctgtaggccccaaacccagatttctaataactatgggaataatcccctgaattcttcattactcccacaaaaacaggaagtacacatgagagaaaaatctttccaatgtaataagagtggcaaagcctttaattgtagctcactcttaaggaaacaccagataccccatttaggagacaaacaatataaatgtgatgtatgtggcaagctctttaatcacgagcaataccttgcatgccatgatagatgtcacactgttgagaaaccttacaagtgtaaagagtgtggcaagaccttcagtcaggagtcatcccttacctgccatcgtagacttcatactggagtaaaacgttacaattgtaatgagtgtggcaagatctttggtcaaaattcagcccttctaattgataaggcaattgatactggagaaaatccttacaagtgtaatgaatgtgacaaggcttttaatcaacaatcacaactttcacatcatagaattcatactggagagaaaccttacaaatgtgaagaatgtgacaaagttttcagtcggaaatcaaccattgagacacataagagaattcatactggagagaaaccatacagatgtaaggtttgtgacacagctttcacgtggcattcacagctggctcgacatagaagaattcatactgcaaagaaaacttataaatgtaatgagtgtggcaagaccttcagtcacaagtcatcccttgtatgccatcatagacttcatggtggagagaaatcttacaaatgtaaggtttgtgacaaggcttttgtgtggagttcacaactggcaaaacatactagaattgactgtggagaaaaaccttacaagtgtaatgaatgtgggaagacctttggtcaaaattcagatcttttaattcataagtcaattcatactggggagcaaccttacaaatgtgatgaatgtgaaaaggttttcagtcgtaaatcaagccttgagacacataagataggtcatactggagagaaaccatacaaatgtaaggtttgtgacaaggcttttgcgtgtcattcctatctggcaaaacatactagaattcatagtggagagaaaccttacaagtgtaatgagtgcagcaagaccttcagtcacaggtcataccttgtatgccatcatagagttcatagtggtgagaaaccttacaagtgtaatgagtgcagcaagaccttcagtcgcaggtcatcccttcattgccatcgtagacttcatagtggtgagaaaccttacaagtgtaatgagtgtggcaataccttccgtcactgctcatcccttatataccatcgtagacttcatactggagagaaatcttacaaatgtacaatttgtgacaaggctttcgtgcgtaattcactcctgtcaagacataccagaattcacactgcagagaaaccttacaagtgtaatgaatgtgggaaggcttttaatcaacaatcacacctttcacgtcatcatagaattcatactggagagaaaccttagaaatgtgaagcatgtgacaaagtttccatttggaaatcacaccttaaagacataggagaatttatactggagagaaagcttacaaatgtaaggtttctgacaagacttgggagtgattcacacctggaacaacatactggacttcacactggagagaaaccttacaagtgtaatgagtgtggcaaagcctttggcaagcagtcaa

SEQ ID NO: 203201 - DNA, 3299 bp, Homo sapiens
  Payload ID: 20071
  Gene Name: zinc finger protein 611
  Uniprot ID: Q8N823
  ENST ID: ENST00000602162
  CDS Start-End: 62-1972
aaacccggaagcggatcgggtggagtgtaggtcatatcgccgcgatatctcttccaaatgcatgatgaaggaggtcttgtcaacagggcaaggcaatacagaagtgatccacacagggacattgcaaagacatgaaagtcatcacattggagatttttgcttccaggaaattgagaaagaaattcatgacattgagtttcagtgtcaagaagatgaaagaaatggccttgaagcacccatgacaaaaataaaaaagttgactggtagcacagaccaacatgatcacaggcatgctggaaacaagcctattaaagatcagcttggatcaagcttttattcacatctgcctgaactccacatatttcagatcaaaggtgaaattggtaatcaacttgagaagtctactaatgatgctccctcagtttcaacattccaaagaatttcctgtaggccccaaacccagatttctaataactatgggaataatcccctgaattcttcattactcccacaaaaacaggaagtacacatgagagaaaaatctttccaatgtaataagagtggcaaagcctttaattgtagctcactcttaaggaaacaccagataccccatttaggagacaaacaatataaatgtgatgtatgtggcaagctctttaatcacgagcaataccttgcatgccatgatagatgtcacactgttgagaaaccttacaagtgtaaagagtgtggcaagaccttcagtcaggagtcatcccttacctgccatcgtagacttcatactggagtaaaacgttacaattgtaatgagtgtggcaagatctttggtcaaaattcagcccttctaattgataaggcaattgatactggagaaaatccttacaagtgtaatgaatgtgacaaggcttttaatcaacaatcacaactttcacatcatagaattcatactggagagaaaccttacaaatgtgaagaatgtgacaaagttttcagtcggaaatcaaccattgagacacataagagaattcatactggagagaaaccatacagatgtaaggtttgtgacacagctttcacgtggcattcacagctggctcgacatagaagaattcatactgcaaagaaaacttataaatgtaatgagtgtggcaagaccttcagtcacaagtcatcccttgtatgccatcatagacttcatggtggagagaaatcttacaaatgtaaggtttgtgacaaggcttttgtgtggagttcacaactggcaaaacatactagaattgactgtggagaaaaaccttacaagtgtaatgaatgtgggaagacctttggtcaaaattcagatcttttaattcataagtcaattcatactggggagcaaccttacaaatgtgatgaatgtgaaaaggttttcagtcgtaaatcaagccttgagacacataagataggtcatactggagagaaaccatacaaatgtaaggtttgtgacaaggcttttgcgtgtcattcctatctggcaaaacatactagaattcatagtggagagaaaccttacaagtgtaatgagtgcagcaagaccttcagtcacaggtcataccttgtatgccatcatagagttcatagtggtgagaaaccttacaagtgtaatgagtgcagcaagaccttcagtcgcaggtcatcccttcattgccatcgtagacttcatagtggtgagaaaccttacaagtgtaatgagtgtggcaataccttccgtcactgctcatcccttatataccatcgtagacttcatactggagagaaatcttacaaatgtacaatttgtgacaaggctttcgtgcgtaattcactcctgtcaagacataccagaattcacactgcagagaaaccttacaagtgtaatgaatgtgggaaggcttttaatcaacaatcacacctttcacgtcatcatagaattcatactggagagaaaccttagaaatgtgaagcatgtgacaaagtttccatttggaaatcacaccttaaagacataggagaatttatactggagagaaagcttacaaatgtaaggtttctgacaagacttgggagtgattcacacctggaacaacatactggacttcacactggagagaaaccttacaagtgtaatgagtgtggcaaagcctttggcaagcagtcaacacttattcaccatcaggcaattcatggtgtagggaaacttgactaatgtaatgattgtcacaaagtcttcagtaatgctacaacgattacaaatcattggagaatccataatgaagagagatcttacaagtgtaataaatgtggcaaatttttcagagatcgttcacatattgcaggtcatcggtgaactcatactggagagaaaccttacaaatgtcatgactgtgccaaggtcttcagtcaagcttcatcctatgcaaaacataggagaatttatacaggagagaaacctcacaagtgtgatgattgtggcaaagcctttgcttcacgttcacacgtcattagacatcagagaatctatactggacagaaatcttacaaatgtcatcagtgtggcaaggtcttcagtccaagatcactccatgcagaacatcagaaaattcatttttgagataaccgttcccaatgaaatgagtatagcaaaccatcaagcattaattgacattggagtcaattcagcattgacttgagtttgtgttgacttaacattgagttcaagcctttattgacattcaagtgtttatgttaagaggatggggccaggtgtggtggctccgacctgtaatcccagcacgtcgggaggccaaggcacataggtcacttgaggtcaggagtttgaaaccagcatggccaacagatgtgagccacttttctcagcctgttttttgtttcttattttctattatttttttgagccagtactttttaaagagatagtacttttttcagttagtactttttgaaagggatatatcatagtaatttttaaaagggatatgaggccaggcacggaggctcatgcctataatcccagcactttgggaggccgaggcaggcagatcacggggtcaggagatcgagactttcctggctaacagggtgaatccctgtctctactaaaaatacaaaaaattagctgggcatggtggctggcgcctgtagtcccagctactccagatgctgaggcaggagaatggcatgaacctgtgaggcggagcttgcagggagtcgagatcgcaccactgggctccagcctgggcgacagagtgagagtctatctc

SEQ ID NO: 203202 - DNA, 738 bp, Homo sapiens
  Payload ID: 20071
  Gene Name: zinc finger protein 611
  ENST ID: ENST00000598639
  CDS Start-End: 156-398
gcggatcgggtggagtgtaggtcatatcgccgcgatatctcttccaaatgcttgatgaaaaaggtgggaggatcacttgagccagggagttgaaggctgcagtgagccctgtttttgccaccacactccagcttgggattgattcctaaagactcatgttacgtgaggaagcagctcagaagaggaaaggaaaggagccaggcatggctcttcctcagggacgcttgactttccgggatgtggctatagaattctcattggcagagtggaaatgcctgaacccttcacagagggctttgtacagggaagtgatgttggagaactacaggaacctggaggctgtggagacggggtttcactgtgttagccaggatggtctcaatctcctgacctcgtgatccgtctgactcggcctcccaaagtggtgggattacaggcttgagccaaggcgcctggcctaatgctgtgtattttcttggcctcatacatcagaagatatctcttccaaatgcatgatgaaggaggtcttgtcaacagggcaaggcaatacagaagtgatccacacagggacattgcaaagacatgaaagtcatcacattggagatttttgcttccaggaaattgagaaagaaattcatgacattgagtttcagtgtcaagaagatgaaagaaatggccttgaagcacccatgacaaaaataaaaaagttgactggtagcacagaccaacatgatcaca

SEQ ID NO: 203203 - DNA, 565 bp, Homo sapiens
  Payload ID: 20071
  Gene Name: zinc finger protein 611
  ENST ID: ENST00000598723
  CDS Start-End: 69-263
aacgcaaacccggaagcggatcgggtggagtgtaggtcatatcgccgcggattgattcctaaagactcatgttacgtgaggaagcagctcagaagaggaaaggaaaggagccaggcatggctcttcctcagggacgcttgactttccgggatgtggctatagaattctcattggcagagtggaaatgcctgaacccttcacagagggctttgtacagggaagtgatgttggagaactacaggaacctggaggctgtgggctgaagtgcaatggcacaatctgagttcaccgcaacctccacctcccggattcaaatggttctcctgcctcagcctcccgagaagctgggattacagatatctcttccaaatgcatgatgaaggaggtcttgtcaacagggcaaggcaatacagaagtgatccacacagggacattgcaaagacatgaaagtcatcacattggagatttttgcttccaggaaattgagaaagaaattcatgacattgagtttcagtgtcaagaagatgaaagaaatggccttgaagcacccatgacaaaaataaaa

SEQ ID NO: 203204 - DNA, 3419 bp, Homo sapiens
  Payload ID: 20072
  Gene Name: zinc finger protein 613
  Uniprot ID: Q6PF04
  ENST ID: ENST00000293471
  CDS Start-End: 680-2533
aaaataaatgaaacttgggcgcaggatttaggtgccaaaatatggagttcttcaccgtcccgcgctatccctgaatacttgggcagaaaaggtccactttaccttccgtacgtgcaggattcaaagatggctgcctccagtatccgtgacgagaggacgcgaacttactacctcccagtcgtccgtgctccgtacacctgcaacttcagaccttcctcggccgccgtaggccggcttggaggctgggggagggcccagaagtggaataattcaggaaagtgcaggttctgggaagtctcggtgggttccccgcaaaatcagagatggcatctcactatgttgcccaggctgatcttgaactcctgacctcaagtgatcctctctccttggcctcctaaagtgctgggattccaggtgtgagccacttcacccagccacatttatccatcttgtaaaatattgctttgttttttggtgcatttcaaacccacaggtcctgacttcaggagcaagacacttcaagtgaggtgaggaggaggttccaggacctggataccatcctttgcagggatgtaattcaccagagaccaagatttctagccagaaattgagggcagctcaaggagagactacagacacagcatcctacttactggctatttcccagtaacaaaagaaaatgatcaagtcccaggaatcactgaccctggaggatgtggctgtggagttcacttgggaggagtggcagctcctcggccctgctcagaaggacctgtaccgagacgtgatgttggagaactatagcaacctcgtgtcagtggggtatcaagccagcaaaccagatgcactcttcaagttggaacaaggagagccatggacagtagaaaatgaaatccacagccaaatctgtccagaaatcaagaaagttgacaatcatctacagatgcactcacaaaagcaaagatgtctgaagagagtggaacaatgccataaacataatgcatttggaaacatcattcatcagaggaaaagtgattttcctttaaggcaaaatcatgatacatttgacttacatgggaaaatactgaaatcaaatttaagtttagtcaaccagaacaaaaggtatgaaatcaagaattctgtgggggttaatggagatgggaaatccttccttcatgccaagcatgaacaatttcataatgaaatgaacttccccgaaggtggaaattctgtgaatacaaattcacaattcattaagcatcagcgaactcaaaacatagataaaccccatgtatgcactgagtgtgggaaggctttcctcaagaagtctcgcctcatctatcatcagagagttcacactggggagaaacctcatggatgcagtatatgtgggaaagccttctccagaaagtccgggctcactgaacaccagagaaaccacacaggagagaaaccctatgaatgcactgaatgtgacaaagcattccgctggaaatcacagctcaatgcacaccagaaaattcatacaggagagaagtcatatatatgcagtgattgtggaaaaggcttcatcaagaagtctcggctcattaatcatcagagagttcatacaggagagaaaccacatggatgcagcctgtgtgggaaggccttctccaaaaggtccaggctcactgaacaccagagaactcatacaggagagaaaccctatgaatgcactgaatgtgacaaagcattccgctggaaatcacagctcaatgcacatcagaaagctcacacaggagagaagtcatatatatgccgtgattgtggaaaaggcttcattcagaagggaaatctcattgtacatcagcgaattcatactggagaaaaaccctatatatgcaatgaatgtggaaaaggcttcatccaaaagggcaacctccttattcatcgacgtactcacactggagagaaaccctatgtatgcaatgaatgtgggaaaggcttcagccagaagacatgtttaatatcccatcagagatttcacacaggaaagacaccctttgtatgtactgagtgtggaaaatcctgctcacacaagtcaggtctcattaaccaccagagaattcacacaggagagaaaccctatacatgcagtgactgtgggaaagctttcagagataaatcatgtctcaacagacatcggagaactcatacaggggagagaccgtatggatgctctgattgtgggaaagctttctcccacttgtcatgccttgtttatcataagggaatgctgcatgcaagagagaaatgtgtaggttcagtcaaattggaaaatccttgctcagagagtcatagcttatcacatacacgtgatctcatacaggataaagactctgttaacatggtgactctgcagatgccttctgtggcagctcagacctcattaactaacagtgcgttccaagcagagagcaaagtagccattgtgagccagcctgttgccagaagttcagtctcagcagatagtagaatttgcacagaataaaaaccatatgaatgcagtgaatgtggtagtgctttcagtgatcaattacatcatatgtcacaaaaaacacagaggaacaaactgatatattcaaggtggaaagcccttgaataaaaccttatggctaataagcatatactcagagaaaaatagtatgaagtggagactgggaaattcttttatgggaagatagatcttctcatcagtgaccatagatcacatcttcagtgagcttatagttggtagaaatataatgatcatggaaaagtccttgttcagaaacagtacgccagtaggtatcagggggtttacacaggagagaaacttttggaagacctttgaaggctatgaatgtggcagggttgctagtggtacattctgccttatcctcagagggaatcatatagaaataaaactatgaaaatgtaactagaacatcttcatcaaaatatgaaagaacacacgaagcaaataagccctgtgaaaaggagtattttagagatttcgatcagaaatctaacatcattatatggcagataatatacaggatgtgtattttaggacaatataccttgaatcactagttgatatgtcaatgactaattaaaaggggttgtcagtgttacacatcattggttaaatttatagcacaatgtacctcttcccccttttttgataagagtcttctattcccaaccaagatcattatatgattagctcttgtgtttctttgattccaaatttcttcacttgttatttcagactactgaagctcttcaaaaggaaaaatgtatttaatttaataatgtaacacaacaagtttggatgtgtttaactttataaataatcaccccagaggaatgaagttcaaaacttgtgaataacc

SEQ ID NO: 203205 - DNA, 2225 bp, Homo sapiens
  Payload ID: 20072
  Gene Name: zinc finger protein 613
  Uniprot ID: Q6PF04
  ENST ID: ENST00000391794
  CDS Start-End: 465-2210
ctcggccgccgtaggccggcttggaggctgggggagggcccagaagtggaataattcaggaaagtgcaggttctgggaagtctcggtgggttccccgcaaaatcaggcttgagtgcagtggcgcaatcgtggctcactgcagcctccatctcccggggctcaggtgattttcccacctcagctttcccgagtagctgggactacagagatggcatctcactatgttgcccaggctgatcttgaactcctgacctcaagtgatcctctctccttggcctcctaaagtgctgggattccaggtgtgagccacttcacccagccacatttatccatcttgtaaaatattgctttgttttttggtgcatttcaaagaatcactgaccctggaggatgtggctgtggagttcacttgggaggagtggcagctcctcggccctgctcagaaggacctgtaccgagacgtgatgttggagaactatagcaacctcgtgtcagtggggtatcaagccagcaaaccagatgcactcttcaagttggaacaaggagagccatggacagtagaaaatgaaatccacagccaaatctgtccagaaatcaagaaagttgacaatcatctacagatgcactcacaaaagcaaagatgtctgaagagagtggaacaatgccataaacataatgcatttggaaacatcattcatcagaggaaaagtgattttcctttaaggcaaaatcatgatacatttgacttacatgggaaaatactgaaatcaaatttaagtttagtcaaccagaacaaaaggtatgaaatcaagaattctgtgggggttaatggagatgggaaatccttccttcatgccaagcatgaacaatttcataatgaaatgaacttccccgaaggtggaaattctgtgaatacaaattcacaattcattaagcatcagcgaactcaaaacatagataaaccccatgtatgcactgagtgtgggaaggctttcctcaagaagtctcgcctcatctatcatcagagagttcacactggggagaaacctcatggatgcagtatatgtgggaaagccttctccagaaagtccgggctcactgaacaccagagaaaccacacaggagagaaaccctatgaatgcactgaatgtgacaaagcattccgctggaaatcacagctcaatgcacaccagaaaattcatacaggagagaagtcatatatatgcagtgattgtggaaaaggcttcatcaagaagtctcggctcattaatcatcagagagttcatacaggagagaaaccacatggatgcagcctgtgtgggaaggccttctccaaaaggtccaggctcactgaacaccagagaactcatacaggagagaaaccctatgaatgcactgaatgtgacaaagcattccgctggaaatcacagctcaatgcacatcagaaagctcacacaggagagaagtcatatatatgccgtgattgtggaaaaggcttcattcagaagggaaatctcattgtacatcagcgaattcatactggagaaaaaccctatatatgcaatgaatgtggaaaaggcttcatccaaaagggcaacctccttattcatcgacgtactcacactggagagaaaccctatgtatgcaatgaatgtgggaaaggcttcagccagaagacatgtttaatatcccatcagagatttcacacaggaaagacaccctttgtatgtactgagtgtggaaaatcctgctcacacaagtcaggtctcattaaccaccagagaattcacacaggagagaaaccctatacatgcagtgactgtgggaaagctttcagagataaatcatgtctcaacagacatcggagaactcatacaggggagagaccgtatggatgctctgattgtgggaaagctttctcccacttgtcatgccttgtttatcataagggaatgctgcatgcaagagagaaatgtgtaggttcagtcaaattggaaaatccttgctcagagagtcatagcttatcacatacacgtgatctcatacaggataaagactctgttaacatggtgactctgcagatgccttctgtggcagctcagacctcattaactaacagtgcgttccaagcagagagcaaagtagccattgtgagccagcctgttgccagaagttcagtctcagcagatagtagaatttgcacagaataaaaaccatatgaatgc

SEQ ID NO: 203206 - DNA, 542 bp, Homo sapiens
  Payload ID: 20072
  Gene Name: zinc finger protein 613
  ENST ID: ENST00000600853
  CDS Start-End: 261-542
ccagaagtggaataattcaggaaagtgcaggttctgggaagtctcggtgggttccccgcaaaatcagcccacaggtcctgacttcaggagcaagacacttcaagtgaggtgaggaggaggttccaggacctggataccatcctttgcagggatgtaattcaccagagaccaagatttctagccagaaattgagggcagctcaaggagagactacagacacagcatcctacttactggctatttcccagtaacaaaagaaaatgatcaagtcccaggaatcactgaccctggaggatgtggctgtggagttcacttgggaggagtggcagctcctcggccctgctcagaaggacctgtaccgagacgtgatgttggagaactatagcaacctcgtgtcagtggggtatcaagccagcaaaccagatgcactcttcaagttggaacaaggagagccatggacagtagaaaatgaaatccacagccaaatctgtccagaaatcaagaaagttgacaatcatctacagatgcactcacaaaagcaa

SEQ ID NO: 203207 - DNA, 606 bp, Homo sapiens
  Payload ID: 20072
  Gene Name: zinc finger protein 613
  ENST ID: ENST00000599683
  CDS Start-End: 352-606
ggccggcttggaggctgggggagggcccagaagtggaataattcaggaaagtgcaggttctgggaagtctcggtgggttccccgcaaaatcagagatggcatctcactatgttgcccaggctgatcttgaactcctgacctcaagtgatcctctctccttggcctcctaaagtgctgggattccaggtgtgagccacttcacccagccacatttatccatcttgtaaaatattgctttgttttttggtgcatttcaaagaatcactgaccctggaggatgtggctgtggagttcacttgggaggagtggcagctcctcggccctgctcagaaggacctgtaccgagacgtgatgttggagaactatagcaacctcgtgtcagtggggtatcaagccagcaaaccagatgcactcttcaagttggaacaaggagagccatggacagtagaaaatgaaatccacagccaaatctgtccagaaatcaagaaagttgacaatcatctacagatgcactcacaaaagcaaagatgtctgaagagagtggaacaatgccataaacataatgcatttggaaacatcattcatcagaggaaaagtgattttcct

SEQ ID NO: 203208 - DNA, 2100 bp, Homo sapiens
  Payload ID: 20072
  Gene Name: zinc finger protein 613
  Uniprot ID: Q6PF04
  ENST ID: ENST00000613007
  CDS Start-End: 228-2081
aactggtgctttgttttttgaacctggagttcagcccacaggtcctgacttcaggagcaagacacttcaagtgaggtgaggaggaggttccaggacctggataccatcctttgcagggatgtaattcaccagagaccaagatttctagccagaaattgagggcagctcaaggagagactacagacacagcatcctacttactggctatttcccagtaacaaaagaaaatgatcaagtcccaggaatcactgaccctggaggatgtggctgtggagttcacttgggaggagtggcagctcctcggccctgctcagaaggacctgtaccgagacgtgatgttggagaactatagcaacctcgtgtcagtggggtatcaagccagcaaaccagatgcactcttcaagttggaacaaggagagccatggacagtagaaaatgaaatccacagccaaatctgtccagaaatcaagaaagttgacaatcatctacagatgcactcacaaaagcaaagatgtctgaagagagtggaacaatgccataaacataatgcatttggaaacatcattcatcagaggaaaagtgattttcctttaaggcaaaatcatgatacatttgacttacatgggaaaatactgaaatcaaatttaagtttagtcaaccagaacaaaaggtatgaaatcaagaattctgtgggggttaatggagatgggaaatccttccttcatgccaagcatgaacaatttcataatgaaatgaacttccccgaaggtggaaattctgtgaatacaaattcacaattcattaagcatcagcgaactcaaaacatagataaaccccatgtatgcactgagtgtgggaaggctttcctcaagaagtctcgcctcatctatcatcagagagttcacactggggagaaacctcatggatgcagtatatgtgggaaagccttctccagaaagtccgggctcactgaacaccagagaaaccacacaggagagaaaccctatgaatgcactgaatgtgacaaagcattccgctggaaatcacagctcaatgcacaccagaaaattcatacaggagagaagtcatatatatgcagtgattgtggaaaaggcttcatcaagaagtctcggctcattaatcatcagagagttcatacaggagagaaaccacatggatgcagcctgtgtgggaaggccttctccaaaaggtccaggctcactgaacaccagagaactcatacaggagagaaaccctatgaatgcactgaatgtgacaaagcattccgctggaaatcacagctcaatgcacatcagaaagctcacacaggagagaagtcatatatatgccgtgattgtggaaaaggcttcattcagaagggaaatctcattgtacatcagcgaattcatactggagaaaaaccctatatatgcaatgaatgtggaaaaggcttcatccaaaagggcaacctccttattcatcgacgtactcacactggagagaaaccctatgtatgcaatgaatgtgggaaaggcttcagccagaagacatgtttaatatcccatcagagatttcacacaggaaagacaccctttgtatgtactgagtgtggaaaatcctgctcacacaagtcaggtctcattaaccaccagagaattcacacaggagagaaaccctatacatgcagtgactgtgggaaagctttcagagataaatcatgtctcaacagacatcggagaactcatacaggggagagaccgtatggatgctctgattgtgggaaagctttctcccacttgtcatgccttgtttatcataagggaatgctgcatgcaagagagaaatgtgtaggttcagtcaaattggaaaatccttgctcagagagtcatagcttatcacatacacgtgatctcatacaggataaagactctgttaacatggtgactctgcagatgccttctgtggcagctcagacctcattaactaacagtgcgttccaagcagagagcaaagtagccattgtgagccagcctgttgccagaagttcagtctcagcagatagtagaatttgcacagaataaaaaccatatgaatgcagtg

SEQ ID NO: 203209 - DNA, 4818 bp, Homo sapiens
  Payload ID: 20073
  Gene Name: zinc finger protein 614
  Uniprot ID: Q8N883
  ENST ID: ENST00000270649
  CDS Start-End: 546-2303
gtgttggccttggctgggcacccgactcttgagtgtcccttgcaacgaagagagaaaggcactgaggtgactaagagtgattcccacagccattatggccgctcctgtcagaaacgctgcgatgggcgcagccctgtgacctcatagagcggcgcccgcagtctgaactcgcgatcccgggcaggctccgtggtcctcgcctcgcttcacggtctttaccgctcagcttcccggagtccgcgcaggagcgcgtctgaataggaagcgttttcggacgtggatgcggcgttttgtcgctgccagtggtgtctggagaggttcgggctcggtcctcaggtcctggctcccagaagcaaaataactcaagtgaagcaatgaaggaagaagaaggaggttgctggccttggatatcataatttctggggacaactttaagtggacactaatatttctgactaggaaaacttcaaaaacttcatggcaaatgcagaagagacaaagacgtatagtccatgttatccactattttctgagcacagaagaaaatgatcaagacccaggaatcactgaccctggaggatgtggctgtggaattcagctgggaggagtggcagctcctggacactgctcagaagaacctgtaccgggatgtgatggtggagaactataaccacctagtatcactggggtatcaaactagcaaaccagatgtactctccaagttggcacatggacaagaaccatggacaacagatgctaaaattcagaataaaaattgtccaggaatcgggaaagttgacagtcatctgcaagagcactctccaaaccaaagacttctgaagagcgtgcagcaatgcaatggacagaatacacttagaaatattgtacatctcagcaagacacattttcctatagtgcaaaatcatgatacatttgacttgtacagaaaaaatttgaaatcaagtttaagtttaatcaaccagaagagaagacatggaataaataaccctgttgagtttattggaggtgagaaaacacttctacatggtaagcatgaacgtacgcatactaaaactagattttctgaaaatgcaaaatgtatccatactaaattccaagtcttcaagcatcagaggactcagaaaattgagaaaccccatgcatgcattgaatgtgagcaaaccttccttaggaagtctcagctcatttaccatgagaacatttgtatacaagagaatcctggaagtggtcaatgtgagaaattatccagaagtgtcctgttcactaagcatctgaaaactaatacaacagacaaaatctgtatacccaatgaatatagaaaaggctctactgtgaagagtagtctcattacacatcaacaaacccatacagaagagaaatcctatatgtgcagtgagtgtggaaagggctttacaatgaagcgctatctaattgctcatcagcgaactcatagtggagagaaaccttatgtgtgcaaagaatgtggaaaaggtttcactgtgaagagcaatctcattgtacatcagcgaactcatacaggggagaaaccctatatatgcagtgaatgtggaaaaggcttcaccatgaagcgctatcttgttgtacatcagcgaactcatactggagagaaaccctatatgtgcagtgaatgtggaaaaggctttaccgtgaagagcaatctcattgtacatcagcgctcccacacaggagaaaaatcttacatatgcagcgaatgtggaaaaggcttcactgtcaaacgcactctcgttatacatcagcgaactcatacaggagagaaatcttacatatgcaatgaatgtggtaaaggcttcaccacaaagcgcactcttattatacatcagcgaactcatacaggagaaaaaccctatgaatgcaatgaatgtggtaaagccttcagccagaaaatatgcctcatacaacatgagagatgtcatacaggaaagactccctttgtatgtaccgagtgcggaaaatcctattcacacaaatatggcctcattacccatcagagaattcacacaggagagaaaccttatgagtgcaatgaatgtggaaaagccttcaccacaaagtcagtactcaatgtacatcaaagaacgcatacaggagagaggccgtatggatgcagtgattgtgagaaagccttctcccacttatcaaaccttgtcaaacataagaaaatgcacacaagagaaatgggtagaatcagtcaagttgaaaactcctgtaatggagagtcacagctccttccttataagtgaactcatgcagaagaaaaccctactagtgccgtgactatggaaatgccttttgtggcaactcagacttcattaaacatcagtgtgtttctagccaattggaacataaacatggtgctgcctgttgacagatgtgtgtctgtcctcaggaggtgaaataatttgccctagagatcaatttgatgaatacagtaaataaggtagtgcctttagtggtcttttacctcatattttctgtcaatgaaaatacgttgaataaactatattaatgtggagatgttttgagcaataatttctgctcatatgtctgaaaagtatacagagataaattctgtgaatacaaagactaagaaaagtcttctgtggaaagatagactttattatcaggtttcatcatagatttcaacgtaagtgagcttattgttgatagaaacatgatgaccatgacaaagtctttactcagaaatatgacctcagtgagtgtcaaagtttacactggaaaataactttaaggtgacagtattgatggcaggatttcagcgacgcactctgcttcatcatttgtcaggagatcacatagaaagtaaaattgttccgaacatgctatcaaataaatgtggaacacctttagcaaactatcaacagctcatgaaggcatgaaatgtggtgaaaatgatgaatatttgagtgctttttcttaataagtataaccttaaacatcagctaatacacctggtgtgcattttcagtcaggataccttaatcctcatttctagttgccttgccaatgattccataatatactgtctcattactgtttatttttactgttgtgtaaaattgtggtataatgagaaatacatttggtctttgttcctggttcctggcatagagctcctaaaacgcttagaatttcatgagtgataagagttttttggttttgttttgtttttgctgttgttgttattcatagcactgcccttttaattacacctgattatactactgaagtgacttatggttgctcccctagacagcctcagaatggggctgttctctaggaagatcaagtaactagaggatggagactttgtgccccatttctcccacctcctggaaggggaggggtgctggagattagattagacaatgagattaagagaactccaaatagcccaagagggtggtgcacccccaacttcataggggtagaggctcctgagattaggagaaccctttttaggctttactctatgtacctcttcatttgagtgttcatttgcgtcctttataaccagtaaaacaaagtacgctgttttcttgagttttgtgagccctgtagcaaattatcaaacctgagtagggcagtgggaactcggaatttatcaccattcagaactgcaggttgtccttgtgagtggcatctgatgtgggggaagtcttggactgagccccttaacttgtggagtctgcactaatttagactgcactaactaacttgcactgcactaacttggactgcactaacttgtggagtctgcactaacttggagaagttagtgtcagaattgaattatagaacacccagttgttcagaattgaattgtagaacacccaattggtgtgggagaattagagaatttatttgtgtcagaaaatactccagaacaaccaccccatattatgattagctcttttcctttctttggctctgagcttaattgtacattaagcaaacttaagtagaaaagaaactgaatatgttaaatatattaacaacatatttggacttgcttaactaagattatagagatgatcagtttataaaaccaccttcaacttaaataaatttgaactcgaaattgcaaaagcagtctagaggctttgctagtatccttcaaccaatttctagtaaaaatatcctatataaccataattatcaaaaccagaaaaacaacattggtaggatactataaagtactaatcttattttggatttgacgaatttttacatgtttttttcttttttagtttgtactctaagaagttgtattacatgtacagattcgtgtaaccactgcaaccacataaaactaatgaacacaaagtccctcatgctacctttttatgcttacactccatccaaacctaactctgccaaccacttttctcctatcagtataatttcatcatttcatgaatatgataaaaataaaattgtttttgtaaatggtttttataaattttatataaataagttatatgaatttttattgatagagagtatgtaagcttttggcatttttgtcactcagcaaattactcctaaggtttatatgagttgatgaatagttgttttattatttttttttaccaccatgtatctaaccagatgaaagttgtttatatttgagagtagtatacatatttgatgtagtagtttatccattcacctatgagatatatttgcactgttttcctggttttaagtgctataaataaagatgctgtgaaatct

SEQ ID NO: 203210 - DNA, 1293 bp, Homo sapiens
  Payload ID: 20073
  Gene Name: zinc finger protein 614
  Uniprot ID: Q8N883
  ENST ID: ENST00000356322
  CDS Start-End: 325-921
ctcagcttcccggagtccgcgcaggagcgcgtctgaataggaagcgttttcggacgtggatgcggcgttttgtcgctgccagtggtgtctggagaggttcgggctcggtcctcaggtcctggctcccagaagcaaaataactcaagtgaagcaatgaaggaagaagaaggaggttgctggccttggatatcataatttctggggacaactttaagtggacactaatatttctgactaggaaaacttcaaaaacttcatggcaaatgcagaagagacaaagacgtatagtccatgttatccactattttctgagcacagaagaaaatgatcaagacccaggaatcactgaccctggaggatgtggctgtggaattcagctgggaggagtggcagctcctggacactgctcagaagaacctgtaccgggatgtgatggtggagaactataaccacctagtatcactggggtatcaaactagcaaaccagatgtactctccaagttggcacatggacaagaaccatggacaacagatgctaaaattcagaataaaaattgtccaggaatcgggaaagttgacagtcatctgcaagagcactctccaaaccaaagacttctgaagagcgtgcagcaatgcaatggacagaatacacttagaaatattgtacatctcagcaagacacattttcctatagtgcaaaatcatgatacatttgacttgtacagaaaaaatttgaaatcaagtttaagtttaatcaaccagaagagaagacatggaataaataaccctgttgagtttattggagagacagggtctcttgagaggccgaggcaggcggatcacttgaggtcagaagttcaagaccagcctggccaacgtggcgaaaccctgtgtctactaaaaatacacacaaaaaattagctgggtatggtgctgggctgttgggagccgaaggcccatgggatgtgaccaactcagcattccactggaggctatatgatcaaacagcaaactttatcatgaatgcacgatgtgggcaaactcatgactgcttccgctgccagaaggtttgctgagggcaatcgcttcctggtgctgagctccttgaggttatctactgggacatctagagaatgccatcttgcaaaccctactctggactgagtagctgaccccttcttccacccgccttctcactatctcttttgcctaataaatatggagggctgtgtaaagctcagggcccttgtccactagaggcaaggtgtcccctgatcccttcttccaaatata

SEQ ID NO: 203211 - DNA, 718 bp, Homo sapiens
  Payload ID: 20073
  Gene Name: zinc finger protein 614
  ENST ID: ENST00000597952
  CDS Start-End: 602-718
cttcttaaatttgaacatctctgccctaaattgtggattggtgctcccatcaccattcccacactgtaacaggatggattcagggcagattgtctccagcaatgaatcagacaaaagtgctccaccaaccaggcccttgaatcaccttccttgtcccgtgaatcagcacagcctgccacggcaaagttttatcagcccactcctggaaatgatcagtgaaggtcccatcatgggctgctcatagtcctgtggaccaggtgctaaacttacctaccagagattaacattccagatgaacggggctgaaatttaatcctggatggaatatgttataacactcaagaaatacgaacatgaaattcttattctctagaaattacaaaactcctcaggtcctggctcccagaagcaaaataactcaagtgaagcaatgaaggaagaagaaggaggttgctggccttggatatcataatttctggggacaactttaagtggacactaatatttctgactaggaaaacttcaaaaacttcatggcaaatgcagaagagacaaagacgtatagtccatgttatccactattttctgagcacagaagaaaatgatcaagacccaggaatcactgaccctggaggatgtggctgtggaattcagctgggaggagtggcagctcctggacactgctcagaagaacctgtaccgggatgtgatggtggag

SEQ ID NO: 203212 - DNA, 1031 bp, Homo sapiens
  Payload ID: 20073
  Gene Name: zinc finger protein 614
  ENST ID: ENST00000595189
  CDS Start-End: 313-555
gagtccgcgcaggagcgcgtctgaataggaagcgttttcggacgtggatgcggcgttttgtcgctgccagtggtgtctggagaggttcgggctcggtcctcaggtcctggctcccagaagcaaaataactcaagtgaagcaatgaaggaagaagaaggaggttgctggccttggatatcataatttctggggacaactttaagtggacactaatatttctgactaggaaaacttcaaaaacttcatggcaaatgcagaagagacaaagacgtatagtccatgttatccactattttctgagcacagaagaaaatgatcaagacccaggaatcactgaccctggaggatgtggctgtggaattcagctgggaggagtggcagctcctggacactgctcagaagaacctgtaccgggatgtgatggtggagaactataaccacctagtatcactggggtatcaaactagcaaaccagatgtactctccaagttggcacatggacaagaaccatggacaacagatgctaaaattcagaataaaaattgtccagactgagtctcgctctatcacccaggctggagtgcaatggcccaatctcggcttgctgcaacctcgtcctcctgggatcaagtgattctcctgcctcagcctcctgaatagctgggattacaggaatcgggaaagttgacagtcatctgcaagagcactctccaaaccaaagacttctgaagagcgtgcagcaatgcaatggacagaatacacttagaaatattgtacatctcagcaagacacattttcctatagtgcaaaatcatgatacatttgacttgtacagaaaaaatttgaaatcaagtttaagtttaatcaaccagaagagaagacatggaataaataaccctgttgagtttattggaggtgagaaaacacttctacatggtaagcatgaacgtacgcatactaaaactagattttctgaaaatgcaaaatgtatccatactaaattccaagtcttcaagcatcagaggactcag

SEQ ID NO: 203213 - DNA, 4048 bp, Homo sapiens
  Payload ID: 20074
  Gene Name: zinc finger protein 615
  Uniprot ID: Q8N8J6
  ENST ID: ENST00000376716
  CDS Start-End: 318-2513
aaacgctgggaacgcctccgaccctggatagtcgccgtcaggcactgaggaggccgagagatgaggccggagcccaccaagttctgggaagttctttctgacacaagtaagataacatctctgccatgcccacaggtgctgagaacaagagaaatcaagtgaaggaaggaggcggagtttccaagacttgggtgtcatcatttctggggacatccttgattggagattgaagtttttgaaccgaaatttagagctgattcagaagagacaaatacagaacgtccaagttagcagtcatttcccaaatttaggagacaatgatgcaggcccaggaatccctaacactggaggatgtggctgtggacttcacctgggaggagtggcagttcctgagccctgctcagaaggacctgtaccgggacgtgatgttggagaactacagcaacctggtggcagtggggtatcaagccagcaaaccagatgcactctccaaattggaacgaggagaagaaacttgcacaacagaagatgaaatctactctcgaatctgttctgaaatcaggaaaattgatgatcctctgcagcatcacttgcaaaatcaaagtattcagaagagtgtgaaacagtgccatgaacagaatatgtttggaaatattgttaatcagaacaaaggtcatttcctgctgaagcaagattgtgatacgtttgacttacatgaaaaacctttaaaatcaaatttaagttttgaaaaccagaaaaggagctctggcctaaagaactctgctgagtttaatagagatgggaaatccctttttcatgctaaccataaacaattttatactgaaatgaagtttcctgcaattgcaaaacctattaataagtcccagttcattaagcaacagagaactcacaacatagagaatgcccatgtatgcagtgaatgtgggaaagccttcctcaagttgtctcagtttattgatcatcagagagttcacactggagaaaaacctcatgtatgcagtatgtgtgggaaagctttctccagaaaatccagactaatggaccatcagagaactcatacagaactgaaacattatgaatgcactgaatgtgacaaaaccttcctcaagaaatcacagctcaatatacatcagaaaactcatatgggagggaaaccttacacatgtagccaatgtgggaaagccttcatcaagaagtgtcggctcatttatcatcaacgaactcatacaggagagaaaccccatggatgcagtgtatgtgggaaggccttctctacaaagttcagtctcactacacatcagaaaactcatacaggagaaaaaccttatatatgtagtgaatgtggaaaaggcttcattgagaagaggcgtcttactgcacatcatcgaactcatactggtgagaaaccctttatatgcaataaatgtgggaaaggcttcaccttgaagaacagtcttatcacacatcagcaaactcatacaggagagaaattatatacatgtagtgaatgtggaaaaggcttttcaatgaagcactgtctcatggtacatcaacgaactcatactggagagaaaccttataaatgcaatgagtgtggaaagggcttcgctttgaagagcccactcatcagacatcagcgaacacatactggagagaaaccctatgtatgcaccgaatgtcgaaaaggtttcaccatgaagagtgacctcattgtacatcagcgaactcatactgcagagaagccatatatatgcaatgattgtggaaaaggcttcactgtgaagagccgccttattgtgcatcagcgaactcatactggagaaaaaccctatgtatgtggtgagtgtggaaaaggctttccagcaaagatccggctaatgggacatcaacgaactcatacaggagagaaaccttatatttgcaatgagtgtggaaaaggcttcactgagaagagtcatctcaatgtacatcggcgcactcatacaggagagaaaccctatgtatgcagtgaatgtggcaaaggcttaactgggaaaagcatgctcattgcacatcagcgaactcatactggggagaaaccttatatatgcaatgaatgtggaaagggcttcaccatgaagagtactctcagtatacatcagcaaactcatactggagagaagccatacaaatgcaatgaatgtgataaaaccttcaggaagaagacatgcctcatacaacatcagcgatttcacacaggaaagacttcctttgcatgtactgaatgtggaaaattctctttgcgcaaaaatgatcttattacacatcagagaattcacacaggagagaaaccgtacaaatgcagtgactgcgggaaagccttcactacaaaatcagggctcaatgttcatcaaagaaaacatacaggagagaggccctatggatgtagtgattgtgggaaagcttttgcgcacttgtctatccttgttaaacacaggagaattcacaggtagtcattttgggaaagcctcttgccagatgtaggcccttaagatatctgcaaagaagagtaatttcatgaatgcagactacatggttgtttatttagtgatcagttacttcatgttttgtgtcagagaaaacatgtacaaaacatttgagaaaatattttaggacattatgtctaaaaattgtatactgagaaaaatcctatgaatgtggcagactataaaagcctttggtgggaagataaaccccctcagaagtgatcatagatcatgaataaactactaattcgtggaaatgtaataattataggaacgtctttgcccaaaaataaaacttcaacagattgagagagttcacactggagaaatactttcctctggcaaacccctgtggcagggttttcagtaaaatgttttgcctcatcgtgtgctaggaaataatgcagaaaaaacttatgaaaacattcaatgtagaagacttttaggaaaatatcagagaatttaatgaaggaaagaagccttggcaaaatgatggatgagagctttctgtcacaattctaaccttaacagataatatgcctcatgtgcatttgggaacaggatagcttgagccatattcctagttgccttgtcactgattttatacattttaaattgtgacttcctctaatcacgaactaaaatttaatattgtatataataccggagtattttatgcctgcctcattttattatatgattagctcctgcatttctttggttctaagtttgtgttatttcagaataactaaagtacttcagaatgaaactggatacagtatattcagttcataagtgtaattgaccatacttgaatatgtttaagtttataagtaacatcaggtgttatgaaattaatataaataagatgtttttgtaagtttttattttgaaataagtttagattcacaaaatcttaccaaaatattccagagttcttgcccttaacccagcttcttccaaagataacaacttacataagcatagttcattaccaaatacaggaaagtgaaattgttacaatactgttaactacagaatttatttggaaatcaccagttttaacatgcatgcatttttgtttgttttttatatgtagctttaagaaatcttaacacatatattgattcatgtcaccaccaccgtaatcgagattcagaatgttgcatcaatgcaaactccctcatgctccttgtttatagtcacaacctctcctcagccctaacccttggcaatcagaaatcttttcatctttagttttgtcattagtagcatgttataaaaatggaatcatacagcatgtacccttttggtattggctatttcaactaaagcagattaacctgaaatccatccaagttgttctgcatatcattgttctgtttttattggccactaataatctatgatacgaatataccactatttgtttattcacccactgaaggacattagttttgttcccggtttttcttactgttacaaataaaaatcctatgaac

SEQ ID NO: 203214 - DNA, 2698 bp, Homo sapiens
  Payload ID: 20074
  Gene Name: zinc finger protein 615
  ENST ID: ENST00000391795
  CDS Start-End: 61-2271
aaacgctgggaacgcctccgaccctggatagtcgccgtcaggcactgaggaggccgagagatgaggccggagcccaccaagttctgggaagaatccctaacactggaggatgtggctgtggacttcacctgggaggagtggcagttcctgagccctgctcagaaggacctgtaccgggacgtgatgttggagaactacagcaacctggtggcagtggggtatcaagccagcaaaccagatgcactctccaaattggaacgaggagaagaaacttgcacaacagaagatgaaatctactctcgaatctgttctgaaatcaggaaaattgatgatcctctgcagcatcacttgcaaaatcaaagtattcagaagagtgtgaaacagtgccatgaacagaatatgtttggaaatattgttaatcagaacaaaggtcatttcctgctgaagcaagattgtgatacgtttgacttacatgaaaaacctttaaaatcaaatttaagttttgaaaaccagaaaaggagctctggcctaaagaactctgctgagtttaatagagatgggaaatccctttttcatgctaaccataaacaattttatactgaaatgaagtttcctgcaattgcaaaacctattaataagtcccagttcattaagcaacagagaactcacaacatagagaatgcccatgtatgcagtgaatgtgggaaagccttcctcaagttgtctcagtttattgatcatcagagagttcacactggagaaaaacctcatgtatgcagtatgtgtgggaaagctttctccagaaaatccagactaatggaccatcagagaactcatacagaactgaaacattatgaatgcactgaatgtgacaaaaccttcctcaagaaatcacagctcaatatacatcagaaaactcatatgggagggaaaccttacacatgtagccaatgtgggaaagccttcatcaagaagtgtcggctcatttatcatcaacgaactcatacaggagagaaaccccatggatgcagtgtatgtgggaaggccttctctacaaagttcagtctcactacacatcagaaaactcatacaggagaaaaaccttatatatgtagtgaatgtggaaaaggcttcattgagaagaggcgtcttactgcacatcatcgaactcatactggtgagaaaccctttatatgcaataaatgtgggaaaggcttcaccttgaagaacagtcttatcacacatcagcaaactcatacaggagagaaattatatacatgtagtgaatgtggaaaaggcttttcaatgaagcactgtctcatggtacatcaacgaactcatactggagagaaaccttataaatgcaatgagtgtggaaagggcttcgctttgaagagcccactcatcagacatcagcgaacacatactggagagaaaccctatgtatgcaccgaatgtcgaaaaggtttcaccatgaagagtgacctcattgtacatcagcgaactcatactgcagagaagccatatatatgcaatgattgtggaaaaggcttcactgtgaagagccgccttattgtgcatcagcgaactcatactggagaaaaaccctatgtatgtggtgagtgtggaaaaggctttccagcaaagatccggctaatgggacatcaacgaactcatacaggagagaaaccttatatttgcaatgagtgtggaaaaggcttcactgagaagagtcatctcaatgtacatcggcgcactcatacaggagagaaaccctatgtatgcagtgaatgtggcaaaggcttaactgggaaaagcatgctcattgcacatcagcgaactcatactggggagaaaccttatatatgcaatgaatgtggaaagggcttcaccatgaagagtactctcagtatacatcagcaaactcatactggagagaagccatacaaatgcaatgaatgtgataaaaccttcaggaagaagacatgcctcatacaacatcagcgatttcacacaggaaagacttcctttgcatgtactgaatgtggaaaattctctttgcgcaaaaatgatcttattacacatcagagaattcacacaggagagaaaccgtacaaatgcagtgactgcgggaaagccttcactacaaaatcagggctcaatgttcatcaaagaaaacatacaggagagaggccctatggatgtagtgattgtgggaaagcttttgcgcacttgtctatccttgttaaacacaggagaattcacaggtagtcattttgggaaagcctcttgccagatgtaggcccttaagatatctgcaaagaagagtaatttcatgaatgcagactacatggttgtttatttagtgatcagttacttcatgttttgtgtcagagaaaacatgtacaaaacatttgagaaaatattttaggacattatgtctaaaaattgtatactgagaaaaatcctatgaatgtggcagactataaaagcctttggtgggaagataaaccccctcagaagtgatcatagatcatgaataaactactaattcgtggaaatgtaataattataggaacgtctttgcccaaaaataaaacttcaacagattgagagagttcacactggagaaatactttcctctggcaaacccctgtggcagggttttcagtaaaatgttttgcctcatcgtgtgcta

SEQ ID NO: 203215 - DNA, 4122 bp, Homo sapiens
  Payload ID: 20074
  Gene Name: zinc finger protein 615
  ENST ID: ENST00000599177
  CDS Start-End: 265-561
ctccgaccctggatagtcgccgtcaggcactgaggaggccgagagatgaggccggagcccaccaagttctgggaacccacaggtgctgagaacaagagaaatcaagtgaaggaaggaggcggagtttccaagacttgggtgtcatcatttctggggacatccttgattggagattgaagtttttgaaccgaaatttagagctgattcagaagagacaaatacagaacgtccaagttagcagtcatttcccaaatttaggagacaatgatgcaggcccaggaatccctaacactggaggatgtggctgtggacttcacctgggaggagtggcagttcctgagccctgctcagaaggacctgtaccgggacgtgatgttggagaactacagcaacctggtggcagtggggtatcaagccagcaaaccagatgcactctccaaattggaacgaggagaagaaacttgcacaacagaagatgaaatctactctcgaatctgttctgattcaggaggtgcatcaggaggtgcatatgcaggtttgtctcatggatatattgcctgatgccgaggattcactagaagctcaatcctgtcacccaagtagtgaacatagtaccaaatagaaatcaggaaaattgatgatcctctgcagcatcacttgcaaaatcaaagtattcagaagagtgtgaaacagtgccatgaacagaatatgtttggaaatattgttaatcagaacaaaggtcatttcctgctgaagcaagattgtgatacgtttgacttacatgaaaaacctttaaaatcaaatttaagttttgaaaaccagaaaaggagctctggcctaaagaactctgctgagtttaatagagatgggaaatccctttttcatgctaaccataaacaattttatactgaaatgaagtttcctgcaattgcaaaacctattaataagtcccagttcattaagcaacagagaactcacaacatagagaatgcccatgtatgcagtgaatgtgggaaagccttcctcaagttgtctcagtttattgatcatcagagagttcacactggagaaaaacctcatgtatgcagtatgtgtgggaaagctttctccagaaaatccagactaatggaccatcagagaactcatacagaactgaaacattatgaatgcactgaatgtgacaaaaccttcctcaagaaatcacagctcaatatacatcagaaaactcatatgggagggaaaccttacacatgtagccaatgtgggaaagccttcatcaagaagtgtcggctcatttatcatcaacgaactcatacaggagagaaaccccatggatgcagtgtatgtgggaaggccttctctacaaagttcagtctcactacacatcagaaaactcatacaggagaaaaaccttatatatgtagtgaatgtggaaaaggcttcattgagaagaggcgtcttactgcacatcatcgaactcatactggtgagaaaccctttatatgcaataaatgtgggaaaggcttcaccttgaagaacagtcttatcacacatcagcaaactcatacaggagagaaattatatacatgtagtgaatgtggaaaaggcttttcaatgaagcactgtctcatggtacatcaacgaactcatactggagagaaaccttataaatgcaatgagtgtggaaagggcttcgctttgaagagcccactcatcagacatcagcgaacacatactggagagaaaccctatgtatgcaccgaatgtcgaaaaggtttcaccatgaagagtgacctcattgtacatcagcgaactcatactgcagagaagccatatatatgcaatgattgtggaaaaggcttcactgtgaagagccgccttattgtgcatcagcgaactcatactggagaaaaaccctatgtatgtggtgagtgtggaaaaggctttccagcaaagatccggctaatgggacatcaacgaactcatacaggagagaaaccttatatttgcaatgagtgtggaaaaggcttcactgagaagagtcatctcaatgtacatcggcgcactcatacaggagagaaaccctatgtatgcagtgaatgtggcaaaggcttaactgggaaaagcatgctcattgcacatcagcgaactcatactggggagaaaccttatatatgcaatgaatgtggaaagggcttcaccatgaagagtactctcagtatacatcagcaaactcatactggagagaagccatacaaatgcaatgaatgtgataaaaccttcaggaagaagacatgcctcatacaacatcagcgatttcacacaggaaagacttcctttgcatgtactgaatgtggaaaattctctttgcgcaaaaatgatcttattacacatcagagaattcacacaggagagaaaccgtacaaatgcagtgactgcgggaaagccttcactacaaaatcagggctcaatgttcatcaaagaaaacatacaggagagaggccctatggatgtagtgattgtgggaaagcttttgcgcacttgtctatccttgttaaacacaggagaattcacaggtagtcattttgggaaagcctcttgccagatgtaggcccttaagatatctgcaaagaagagtaatttcatgaatgcagactacatggttgtttatttagtgatcagttacttcatgttttgtgtcagagaaaacatgtacaaaacatttgagaaaatattttaggacattatgtctaaaaattgtatactgagaaaaatcctatgaatgtggcagactataaaagcctttggtgggaagataaaccccctcagaagtgatcatagatcatgaataaactactaattcgtggaaatgtaataattataggaacgtctttgcccaaaaataaaacttcaacagattgagagagttcacactggagaaatactttcctctggcaaacccctgtggcagggttttcagtaaaatgttttgcctcatcgtgtgctaggaaataatgcagaaaaaacttatgaaaacattcaatgtagaagacttttaggaaaatatcagagaatttaatgaaggaaagaagccttggcaaaatgatggatgagagctttctgtcacaattctaaccttaacagataatatgcctcatgtgcatttgggaacaggatagcttgagccatattcctagttgccttgtcactgattttatacattttaaattgtgacttcctctaatcacgaactaaaatttaatattgtatataataccggagtattttatgcctgcctcattttattatatgattagctcctgcatttctttggttctaagtttgtgttatttcagaataactaaagtacttcagaatgaaactggatacagtatattcagttcataagtgtaattgaccatacttgaatatgtttaagtttataagtaacatcaggtgttatgaaattaatataaataagatgtttttgtaagtttttattttgaaataagtttagattcacaaaatcttaccaaaatattccagagttcttgcccttaacccagcttcttccaaagataacaacttacataagcatagttcattaccaaatacaggaaagtgaaattgttacaatactgttaactacagaatttatttggaaatcaccagttttaacatgcatgcatttttgtttgttttttatatgtagctttaagaaatcttaacacatatattgattcatgtcaccaccaccgtaatcgagattcagaatgttgcatcaatgcaaactccctcatgctccttgtttatagtcacaacctctcctcagccctaacccttggcaatcagaaatcttttcatctttagttttgtcattagtagcatgttataaaaatggaatcatacagcatgtacccttttggtattggctatttcaactaaagcagattaacctgaaatccatccaagttgttctgcatatcattgttctgtttttattggccactaataatctatgatacgaatataccactatttgtttattcacccactgaaggacattagttttgttcccggtttttcttactgttacaaataaaaatcctatgaacatttgta

SEQ ID NO: 203216 - DNA, 704 bp, Homo sapiens
  Payload ID: 20074
  Gene Name: zinc finger protein 615
  ENST ID: ENST00000597747
  CDS Start-End: 213-509
cggagcccaccaagttctgggaacccacaggtgctgagaacaagagaaatcaagtgaaggaaggaggcggagtttccaagacttgggtgtcatcatttctggggacatccttgattggagattgaagtttttgaaccgaaatttagagctgattcagaagagacaaatacagaacgtccaagttagcagtcatttcccaaatttaggagacaatgatgcaggcccaggaatccctaacactggaggatgtggctgtggacttcacctgggaggagtggcagttcctgagccctgctcagaaggacctgtaccgggacgtgatgttggagaactacagcaacctggtggcagtggggtatcaagccagcaaaccagatgcactctccaaattggaacgaggagaagaaacttgcacaacagaagatgaaatctactctcgaatctgttctgattcaggaggtgcatcaggaggtgcatatgcaggtttgtctcatggatatattgcctgatgccgaggattcactagaagctcaatcctgtcacccaagtagtgaacatagtaccaaataggtggttcttcaacccttgccttcctcccttcttcctcttggagtccccagtgtctattgttcctgtcttgatgtccctgtgttcccaatgtttagctcttgcctacaagtgagaatacacagtatttggttttc

SEQ ID NO: 203217 - DNA, 535 bp, Homo sapiens
  Payload ID: 20074
  Gene Name: zinc finger protein 615
  ENST ID: ENST00000599115
  CDS Start-End: 32-343
agtcgccgtcaggcactgaggaggccgagagatgaggccggagcccaccaagttctgggaagaatccctaacactggaggatgtggctgtggacttcacctgggaggagtggcagttcctgagccctgctcagaaggacctgtaccgggacgtgatgttggagaactacagcaacctggtggcagtggggtatcaagccagcaaaccagatgcactctccaaattggaacgaggagaagaaacttgcacaacagaagatgaaatctactctcgaatctgttctgattcaggaggtgcatcaggaggtgcatatgcaggtttgtctcatggatatattgcctgatgccgaggattcactagaagctcaatcctgtcacccaagtagtgaacatagtaccaaatagaaatcaggaaaattgatgatcctctgcagcatcacttgcaaaatcaaagtattcagaagagtgtgaaacagtgccatgaacagaatatgtttggaaatattgttaatcagaacaaaggtcatttcctgctg

SEQ ID NO: 203218 - DNA, 2654 bp, Homo sapiens
  Payload ID: 20074
  Gene Name: zinc finger protein 615
  Uniprot ID: Q8N8J6
  ENST ID: ENST00000598071
  CDS Start-End: 290-2518
tagtcgccgtcaggcactgaggaggccgagagatgaggccggagcccaccaagttctgggaagttctttctgacacaagtaagataacatctctgccatgcccacaggtgctgagaacaagagaaatcaagtgaaggaaggaggcggagtttccaagacttgggtgtcatcatttctggggacatccttgattggagattgaagtttttgaaccgaaatttagagctgattcagaagagacaaatacagaacgtccaagttagcagtcatttcccaaatttaggagacaatgatgcaggcccaggaatccctaacactggaggatgtggctgtggacttcacctgggaggagtggcagttcctgagccctgctcagaaggacctgtaccgggacgtgatgttggagaactacagcaacctggtggcagtggggtatcaagccagcaaaccagatgcactctccaaattggaacgaggagaagaaacttgcacaacagaagatgaaatctactctcgaatctgttctgattcaggaggtgcatcaggaggtgcatatgcagaaatcaggaaaattgatgatcctctgcagcatcacttgcaaaatcaaagtattcagaagagtgtgaaacagtgccatgaacagaatatgtttggaaatattgttaatcagaacaaaggtcatttcctgctgaagcaagattgtgatacgtttgacttacatgaaaaacctttaaaatcaaatttaagttttgaaaaccagaaaaggagctctggcctaaagaactctgctgagtttaatagagatgggaaatccctttttcatgctaaccataaacaattttatactgaaatgaagtttcctgcaattgcaaaacctattaataagtcccagttcattaagcaacagagaactcacaacatagagaatgcccatgtatgcagtgaatgtgggaaagccttcctcaagttgtctcagtttattgatcatcagagagttcacactggagaaaaacctcatgtatgcagtatgtgtgggaaagctttctccagaaaatccagactaatggaccatcagagaactcatacagaactgaaacattatgaatgcactgaatgtgacaaaaccttcctcaagaaatcacagctcaatatacatcagaaaactcatatgggagggaaaccttacacatgtagccaatgtgggaaagccttcatcaagaagtgtcggctcatttatcatcaacgaactcatacaggagagaaaccccatggatgcagtgtatgtgggaaggccttctctacaaagttcagtctcactacacatcagaaaactcatacaggagaaaaaccttatatatgtagtgaatgtggaaaaggcttcattgagaagaggcgtcttactgcacatcatcgaactcatactggtgagaaaccctttatatgcaataaatgtgggaaaggcttcaccttgaagaacagtcttatcacacatcagcaaactcatacaggagagaaattatatacatgtagtgaatgtggaaaaggcttttcaatgaagcactgtctcatggtacatcaacgaactcatactggagagaaaccttataaatgcaatgagtgtggaaagggcttcgctttgaagagcccactcatcagacatcagcgaacacatactggagagaaaccctatgtatgcaccgaatgtcgaaaaggtttcaccatgaagagtgacctcattgtacatcagcgaactcatactgcagagaagccatatatatgcaatgattgtggaaaaggcttcactgtgaagagccgccttattgtgcatcagcgaactcatactggagaaaaaccctatgtatgtggtgagtgtggaaaaggctttccagcaaagatccggctaatgggacatcaacgaactcatacaggagagaaaccttatatttgcaatgagtgtggaaaaggcttcactgagaagagtcatctcaatgtacatcggcgcactcatacaggagagaaaccctatgtatgcagtgaatgtggcaaaggcttaactgggaaaagcatgctcattgcacatcagcgaactcatactggggagaaaccttatatatgcaatgaatgtggaaagggcttcaccatgaagagtactctcagtatacatcagcaaactcatactggagagaagccatacaaatgcaatgaatgtgataaaaccttcaggaagaagacatgcctcatacaacatcagcgatttcacacaggaaagacttcctttgcatgtactgaatgtggaaaattctctttgcgcaaaaatgatcttattacacatcagagaattcacacaggagagaaaccgtacaaatgcagtgactgcgggaaagccttcactacaaaatcagggctcaatgttcatcaaagaaaacatacaggagagaggccctatggatgtagtgattgtgggaaagcttttgcgcacttgtctatccttgttaaacacaggagaattcacaggtagtcattttgggaaagcctcttgccagatgtaggcccttaagatatctgcaaagaagagtaatttcatgaatgcagactacatggttgtttatttagtgatcagttacttcatgttttgtgtcagagaaaacatgtac

SEQ ID NO: 203219 - DNA, 577 bp, Homo sapiens
  Payload ID: 20074
  Gene Name: zinc finger protein 615
  ENST ID: ENST00000593650
  CDS Start-End: 96-577
gtcgccgtcaggcactgaggaggccgagagatgaggccggagcccaccaagttctgggaagttctttctgacacaagtaagataacatctctgccatggaatccctaacactggaggatgtggctgtggacttcacctgggaggagtggcagttcctgagccctgctcagaaggacctgtaccgggacgtgatgttggagaactacagcaacctggtggcagtggggtatcaagccagcaaaccagatgcactctccaaattggaacgaggagaagaaacttgcacaacagaagatgaaatctactctcgaatctgttctgattcaggaggtgcatcaggaggtgcatatgcagaaatcaggaaaattgatgatcctctgcagcatcacttgcaaaatcaaagtattcagaagagtgtgaaacagtgccatgaacagaatatgtttggaaatattgttaatcagaacaaaggtcatttcctgctgaagcaagattgtgatacgtttgacttacatgaaaaacctttaaaatcaaatttaagttttgaaaaccagaaaaggagctctggcctaaagaa

SEQ ID NO: 203220 - DNA, 4020 bp, Homo sapiens
  Payload ID: 20074
  Gene Name: zinc finger protein 615
  Uniprot ID: Q8N8J6
  ENST ID: ENST00000594083
  CDS Start-End: 246-2474
ccgtcaggcactgaggaggccgagagatgaggccggagcccaccaagttctgggaacccacaggtgctgagaacaagagaaatcaagtgaaggaaggaggcggagtttccaagacttgggtgtcatcatttctggggacatccttgattggagattgaagtttttgaaccgaaatttagagctgattcagaagagacaaatacagaacgtccaagttagcagtcatttcccaaatttaggagacaatgatgcaggcccaggaatccctaacactggaggatgtggctgtggacttcacctgggaggagtggcagttcctgagccctgctcagaaggacctgtaccgggacgtgatgttggagaactacagcaacctggtggcagtggggtatcaagccagcaaaccagatgcactctccaaattggaacgaggagaagaaacttgcacaacagaagatgaaatctactctcgaatctgttctgattcaggaggtgcatcaggaggtgcatatgcagaaatcaggaaaattgatgatcctctgcagcatcacttgcaaaatcaaagtattcagaagagtgtgaaacagtgccatgaacagaatatgtttggaaatattgttaatcagaacaaaggtcatttcctgctgaagcaagattgtgatacgtttgacttacatgaaaaacctttaaaatcaaatttaagttttgaaaaccagaaaaggagctctggcctaaagaactctgctgagtttaatagagatgggaaatccctttttcatgctaaccataaacaattttatactgaaatgaagtttcctgcaattgcaaaacctattaataagtcccagttcattaagcaacagagaactcacaacatagagaatgcccatgtatgcagtgaatgtgggaaagccttcctcaagttgtctcagtttattgatcatcagagagttcacactggagaaaaacctcatgtatgcagtatgtgtgggaaagctttctccagaaaatccagactaatggaccatcagagaactcatacagaactgaaacattatgaatgcactgaatgtgacaaaaccttcctcaagaaatcacagctcaatatacatcagaaaactcatatgggagggaaaccttacacatgtagccaatgtgggaaagccttcatcaagaagtgtcggctcatttatcatcaacgaactcatacaggagagaaaccccatggatgcagtgtatgtgggaaggccttctctacaaagttcagtctcactacacatcagaaaactcatacaggagaaaaaccttatatatgtagtgaatgtggaaaaggcttcattgagaagaggcgtcttactgcacatcatcgaactcatactggtgagaaaccctttatatgcaataaatgtgggaaaggcttcaccttgaagaacagtcttatcacacatcagcaaactcatacaggagagaaattatatacatgtagtgaatgtggaaaaggcttttcaatgaagcactgtctcatggtacatcaacgaactcatactggagagaaaccttataaatgcaatgagtgtggaaagggcttcgctttgaagagcccactcatcagacatcagcgaacacatactggagagaaaccctatgtatgcaccgaatgtcgaaaaggtttcaccatgaagagtgacctcattgtacatcagcgaactcatactgcagagaagccatatatatgcaatgattgtggaaaaggcttcactgtgaagagccgccttattgtgcatcagcgaactcatactggagaaaaaccctatgtatgtggtgagtgtggaaaaggctttccagcaaagatccggctaatgggacatcaacgaactcatacaggagagaaaccttatatttgcaatgagtgtggaaaaggcttcactgagaagagtcatctcaatgtacatcggcgcactcatacaggagagaaaccctatgtatgcagtgaatgtggcaaaggcttaactgggaaaagcatgctcattgcacatcagcgaactcatactggggagaaaccttatatatgcaatgaatgtggaaagggcttcaccatgaagagtactctcagtatacatcagcaaactcatactggagagaagccatacaaatgcaatgaatgtgataaaaccttcaggaagaagacatgcctcatacaacatcagcgatttcacacaggaaagacttcctttgcatgtactgaatgtggaaaattctctttgcgcaaaaatgatcttattacacatcagagaattcacacaggagagaaaccgtacaaatgcagtgactgcgggaaagccttcactacaaaatcagggctcaatgttcatcaaagaaaacatacaggagagaggccctatggatgtagtgattgtgggaaagcttttgcgcacttgtctatccttgttaaacacaggagaattcacaggtagtcattttgggaaagcctcttgccagatgtaggcccttaagatatctgcaaagaagagtaatttcatgaatgcagactacatggttgtttatttagtgatcagttacttcatgttttgtgtcagagaaaacatgtacaaaacatttgagaaaatattttaggacattatgtctaaaaattgtatactgagaaaaatcctatgaatgtggcagactataaaagcctttggtgggaagataaaccccctcagaagtgatcatagatcatgaataaactactaattcgtggaaatgtaataattataggaacgtctttgcccaaaaataaaacttcaacagattgagagagttcacactggagaaatactttcctctggcaaacccctgtggcagggttttcagtaaaatgttttgcctcatcgtgtgctaggaaataatgcagaaaaaacttatgaaaacattcaatgtagaagacttttaggaaaatatcagagaatttaatgaaggaaagaagccttggcaaaatgatggatgagagctttctgtcacaattctaaccttaacagataatatgcctcatgtgcatttgggaacaggatagcttgagccatattcctagttgccttgtcactgattttatacattttaaattgtgacttcctctaatcacgaactaaaatttaatattgtatataataccggagtattttatgcctgcctcattttattatatgattagctcctgcatttctttggttctaagtttgtgttatttcagaataactaaagtacttcagaatgaaactggatacagtatattcagttcataagtgtaattgaccatacttgaatatgtttaagtttataagtaacatcaggtgttatgaaattaatataaataagatgtttttgtaagtttttattttgaaataagtttagattcacaaaatcttaccaaaatattccagagttcttgcccttaacccagcttcttccaaagataacaacttacataagcatagttcattaccaaatacaggaaagtgaaattgttacaatactgttaactacagaatttatttggaaatcaccagttttaacatgcatgcatttttgtttgttttttatatgtagctttaagaaatcttaacacatatattgattcatgtcaccaccaccgtaatcgagattcagaatgttgcatcaatgcaaactccctcatgctccttgtttatagtcacaacctctcctcagccctaacccttggcaatcagaaatcttttcatctttagttttgtcattagtagcatgttataaaaatggaatcatacagcatgtacccttttggtattggctatttcaactaaagcagattaacctgaaatccatccaagttgttctgcatatcattgttctgtttttattggccactaataatctatgatacgaatataccactatttgtttattcacccactgaaggacattagttttgttcccggtttttcttactgttacaaataaaaatcctatgaacatttgtacaca

SEQ ID NO: 203221 - DNA, 561 bp, Homo sapiens
  Payload ID: 20074
  Gene Name: zinc finger protein 615
  ENST ID: ENST00000601178
  CDS Start-End: 273-561
gggaacgcctccgaccctggatagtcgccgtcaggcactgaggaggccgagagatgaggccggagcccaccaagttctgggaacccacaggtgctgagaacaagagaaatcaagtgaaggaaggaggcggagtttccaagacttgggtgtcatcatttctggggacatccttgattggagattgaagtttttgaaccgaaatttagagctgattcagaagagacaaatacagaacgtccaagttagcagtcatttcccaaatttaggagacaatgatgcaggcccaggaatccctaacactggaggatgtggctgtggacttcacctgggaggagtggcagttcctgagccctgctcagaaggacctgtaccgggacgtgatgttggagaactacagcaacctggtggcagtggggtatcaagccagcaaaccagatgcactctccaaattggaacgaggagaagaaacttgcacaacagaagatgaaatctactctcgaatctgttctgattcaggaggtgcatcaggagaaatcaggaaaattgatgatcctctgcagc

SEQ ID NO: 203222 - DNA, 581 bp, Homo sapiens
  Payload ID: 20074
  Gene Name: zinc finger protein 615
  ENST ID: ENST00000599631
  CDS Start-End: 558-581
agtcgccgtcaggcactgaggaggccgagagatgaggccggagcccaccaagttctgggaaaatactttgcaagtatcaagatgtggatggcggccgggtgcagtggctcatgcctgtagtcccagcactttgggaggctgagatgggtggatcagttgagctcaggagttcaagaccagcctggccaacatggtgaaaccccgtttctactaaaagtacaaaaattagcagcgcatgtggcgttcacctgtaatcccagcttctcaggcggctgaagcaggagaatcgcttgaacccaggagatggaggttgcagtgaacagagatcacgccactggagtcttactcactccagcctgggcaacagacccacaggtgctgagaacaagagaaatcaagtgaaggaaggaggcggagtttccaagacttgggtgtcatcatttctggggacatccttgattggagattgaagtttttgaaccgaaatttagagctgattcagaagagacaaatacagaacgtccaagttagcagtcatttcccaaatttaggagacaatgatgcaggcccaggaatcccta

SEQ ID NO: 203223 - DNA, 4094 bp, Homo sapiens
  Payload ID: 20074
  Gene Name: zinc finger protein 615
  Uniprot ID: Q8N8J6
  ENST ID: ENST00000602063
  CDS Start-End: 351-2546
gggcgtgttcgtggacagtggtgatggactggtatctgtcggcgccagcgtttggcgacgccagtggaattctttcaggagcttagcgtgggtccgattcctatcgcaggggaactacaagaggttctttctgacacaagtaagataacatctctgccatgcccacaggtgctgagaacaagagaaatcaagtgaaggaaggaggcggagtttccaagacttgggtgtcatcatttctggggacatccttgattggagattgaagtttttgaaccgaaatttagagctgattcagaagagacaaatacagaacgtccaagttagcagtcatttcccaaatttaggagacaatgatgcaggcccaggaatccctaacactggaggatgtggctgtggacttcacctgggaggagtggcagttcctgagccctgctcagaaggacctgtaccgggacgtgatgttggagaactacagcaacctggtggcagtggggtatcaagccagcaaaccagatgcactctccaaattggaacgaggagaagaaacttgcacaacagaagatgaaatctactctcgaatctgttctgaaatcaggaaaattgatgatcctctgcagcatcacttgcaaaatcaaagtattcagaagagtgtgaaacagtgccatgaacagaatatgtttggaaatattgttaatcagaacaaaggtcatttcctgctgaagcaagattgtgatacgtttgacttacatgaaaaacctttaaaatcaaatttaagttttgaaaaccagaaaaggagctctggcctaaagaactctgctgagtttaatagagatgggaaatccctttttcatgctaaccataaacaattttatactgaaatgaagtttcctgcaattgcaaaacctattaataagtcccagttcattaagcaacagagaactcacaacatagagaatgcccatgtatgcagtgaatgtgggaaagccttcctcaagttgtctcagtttattgatcatcagagagttcacactggagaaaaacctcatgtatgcagtatgtgtgggaaagctttctccagaaaatccagactaatggaccatcagagaactcatacagaactgaaacattatgaatgcactgaatgtgacaaaaccttcctcaagaaatcacagctcaatatacatcagaaaactcatatgggagggaaaccttacacatgtagccaatgtgggaaagccttcatcaagaagtgtcggctcatttatcatcaacgaactcatacaggagagaaaccccatggatgcagtgtatgtgggaaggccttctctacaaagttcagtctcactacacatcagaaaactcatacaggagaaaaaccttatatatgtagtgaatgtggaaaaggcttcattgagaagaggcgtcttactgcacatcatcgaactcatactggtgagaaaccctttatatgcaataaatgtgggaaaggcttcaccttgaagaacagtcttatcacacatcagcaaactcatacaggagagaaattatatacatgtagtgaatgtggaaaaggcttttcaatgaagcactgtctcatggtacatcaacgaactcatactggagagaaaccttataaatgcaatgagtgtggaaagggcttcgctttgaagagcccactcatcagacatcagcgaacacatactggagagaaaccctatgtatgcaccgaatgtcgaaaaggtttcaccatgaagagtgacctcattgtacatcagcgaactcatactgcagagaagccatatatatgcaatgattgtggaaaaggcttcactgtgaagagccgccttattgtgcatcagcgaactcatactggagaaaaaccctatgtatgtggtgagtgtggaaaaggctttccagcaaagatccggctaatgggacatcaacgaactcatacaggagagaaaccttatatttgcaatgagtgtggaaaaggcttcactgagaagagtcatctcaatgtacatcggcgcactcatacaggagagaaaccctatgtatgcagtgaatgtggcaaaggcttaactgggaaaagcatgctcattgcacatcagcgaactcatactggggagaaaccttatatatgcaatgaatgtggaaagggcttcaccatgaagagtactctcagtatacatcagcaaactcatactggagagaagccatacaaatgcaatgaatgtgataaaaccttcaggaagaagacatgcctcatacaacatcagcgatttcacacaggaaagacttcctttgcatgtactgaatgtggaaaattctctttgcgcaaaaatgatcttattacacatcagagaattcacacaggagagaaaccgtacaaatgcagtgactgcgggaaagccttcactacaaaatcagggctcaatgttcatcaaagaaaacatacaggagagaggccctatggatgtagtgattgtgggaaagcttttgcgcacttgtctatccttgttaaacacaggagaattcacaggtagtcattttgggaaagcctcttgccagatgtaggcccttaagatatctgcaaagaagagtaatttcatgaatgcagactacatggttgtttatttagtgatcagttacttcatgttttgtgtcagagaaaacatgtacaaaacatttgagaaaatattttaggacattatgtctaaaaattgtatactgagaaaaatcctatgaatgtggcagactataaaagcctttggtgggaagataaaccccctcagaagtgatcatagatcatgaataaactactaattcgtggaaatgtaataattataggaacgtctttgcccaaaaataaaacttcaacagattgagagagttcacactggagaaatactttcctctggcaaacccctgtggcagggttttcagtaaaatgttttgcctcatcgtgtgctaggaaataatgcagaaaaaacttatgaaaacattcaatgtagaagacttttaggaaaatatcagagaatttaatgaaggaaagaagccttggcaaaatgatggatgagagctttctgtcacaattctaaccttaacagataatatgcctcatgtgcatttgggaacaggatagcttgagccatattcctagttgccttgtcactgattttatacattttaaattgtgacttcctctaatcacgaactaaaatttaatattgtatataataccggagtattttatgcctgcctcattttattatatgattagctcctgcatttctttggttctaagtttgtgttatttcagaataactaaagtacttcagaatgaaactggatacagtatattcagttcataagtgtaattgaccatacttgaatatgtttaagtttataagtaacatcaggtgttatgaaattaatataaataagatgtttttgtaagtttttattttgaaataagtttagattcacaaaatcttaccaaaatattccagagttcttgcccttaacccagcttcttccaaagataacaacttacataagcatagttcattaccaaatacaggaaagtgaaattgttacaatactgttaactacagaatttatttggaaatcaccagttttaacatgcatgcatttttgtttgttttttatatgtagctttaagaaatcttaacacatatattgattcatgtcaccaccaccgtaatcgagattcagaatgttgcatcaatgcaaactccctcatgctccttgtttatagtcacaacctctcctcagccctaacccttggcaatcagaaatcttttcatctttagttttgtcattagtagcatgttataaaaatggaatcatacagcatgtacccttttggtattggctatttcaactaaagcagattaacctgaaatccatccaagttgttctgcatatcattgttctgtttttattggccactaataatctatgatacgaatataccactatttgtttattcacccactgaaggacattagttttgttcccggtttttcttactgttacaaataaaaatcctatgaacatttgtacacaca

SEQ ID NO: 203224 - DNA, 2229 bp, Homo sapiens
  Payload ID: 20074
  Gene Name: zinc finger protein 615
  Uniprot ID: Q8N8J6
  ENST ID: ENST00000618487
  CDS Start-End: 1-2229
atgatgcaggcccaggaatccctaacactggaggatgtggctgtggacttcacctgggaggagtggcagttcctgagccctgctcagaaggacctgtaccgggacgtgatgttggagaactacagcaacctggtggcagtggggtatcaagccagcaaaccagatgcactctccaaattggaacgaggagaagaaacttgcacaacagaagatgaaatctactctcgaatctgttctgattcaggaggtgcatcaggaggtgcatatgcagaaatcaggaaaattgatgatcctctgcagcatcacttgcaaaatcaaagtattcagaagagtgtgaaacagtgccatgaacagaatatgtttggaaatattgttaatcagaacaaaggtcatttcctgctgaagcaagattgtgatacgtttgacttacatgaaaaacctttaaaatcaaatttaagttttgaaaaccagaaaaggagctctggcctaaagaactctgctgagtttaatagagatgggaaatccctttttcatgctaaccataaacaattttatactgaaatgaagtttcctgcaattgcaaaacctattaataagtcccagttcattaagcaacagagaactcacaacatagagaatgcccatgtatgcagtgaatgtgggaaagccttcctcaagttgtctcagtttattgatcatcagagagttcacactggagaaaaacctcatgtatgcagtatgtgtgggaaagctttctccagaaaatccagactaatggaccatcagagaactcatacagaactgaaacattatgaatgcactgaatgtgacaaaaccttcctcaagaaatcacagctcaatatacatcagaaaactcatatgggagggaaaccttacacatgtagccaatgtgggaaagccttcatcaagaagtgtcggctcatttatcatcaacgaactcatacaggagagaaaccccatggatgcagtgtatgtgggaaggccttctctacaaagttcagtctcactacacatcagaaaactcatacaggagaaaaaccttatatatgtagtgaatgtggaaaaggcttcattgagaagaggcgtcttactgcacatcatcgaactcatactggtgagaaaccctttatatgcaataaatgtgggaaaggcttcaccttgaagaacagtcttatcacacatcagcaaactcatacaggagagaaattatatacatgtagtgaatgtggaaaaggcttttcaatgaagcactgtctcatggtacatcaacgaactcatactggagagaaaccttataaatgcaatgagtgtggaaagggcttcgctttgaagagcccactcatcagacatcagcgaacacatactggagagaaaccctatgtatgcaccgaatgtcgaaaaggtttcaccatgaagagtgacctcattgtacatcagcgaactcatactgcagagaagccatatatatgcaatgattgtggaaaaggcttcactgtgaagagccgccttattgtgcatcagcgaactcatactggagaaaaaccctatgtatgtggtgagtgtggaaaaggctttccagcaaagatccggctaatgggacatcaacgaactcatacaggagagaaaccttatatttgcaatgagtgtggaaaaggcttcactgagaagagtcatctcaatgtacatcggcgcactcatacaggagagaaaccctatgtatgcagtgaatgtggcaaaggcttaactgggaaaagcatgctcattgcacatcagcgaactcatactggggagaaaccttatatatgcaatgaatgtggaaagggcttcaccatgaagagtactctcagtatacatcagcaaactcatactggagagaagccatacaaatgcaatgaatgtgataaaaccttcaggaagaagacatgcctcatacaacatcagcgatttcacacaggaaagacttcctttgcatgtactgaatgtggaaaattctctttgcgcaaaaatgatcttattacacatcagagaattcacacaggagagaaaccgtacaaatgcagtgactgcgggaaagccttcactacaaaatcagggctcaatgttcatcaaagaaaacatacaggagagaggccctatggatgtagtgattgtgggaaagcttttgcgcacttgtctatccttgttaaacacaggagaattcacaggtag

SEQ ID NO: 203225 - DNA, 2284 bp, Homo sapiens
  Payload ID: 20074
  Gene Name: zinc finger protein 615
  ENST ID: ENST00000618049
  CDS Start-End: 39-2261
cgtccaagttagcagtcatttcccaaatttaggagacaatgatgcaggcccaggaatccctaacactggaggatgtggctgtggacttcacctgggaggagtggcagttcctgagccctgctcagaaggacctgtaccgggacgtgatgttggagaactacagcaacctggtggcagtggggtatcaagccagcaaaccagatgcactctccaaattggaacgaggagaagaaacttgcacaacagaagatgaaatctactctcgaatctgttctggtagaggagcaccaggtggacagccagaaatcaggaaaattgatgatcctctgcagcatcacttgcaaaatcaaagtattcagaagagtgtgaaacagtgccatgaacagaatatgtttggaaatattgttaatcagaacaaaggtcatttcctgctgaagcaagattgtgatacgtttgacttacatgaaaaacctttaaaatcaaatttaagttttgaaaaccagaaaaggagctctggcctaaagaactctgctgagtttaatagagatgggaaatccctttttcatgctaaccataaacaattttatactgaaatgaagtttcctgcaattgcaaaacctattaataagtcccagttcattaagcaacagagaactcacaacatagagaatgcccatgtatgcagtgaatgtgggaaagccttcctcaagttgtctcagtttattgatcatcagagagttcacactggagaaaaacctcatgtatgcagtatgtgtgggaaagctttctccagaaaatccagactaatggaccatcagagaactcatacagaactgaaacattatgaatgcactgaatgtgacaaaaccttcctcaagaaatcacagctcaatatacatcagaaaactcatatgggagggaaaccttacacatgtagccaatgtgggaaagccttcatcaagaagtgtcggctcatttatcatcaacgaactcatacaggagagaaaccccatggatgcagtgtatgtgggaaggccttctctacaaagttcagtctcactacacatcagaaaactcatacaggagaaaaaccttatatatgtagtgaatgtggaaaaggcttcattgagaagaggcgtcttactgcacatcatcgaactcatactggtgagaaaccctttatatgcaataaatgtgggaaaggcttcaccttgaagaacagtcttatcacacatcagcaaactcatacaggagagaaattatatacatgtagtgaatgtggaaaaggcttttcaatgaagcactgtctcatggtacatcaacgaactcatactggagagaaaccttataaatgcaatgagtgtggaaagggcttcgctttgaagagcccactcatcagacatcagcgaacacatactggagagaaaccctatgtatgcaccgaatgtcgaaaaggtttcaccatgaagagtgacctcattgtacatcagcgaactcatactgcagagaagccatatatatgcaatgattgtggaaaaggcttcactgtgaagagccgccttattgtgcatcagcgaactcatactggagaaaaaccctatgtatgtggtgagtgtggaaaaggctttccagcaaagatccggctaatgggacatcaacgaactcatacaggagagaaaccttatatttgcaatgagtgtggaaaaggcttcactgagaagagtcatctcaatgtacatcggcgcactcatacaggagagaaaccctatgtatgcagtgaatgtggcaaaggcttaactgggaaaagcatgctcattgcacatcagcgaactcatactggggagaaaccttatatatgcaatgaatgtggaaagggcttcaccatgaagagtactctcagtatacatcagcaaactcatactggagagaagccatacaaatgcaatgaatgtgataaaaccttcaggaagaagacatgcctcatacaacatcagcgatttcacacaggaaagacttcctttgcatgtactgaatgtggaaaattctctttgcgcaaaaatgatcttattacacatcagagaattcacacaggagagaaaccgtacaaatgcagtgactgcgggaaagccttcactacaaaatcagggctcaatgttcatcaaagaaaacatacaggagagaggccctatggatgtagtgattgtgggaaagcttttgcgcacttgtctatccttgttaaacacaggagaattcacaggtagtcattttgggaaagcctcttgcc

SEQ ID NO: 203226 - DNA, 2563 bp, Homo sapiens
  Payload ID: 20075
  Gene Name: zinc finger protein 616
  ENST ID: ENST00000330123
  CDS Start-End: 92-316
ggcacttctccccacgtttgatgtgtgaataattacattgactgagaaagaaacccagaagaggaagaagaggaaggaaaaggagtcagtgatggctactcaggggcatttgacattcaaggatgtagccatagaattctctcaggaggagtggaaatgcctggagcctgtgcagaaagctttgtacaaggatgtgatgttggagaactataggaacctggtcttcctaggctggagaataatggcgcgatctcacctcactgcaacctccgtctcccaggttcaagcgattctcctgcctcagcctcctgagtagctgggattacaggtatctctcctaaatgtgtgatcaaggaattaccaccaacagagaacagtaatacaggagaaaggttccaaacagtggcactggaaagacatcaaagctatgatattgaaaatttatacttcagggaaatacagaaacatctacatgaccttgaatttcaatggaaagatggtgaaacaaatgataaagaagtgccagtgccccatgaaaacaatcttactggtaaaagagatcaacatagtcaaggggatgtagaaaacaatcatattgaaaaccagcttacatcaaactttgagtcacgtctggctgaactgcagaaagttcaaactgaagggagactttatgaatgtaatgaaacggagaagacaggtaataatggttgtttagtttctccacacattagggaaaaaacgtatgtatgtaatgaatgtggcaaagcctttaaagcgtcttccagccttattaatcatcagaggatacatactacagagaaaccttacaaatgcaatgagtgtggcaaagcctttcatcgggcctcactactaactgtacacaaggtagtccatacaagagggaaatcatatcaatgtgatgtatgtggcaagatcttcagaaaaaattcatattttgtaagacaccaaaggagtcacactggacagaaaccctacatatgtaatgaatgtggcaagtcctttagtaaaagttcccaccttgcagttcatcagagaattcataccggtgaaaaaccttacaaatgtaatctgtgtgggaaatcctttagtcagcgtgtccatcttagacttcatcagacagttcatactggagagagacccttcaaatgtaatgagtgtggcaaaacctttaaacggagctcaaacctcactgtacatcaggtaatccatgcaggaaagaaaccatataaatgtgatgtatgtggcaaggcattcagacatagatcaaatcttgtatgtcaccggagaatccacagtggagagaaacaatacaaatgcaatgaatgtggcaaggtcttcagtaaacgttcaagtcttgcagtgcatcgacgaattcacactgtagagaaaccttgcaaatgcaatgaatgtggcaaggtcttcagtaaacgttcaagtcttgcagtgcatcagagaattcatactggacagaaaacttacaaatgcaataaatgtggcaaggtgtacagtaagcattcacatcttgcagtgcattggagaattcataccggcgagaaagcttataaatgcaatgaatgtggcaaagttttcagcatacattcacgacttgcagctcatcagagaattcatactggagagaaaccttacaaatgcaatgaatgtggcaaggtcttcagtcaacattcacgtcttgcagtgcatcggagaattcatactggagagaaaccttacaaatgcaaagaatgtggcaaggtcttcagtgaccgttcagcttttgcaaggcatcggagaattcatactggagagaagccttacaaatgcaaagaatgtggcaaggtcttcagtcaatgttcacgtcttacagtgcatcggagaattcatagtggagagaaaccttacaaatgcaatgaatgcggcaaggtctacagtcagtattcacatcttgtagggcatcgaagagttcatactggagagaaaccatacaaatgtcatgaatgtggcaaagcctttaatcagggctccacactcaatagacatcagagaattcataccggagagaaaccttacaaatgcaatcagtgtgggaattcctttagtcagcgtgtccatcttagacttcatcagactgttcatactggagacagaccttacaaatgtaatgagtgtggcaaaacctttaaacggagctcaaacctcactgcacatcagataattcatgcaggaaagaaaccatataaatgtgatgaatgtggcaaggtattcaggcatagttcacatcttgtaagtcaccagagaatccacactggagagaaaagatacaaatgtattgaatgtggcaaagcctttgggcggttgttttccctcagcaaacaccaaagaattcattctggcaaaaaaccttataaatgtaatgagtgtgggaaatcttttatttgtcgctcaggcctcactaaacatcgaataagacatactggagagagccttacaactaaactcaatgtgacaaggccttagacgttgtcctagtttctggaatcaccga

SEQ ID NO: 203227 - DNA, 556 bp, Homo sapiens
  Payload ID: 20075
  Gene Name: zinc finger protein 616
  ENST ID: ENST00000600282
  CDS Start-End: 439-556
agagggagaaccacagcaaggaggaagcctaggaagttgggggtgctagagagtgggaacaaaggagatgtaacagggaaaagggaatttaacagggaagagggattttaacagggagagcagacagggagctcagatgggggaaaagaggcaggaatacgtggcggctggggacaatgggaaagtttggggagaaagagcaacaagaggtgaaataaatttcgaagcattgggcagaatagacataaaagagggaataaagaaaggggagaaaaacagcaaagggaaaaaagacgtgcagaatgagagcgggaaacacatagtagtgaagagagtgggcgaggaccccacccagatgagctgtttgatgtgtgaataattacattgactgagaaagaaacccagaagaggaagaagaggaaggaaaaggagtcagtgatggctactcaggggcatttgacattcaaggatgtagccatagaattctctcaggaggagtggaaatgcctggagcctgtgcagaaagctttgtacaaggatgtgatgttggagaact

SEQ ID NO: 203228 - DNA, 568 bp, Homo sapiens
  Payload ID: 20075
  Gene Name: zinc finger protein 616
  ENST ID: ENST00000596290
  CDS Start-End: 268-477
tgcgccagggaaaggccttatcgctgtgtgtgtgtttcagtctacgtggattaaacattacttcgctccgtctgcctggattaaacgtgcactttgcagtcctcacttctccgtaccagtgatctggggatcgctacggaccttaaaatacccatagccccttcgcccctgcaacaggcacttctccccacgtttgatgtgtgaataattacattgactgagaaagaaacccagaagaggaagaagaggaaggaaaaggagtcagtgatggctactcaggggcatttgacattcaaggatgtagccatagaattctctcaggaggagtggaaatgcctggagcctgtgcagaaagctttgtacaaggatgtgatgttggagaactataggaacctggtcttcctaggctggagaataatggcgcgatctcacctcactgcaacctccgtctcccaggtatctctcctaaatgtgtgatcaaggaattaccaccaacagagaacagtaatacaggagaaaggttccaaacagtggcactggaaagacatcaaagctatgatattgaaaa

SEQ ID NO: 203229 - DNA, 4335 bp, Homo sapiens
  Payload ID: 20075
  Gene Name: zinc finger protein 616
  Uniprot ID: Q08AN1
  ENST ID: ENST00000600228
  CDS Start-End: 263-2608
cagggaaaggccttatcgctgtgtgtgtgtttcagtctacgtggattaaacattacttcgctccgtctgcctggattaaacgtgcactttgcagtcctcacttctccgtaccagtgatctggggatcgctacggaccttaaaatacccatagccccttcgcccctgcaacaggcacttctccccacgtttgatgtgtgaataattacattgactgagaaagaaacccagaagaggaagaagaggaaggaaaaggagtcagtgatggctactcaggggcatttgacattcaaggatgtagccatagaattctctcaggaggagtggaaatgcctggagcctgtgcagaaagctttgtacaaggatgtgatgttggagaactataggaacctggtcttcctaggtatctctcctaaatgtgtgatcaaggaattaccaccaacagagaacagtaatacaggagaaaggttccaaacagtggcactggaaagacatcaaagctatgatattgaaaatttatacttcagggaaatacagaaacatctacatgaccttgaatttcaatggaaagatggtgaaacaaatgataaagaagtgccagtgccccatgaaaacaatcttactggtaaaagagatcaacatagtcaaggggatgtagaaaacaatcatattgaaaaccagcttacatcaaactttgagtcacgtctggctgaactgcagaaagttcaaactgaagggagactttatgaatgtaatgaaacggagaagacaggtaataatggttgtttagtttctccacacattagggaaaaaacgtatgtatgtaatgaatgtggcaaagcctttaaagcgtcttccagccttattaatcatcagaggatacatactacagagaaaccttacaaatgcaatgagtgtggcaaagcctttcatcgggcctcactactaactgtacacaaggtagtccatacaagagggaaatcatatcaatgtgatgtatgtggcaagatcttcagaaaaaattcatattttgtaagacaccaaaggagtcacactggacagaaaccctacatatgtaatgaatgtggcaagtcctttagtaaaagttcccaccttgcagttcatcagagaattcataccggtgaaaaaccttacaaatgtaatctgtgtgggaaatcctttagtcagcgtgtccatcttagacttcatcagacagttcatactggagagagacccttcaaatgtaatgagtgtggcaaaacctttaaacggagctcaaacctcactgtacatcaggtaatccatgcaggaaagaaaccatataaatgtgatgtatgtggcaaggcattcagacatagatcaaatcttgtatgtcaccggagaatccacagtggagagaaacaatacaaatgcaatgaatgtggcaaggtcttcagtaaacgttcaagtcttgcagtgcatcgacgaattcacactgtagagaaaccttgcaaatgcaatgaatgtggcaaggtcttcagtaaacgttcaagtcttgcagtgcatcagagaattcatactggacagaaaacttacaaatgcaataaatgtggcaaggtgtacagtaagcattcacatcttgcagtgcattggagaattcataccggcgagaaagcttataaatgcaatgaatgtggcaaagttttcagcatacattcacgacttgcagctcatcagagaattcatactggagagaaaccttacaaatgcaatgaatgtggcaaggtcttcagtcaacattcacgtcttgcagtgcatcggagaattcatactggagagaaaccttacaaatgcaaagaatgtggcaaggtcttcagtgaccgttcagcttttgcaaggcatcggagaattcatactggagagaagccttacaaatgcaaagaatgtggcaaggtcttcagtcaatgttcacgtcttacagtgcatcggagaattcatagtggagagaaaccttacaaatgcaatgaatgcggcaaggtctacagtcagtattcacatcttgtagggcatcgaagagttcatactggagagaaaccatacaaatgtcatgaatgtggcaaagcctttaatcagggctccacactcaatagacatcagagaattcataccggagagaaaccttacaaatgcaatcagtgtgggaattcctttagtcagcgtgtccatcttagacttcatcagactgttcatactggagacagaccttacaaatgtaatgagtgtggcaaaacctttaaacggagctcaaacctcactgcacatcagataattcatgcaggaaagaaaccatataaatgtgatgaatgtggcaaggtattcaggcatagttcacatcttgtaagtcaccagagaatccacactggagagaaaagatacaaatgtattgaatgtggcaaagcctttgggcggttgttttccctcagcaaacaccaaagaattcattctggcaaaaaaccttataaatgtaatgagtgtgggaaatcttttatttgtcgctcaggcctcactaaacatcgaataagacatactggagagagccttacaactaaactcaatgtgacaaggccttagacgttgtcctagtttctggaatcaccgaataattcctacttactgatataccttgtatatttaccccttctcttgaaatccctgtggaattgtaatctccagtattggaggtggggcccattgggaggtgattgaatcatggaagtggatttctcaaactgagaaagatgtagcgtcatccccttggtgctgtcctggcaatagtgacttctcttgaggtctggctgtttagaagtgcatagcacttccctgtcgcttgccctcattctcaccatgtgaaataccgacacccgctttgccttccaccatgattttaaccttcctgaggcttccctagagggtgatcagatgccagcaccatgttttcatttaagccttcagaaatatgagccaattaaactcttttctttatacattagccagcctcaggtttttttttgtagcaatgcagttatgacctaatacatttacacatgcagtaaatatacctaagttttaagctagtattcactactcactaggtgtaagaatttgtatatatattccaggatgtatacatcctggagaaaaatcacagaagtgtaatacgtgtggcaagaattctactcaaaagccagaacttgtaaatctaggtaattaaaagggcatagatgtatgaaatgaaatgagggtggcaaaacctttactagagttcaatcactacttgtcataagagagtttatactgaaaggaaatcatataaatgtatgtgtcagaggctttccccaggcattggaactcactaggcatcagaatatacatctttgagaggaaccacagaaatgtaatgtgcatgctaaggtttttacccgaacatcaaaatggaaagagtattcatactagagacaaccttccaaataaatggttttaaaaaatgaaatgttcaaagacctggaatcaacccaaatgcttatcagtgatagactgaataaagaaaatgtggtacatatacaccatgggatactatgcagccatagaaaggaatgagatcatgtccattgcagcgatgtggatggagctggaagccattatcctcaggaaactaacacaggaacagaaaatcaaacagcacatgttctcacttaaaagtggaagctgaacaatgagaacacatatacccagggaggggagcaacacacactggggcctgctgatgggggtgggaagggcagggaagtggagcatcaggacaaatagctaatgcatttttgccttaataccaggtgatgggttggtagatgcagcaaaccaccatggcacacattttcctatgtaacaaatttgcaaattgtgcacatgtacccagaacttaaagtgagacaaaaccaatgtccacgcctttgcagtttgattgaacgtataaaggagaaaaatcctgtaagtatgctgaacatgaaaggacctggaagcagtagtgtgtcttcagcctttaccaaattatccctacttgagagaaaacttggaaatgtaatcaatgtggcacaaatttcaaccagttttttaaacagactacacatctttgaaatcatactagggataaccaaatctgcttctccaagattggcctggaatattattacagaataactaccagacaacatttgttaaaactcaggacagtatgtattttaaaggagcaagtgcatgtgtgaaaatggctcattcagtttataaaatattacattaaa

SEQ ID NO: 203230 - DNA, 577 bp, Homo sapiens
  Payload ID: 20075
  Gene Name: zinc finger protein 616
  ENST ID: ENST00000597013
  CDS Start-End: 250-474
tatcgctgtgtgtgtgtttcagtctacgtggattaaacattacttcgctccgtctgcctggattaaacgtgcactttgcagtcctcacttctccgtaccagtgatctggggatcgctacggaccttaaaatacccatagccccttcgcccctgcaacaggcacttctccccacgtttgatgtgtgaataattacattgactgagaaagaaacccagaagaggaagaagaggaaggaaaaggagtcagtgatggctactcaggggcatttgacattcaaggatgtagccatagaattctctcaggaggagtggaaatgcctggagcctgtgcagaaagctttgtacaaggatgtgatgttggagaactataggaacctggtcttcctaggctggagaataatggcgcgatctcacctcactgcaacctccgtctcccaggttcaagcgattctcctgcctcagcctcctgagtagctgggattacaggcatgtgccaccacacctggctaattttgtatttttagtagagatggggtttctccatattggtcaggctgatcttgaactcccgacctca

SEQ ID NO: 203231 - DNA, 9109 bp, Homo sapiens
  Payload ID: 20076
  Gene Name: zinc finger protein 618
  Uniprot ID: Q5T7W0
  ENST ID: ENST00000288466
  CDS Start-End: 100-2685
ggcggcggcggcggcggcggcggcggcattgtgcgcgcaccagcagcccggcccgggaggagcaggacgcgccggggccgcctcctcccgcacggacccatgaaccagccgggcggcgcggcggctccgcaggctgacggagccagtgcagccggaaggaaaagcactgcgagcagggagcgcttgaagcgcagccagaagagcaccaaggtggagggcccagagccagtgccagccgaggcctcgctgagtgccgagcaaggaacgatgacggaggtgaaggtgaagacagagctgcccgatgactacatccaggaggtgatctggcagggcgaggccaaggaggagaagaaggcggtcagcaaggatgggaccagcgacgtgcctgccgagatctgcgtggtgatcggcggcgtccgcaaccagcagacccttgggtcttacgaatgcggaatctgtggcaagaagtacaagtattacaactgcttccagacccacgtgcgggcgcaccgagacaccgaagccacctcaggggagggagcctcccaaagcaacaatttcaggtacacatgtgatatctgcgggaagaagtacaaatactacagctgtttccaagagcaccgagacctgcacgcagtggatgtgtttagtgtggaaggggcccctgagaaccgggcagaccccttcgaccaaggtgtcgtggccacggacgaggtgaaggaggagcccccggagccattccagaaaatcgggccaatgaacaatattacatcagacatttttaagaagaaagaagttaggcagtgccaaaagagagaaactggcaattacacctgtgaattctgcggcaaacagtacaagtactacactccctaccaggagcatgtggccttacacgcccccatcaaaagcgctttcagtcggagagtagaaggcaaagcacaaaaccactttgaagagacgaacagcagttcgcagaactccagcgaaccctacacctgcggcgcctgtgggatccagttccagttctacaacaacctgttggagcacatgcagtcccatgcagctgacaatgaaaacaacattgcctccaaccagtcccgatcgccacctgctgttgtagaagagaagtggaaacctcaggcccagaggaacagtgccaataacaccactaccagtggtttaacacccaacagcatgatccccgaaaaggagcggcagaacatcgcagagcggctgttgagggtcatgtgtgccgacctgggtgcactgagcgtggtcagcgggaaggagttcctgaagttggcccagaccttagtagacagtggtgcccgctatggggccttctcggtcactgaaatcctgggcaacttcaacacgctggcgctgaagcacctgccacgcatgtacaaccaggtgaaggtgaaagtgacctgtgccttgggcagcaatgcctgcctaggcatcggtgtcacctgccactcccagagtgttggccctgactcctgctacatcctcacagcctaccaggccgagggcaaccacatcaagagctatgtgcttggtgtgaagggtgcggacattcgcgacagcggtgaccttgtgcaccactgggtgcagaacgtgctgtcggagttcgtgatgtcggagatcaggacagtgtacgtgacggattgccgggtgagcacgtccgccttctccaaggccggcatgtgccttcgctgctcagcctgtgccttgaactcggtggtgcagagcgtgctgagcaagcggacactgcaggcccgcagcatgcacgaggtcatcgagctgctcaacgtgtgcgaggacctggcgggctccacgggcctggccaaggagaccttcgggtcgctggaggagacgtctccaccaccctgctggaactcggtgacggactcactgttgctggtgcatgagcgctatgagcagatctgcgagttctacagccgggccaagaagatgaacctcatccagagcctcaacaagcacctgctcagcaacctggcggccatcctgacgccggtgaagcaggcagtcatcgagctgagcaacgagagccagcccaccctgcagctggtgctgcccacctacgtcaggctggagaagctgttcacggccaaggccaacgacgcaggcactgtcagcaagctctgccacctcttcctggaggcgctcaaggagaacttcaaggtgcacccggcccacaaggtggccatgatcctggacccgcagcagaagctgcggcctgtgccaccctaccagcacgaggagatcatcggcaaggtctgtgagctcatcaacgaggtgaaggagtcctgggccgaggaggccgacttcgagcccgctgccaagaagccccgctctgctgccgtcgagaaccccgcagctcaggaagatgatcggctaggcaaaaatgaagtgtacgattacctgcaggagcccctcttccaggctacccctgatctcttccagtactggtcgtgcgttacccaaaagcacacaaaactcgccaagctcgccttctggctcctggcggttccggccgtgggcgccagaagcgggtgtgtaaatatgtgtgaacaagcgcttctaatcaaacggaggcggctgctcagtccagaagatatgaataaactcatgtttctgaaatccaacatgctttaagacttgacttcgggggaaaaaaaaagaaaaagagaagataacattagaaaaaaaccacacaacactgtcacaaagaaaaggaatttaagttctaaacactgtggacctcattataaatgccccctggaaacttaagtgctttttttatatgtgtgtgtgtgcgtgtatgtacacagccacacgtgtgtgcacgtgtctgaacacgtgctgtggttgtgggggtgtgggggggtctctgtgctcatctccatggccagagaaactttgcacacacgcacacacacacacacacacacacacacacacacgaccctggtgcgtgtacatacgcctgtgcttggacgggtgtgcattgaactgggcgtgtcaggaaagctgagcgattgggaaagagggagatgtttcacctccttttctcagtaagggggctttagaagactccgctttcaggtgtgcagattggcagaaagctgatgttgtgaaatgttcaggcagctgagatctgaagtgacttgacgctctctgtccttcaccccggtcctccttttccctctttgaccctcttccagccctcctaccctcctgatcccattgtgcacccccccacacactcggctgctctgctgtggactctccacactgcatcagatggacggtttctgcactggactttgtttcttgttcaccttcagggcattgagctgctgcctttgagataccccttgggtgtcccggggcagccgccttagaaacacacctatctatctccccaaatcaggaaaggagacttaaagagtataaagctgacattttgctttttaatataagagaggagaaaaagacatttttcagagaagtatagatactgtctccactccctaataatttctctccctaacattttagcaatttttaccttgtttgggggttcattttgtttcttcagatttgatttagactctgctaggaggcactgaatgtctataacttatgttttggagttttgtttttttacttgccccttttgttcctcaagtcacactgtaaactagctcatctctgtggtgtactcagtatcctacagtctttcttggccttccctgtacagttcagttttcacatattcgaacggccaagaccaggttcttggctgtgctatttggagaccaggcgttggggaggattcacgggttccacagctgcggggtttggtggccgtaggggaagcagtggtttgggagttctgaatgtaagcgccagagctgccctcctggtccgctgtgcgtggtacccagtgtgcatcacactactcaccccctcccggaccctggcagtccacagcgactccgaagtcagcccatagtcacatccaccacacctcagacctgccacagcctctcctcacttcccaggaccctgaggcttccaggagctctgctgcccacagccctcggggtcctcactcacacctccgacttccaggacggcagtgagcatggtgccttgtggccccaacagttgatgttccgagggtgggatggtgtttggccatgttcgactcgatgctgtgaaagatgtcttcaggcttttctctcctgttcccccagctgtgagcaaattaggttctacacacacagttcggatgccaagggtgacaccccattcccttcacaagaggcggttctgtcacaaatcagcactccacccccaccacacctctcagtgaatgaagtgctggtggtctcactcccctggtgacccttagccgtgggatggggtggttacactaaggcttcaagctgagaatggccatcatggcgggaggctgtttgcaaaggcaccttctgtcatcctggggttggctaagtcaactccaccccttcccaataataaagcatcactcaactgtgagatacctcgactacaaaaagcactgtaccacagccctctccccctgggtccatgacaggagcagggagtaaagttgattgcaaacctcatgaaggcttaggatcatggacctggaacatagtgtttgggggccaagcctgcacactttgcctcatgagaactcacccagctctccccttgaaacttggacacactgaaatggatcaaagtgggccatttccacatttgctccagcaaactgtggtctcaggaactaccatgccatttcctctcctggagaagttctaggtattacctccacaacatttccaactgggggactgagcccacttatcagagaagagccgccatccacactggagcaggaacagggagaaatccagacaggaacctcatgtcacttcctagggaatatgggaagaaacatcagcagactttatgatgtcagttgggcctttggaggcattctggaaggtggcctcagcatcactgatgattgacagatgctacagcaaaaggtccctctagcgttgcttgactgctggggaagggacagtgaccggcactttgacccacacaaggataggagctgcctactttgtgtggtaggtgagagcagagcctgggagcccatcctccctctacttggagcaaagttgtgctggtgatgccccattattgggccagttgattagaaaataggcatttcactttcttggaaagccatcggactaagcccagatgtgcatttagagcactcagcattcttctctttgaagcatgggatgtctgtcctccaggaagagatttgatcttaggttgttacctccctttcacttcttttccacctcaattcaatacttaggggttggcttgcctctgcaggtttgatgtgaatgccactgggtactcagaaagctgtcctctggggctgccttgtccagttagataacaagatagcagatgattgtttcttgcaacctctggttccctccggaaactggtgtcaccaacaggaaaggctgtaccaaggtgccctcttctcagacaggctgttctcagagtgcaaatcctgctgcaactaacagcttaataaaacccaaagatctcacaggtccagccactggcccctttatctccaacaatatccacctcaccaaattctagttcagccaaaggattgagacaggctcttccagttcatctcctggtgtccagcctgaccttcacatctggaaggattttgtcgtctgcctcccagttctgggtccactgtaggtctttccatcacaagcctttgggggatctgggaccaggaatttgggccgtttctaccatattctcagcagcctaaggtggtggcctgctgatgtggagactactcaccttgagccatgtggtccccaggacagaaatggcctttgttttgacatacatggacccaaaaggggaggtgaagaaaacacacctccacctggcaagtttttctccctcatctgaggtcagttgcttcaccaacaaagcccaagccaagaactgcagcgttgagggttgtccctcggagtggagtagcccaaggaatctcaggtccaccaagagcattggtaccatctgggccacgggtggatgcctttgttctggcacagttctccacttcccgattcctggctcagccagccaggcctccctctaatggcatttagtaaccaggaaacaaaacacatgccacctgagcaaaactgcctgcacttcatctctggaggttcgctgcacagaggccacctgccgcatcaccagtgaggaagctttgccaccatcctgcttggcagcttcacacttgacatctgaggattggtttttggctggaaaaagggtaccagggtttcctggcaaggacaggagagcagtgcagtgacacagatgagaagctgtgagtctccaggattcaaggaagccaccaggtgtgcaggctgggaagagacatctctttcagtttgaccctttatctcctgcacttttaaagaaacaccagagaaaaaatctacaaggcgtgtttccactgaagctgaacctctgcctttaggagtcccctatatttgagcaaggccacctgcttcccctggacttgagctggactccttgaagagtgggcttctggagagatgttaggaatatagcacatgctctctgggggccacagggtcattgggaaggtttgaaatgaagatgggatgtggctggaacagcctgtgagatggctccattggggacactcccctcatcttgtcatcacgatggatatgctggaagaggaggtgtcccagtgagccgcccgaagttcatagctttgccctcgccttggcaacagcggcaatgcctctatctctgggatgcatcttaaggagggctcctaacaaggccgatgatttagacagaacaagagactaagtaaggtccggctatcccgtggagccagtagtaggtgggagctcctgtccccgccagccctgctccagcccccgtgtccagctgggccagtggaagaactgggaaggaggaagcccctccctttcactgtggctaatgtttgctaggccagttatggtgaaccaatgatacagtgttttccctcttaacgttcccctcctggttttgccttttcagggttttctgggggattttgttgtagtagttgcttttcttcctctctcatttgggtttgaggattgtggtcgggggagccctggctttcaccaaaggagcccagtggtttctgtggaagaggcgcccactcccactttaatgagggtgaagattgtcaggtcactgtttgacatattcatgccccgtcccttccccccccacccccccgcccacccaccacgggtgtcgctttaaagagtcaattcttgtacagagaaggatttgctaggtttgcatttgggtgttagcatcacgacccacgagggccctgcccaaccgtgcgtcccatggggcaccttgactcttcaaaccaaaattccttaaaggggcacagcccagccttgtccgcaacctcaggggcctgggattcctgtggcgcttcctgaattccaggttggcacagatgatgaggtctgagaccagccggaaggaggggctcctgccataacccaggtgccagccggtctccgcctaggaccttccctcccgcccagccagggtgggcggcatcctacgcggtgaaacgagctcatggactgacccggggctgggcctcgccagccaggagagagcgagggccgcacggcagggctggcccaggcagctcgtccagggccattcagatcccaagcatcaggaaatcattttgtacaaccacccgaagcagagatattttttaagaagcgtaaattattttcagttgttttctgatcctgcctttttcttttccccacaacttcacgccagtgagtcgttcacatcaggtaaatcttgagaaagccttggtgccctcctccccaccccccactcagtaaccacgtgcgtgcacccccgcatcctttctcagtagttaagacgttctaggcaataccatagacacatctgactgtgtctctctctttgagtgcaagaaactcaagtcatcttaaaaaaaaaaaaatacaaaaaaaatttacaaaaaaacaaacacaaaaaaaatatcttttttaggccagagttttctacaggtattaatgaatatttttcttaatccttataagttttatgtgtttaatatttcttaataccggtagcattaatttatacttttgtagcaacacaatatttttataaacagccggtgcttggctcaagtcttcacgaggggtttaggcagggccatcttggggaccctgtgtaccatgtactgtatttaaaaaaaaaaaaagttacctattgtcacacttgctgtgttaattaacaaaagatgttgtgtgcggtctcctgtatcggtgtggatccaacagctctccagggagtcacattgcatgggggttgagttgacggttcttgtgatatgtaaacccccgagaccaaacttgagggtttatttagggttttctgtttgtcctttgggtttttgtttcactttgttttggtgccgtttctccatttacagccaaatcagtttcatgatgttcaaaacatttactgatgtcaaatggaggaaaggaacagaaaaaaagatttttacaaagtaataaaatttaaaactgagctgtttaatgttgctgtttttacctgtctgttcttgtccaaaagtggaacattcccagggagaagaggaaggttccactcggttctttaagtcgccaaaagccccagcccgggattcagtacctcccctgccccccgaattcttgcagcactatttcccagttggttgatgccaaggcaaaaagataacttttaacagttagagaggatcagttgcttaaatgatttcatgtcagtgttgtatttatggttttacaataaaacaacctttagg

SEQ ID NO: 203232 - DNA, 1156 bp, Homo sapiens
  Payload ID: 20076
  Gene Name: zinc finger protein 618
  ENST ID: ENST00000374124
  CDS Start-End: 32-1156
gcgccggggccgcctcctcccgcacggacccatgaaccagccgggcggcgcggcggctccgcaggctgacggagccagtgcagccggaaggaaaagcactgcgagcagggagcgcttgaagcgcagccagaagagcaccaaggtggagggcccagagccagtgccagccgaggcctcgctgagtgccgagcaaggaacgatgacggaggtgaaggtgaagacagagctgcccgatgactacatccaggaggtgatctggcagggcgaggccaaggaggagaagaaggcggtcagcaaggatgggaccagcgacgtgcctgccgagatctgcgtggtgatcggcggcgtccgcaaccagcagacccttgggtcttacgaatgcggaatctgtggcaagaagtacaagtattacaactgcttccagacccacgtgcgggcgcaccgagacaccgaagccacctcaggggagggagcctcccaaagcaacaatttcaggtacacatgtgatatctgcgggaagaagtacaaatactacagctgtttccaagagcaccgagacctgcacgcagtggatgtgtttagtgtggaaggggcccctgagaaccgggcagaccccttcgaccaaggtgtcgtggccacggacgaggtgaaggaggagcccccggagccattccagaaaatcgggccaatgaacaatattacatcagacatttttaagaagaaagaagttaggcagtgccaaaagagagaaactggcaattacacctgtgaattctgcggcaaacagtacaagtactacactccctaccaggagcatgtggccttacacgcccccatcagtactgcccccgggtgggagccaccggatgatccagacacgggctctgagtgttcacatccagaggtctccccatctccacgcttcgtggcagcgaagacccagacgaaccagtcggggaaaaaagctccggcctccgtggtccgatgtgccaccctcttacaccgcacccctccagccacccaaacccagacgttccgcactccaaattcgggatctccggcgagcaaggcaaccgcagaaagcgctttcagtcggagagtagaaggcaaagcacaaaaccactttgaagagacgaacagcagttcgcagaactcc

SEQ ID NO: 203233 - DNA, 3018 bp, Homo sapiens
  Payload ID: 20076
  Gene Name: zinc finger protein 618
  Uniprot ID: Q5T7W0
  ENST ID: ENST00000374126
  CDS Start-End: 100-2964
ggcggcggcggcggcggcggcggcggcattgtgcgcgcaccagcagcccggcccgggaggagcaggacgcgccggggccgcctcctcccgcacggacccatgaaccagccgggcggcgcggcggctccgcaggctgacggagccagtgcagccggaaggaaaagcactgcgagcagggagcgcttgaagcgcagccagaagagcaccaaggtggagggcccagagccagtgccagccgaggcctcgctgagtgccgagcaaggaacgatgacggaggtgaaggtgaagacagagctgcccgatgactacatccaggaggtgatctggcagggcgaggccaaggaggagaagaaggcggtcagcaaggatgggaccagcgacgtgcctgccgagatctgcgtggtgatcggcggcgtccgcaaccagcagacccttgatggaaaagcgcccgaaggcagcccccacggtggatctgtgcgaagccggtattcagggacctggatttttgaccaagcattgagatatgcatctgggtcttacgaatgcggaatctgtggcaagaagtacaagtattacaactgcttccagacccacgtgcgggcgcaccgagacaccgaagccacctcaggggagggagcctcccaaagcaacaatttcaggtacacatgtgatatctgcgggaagaagtacaaatactacagctgtttccaagagcaccgagacctgcacgcagtggatgtgtttagtgtggaaggggcccctgagaaccgggcagaccccttcgaccaaggtgtcgtggccacggacgaggtgaaggaggagcccccggagccattccagaaaatcgggccaaaaactggcaattacacctgtgaattctgcggcaaacagtacaagtactacactccctaccaggagcatgtggccttacacgcccccatcagtactgcccccgggtgggagccaccggatgatccagacacgggctctgagtgttcacatccagaggtctccccatctccacgcttcgtggcagcgaagacccagacgaaccagtcggggaaaaaagctccggcctccgtggtccgatgtgccaccctcttacaccgcacccctccagccacccaaacccagacgttccgcactccaaattcgggatctccggcgagcaaggcaaccgcagcagaaagcgctttcagtcggagagtagaaggcaaagcacaaaaccactttgaagagacgaacagcagttcgcagaactccagcgaaccctacacctgcggcgcctgtgggatccagttccagttctacaacaacctgttggagcacatgcagtcccatgcagctgacaatgaaaacaacattgcctccaaccagtcccgatcgccacctgctgttgtagaagagaagtggaaacctcaggcccagaggaacagtgccaataacaccactaccagtggtttaacacccaacagcatgatccccgaaaaggagcggcagaacatcgcagagcggctgttgagggtcatgtgtgccgacctgggtgcactgagcgtggtcagcgggaaggagttcctgaagttggcccagaccttagtagacagtggtgcccgctatggggccttctcggtcactgaaatcctgggcaacttcaacacgctggcgctgaagcacctgccacgcatgtacaaccaggtgaaggtgaaagtgacctgtgccttgggcagcaatgcctgcctaggcatcggtgtcacctgccactcccagagtgttggccctgactcctgctacatcctcacagcctaccaggccgagggcaaccacatcaagagctatgtgcttggtgtgaagggtgcggacattcgcgacagcggtgaccttgtgcaccactgggtgcagaacgtgctgtcggagttcgtgatgtcggagatcaggacagtgtacgtgacggattgccgggtgagcacgtccgccttctccaaggccggcatgtgccttcgctgctcagcctgtgccttgaactcggtggtgcagagcgtgctgagcaagcggacactgcaggcccgcagcatgcacgaggtcatcgagctgctcaacgtgtgcgaggacctggcgggctccacgggcctggccaaggagaccttcgggtcgctggaggagacgtctccaccaccctgctggaactcggtgacggactcactgttgctggtgcatgagcgctatgagcagatctgcgagttctacagccgggccaagaagatgaacctcatccagagcctcaacaagcacctgctcagcaacctggcggccatcctgacgccggtgaagcaggcagtcatcgagctgagcaacgagagccagcccaccctgcagctggtgctgcccacctacgtcaggctggagaagctgttcacggccaaggccaacgacgcaggcactgtcagcaagctctgccacctcttcctggaggcgctcaaggagaacttcaaggtgcacccggcccacaaggtggccatgatcctggacccgcagcagaagctgcggcctgtgccaccctaccagcacgaggagatcatcggcaaggtctgtgagctcatcaacgaggtgaaggagtcctgggccgaggaggccgacttcgagcccgctgccaagaagccccgctctgctgccgtcgagaaccccgcagctcaggaagatgatcggctaggcaaaaatgaagtgtacgattacctgcaggagcccctcttccaggctacccctgatctcttccagtactggtcgtgcgttacccaaaagcacacaaaactcgccaagctcgccttctggctcctggcggttccggccgtgggcgccagaagcgggtgtgtaaatatgtgtgaacaagcgcttctaatcaaacggaggcggctgctcagtccagaagatatgaataaactcatgtttctgaaatccaacatgctttaagacttgacttcgggggaaaaaaaaagaaaaagagaagataacattagaaaaaaa

SEQ ID NO: 203234 - DNA, 942 bp, Homo sapiens
  Payload ID: 20076
  Gene Name: zinc finger protein 618
  ENST ID: ENST00000452710
  CDS Start-End: 32-942
gcgccggggccgcctcctcccgcacggacccatgaaccagccgggcggcgcggcggctccgcaggctgacggagccagtgcagccggaaggaaaagcactgcgagcagggagcgcttgaagcgcagccagaagagcaccaaggtggagggcccagagccagtgccagccgaggcctcgctgagtgccgagcaaggaacgatgacggaggtgaaggtgaagacagagctgcccgatgactacatccaggaggtgatctggcagggcgaggccaaggaggagaagaaggcggtcagcaaggatgggaccagcgacgtgcctgccgagatctgcgtggtgatcggcggcgtccgcaaccagcagacccttgggtcttacgaatgcggaatctgtggcaagaagtacaagtattacaactgcttccagacccacgtgcgggcgcaccgagacaccgaagccacctcaggggagggagcctcccaaagcaacaatttcaggtacacatgtgatatctgcgggaagaagtacaaatactacagctgtttccaagagcaccgagacctgcacgcagtggatgaccccttcgaccaaggtgtcgtggccacggacgaggtgaaggaggagcccccggagccattccagaaaatcgggccaatgaacaatattacatcagacatttttaagaagaaagaagttaggcagtgccaaaagagagaaactggcaattacacctgtgaattctgcggcaaacagtacaagtactacactccctaccaggagcatgtggccttacacgcccccatcaccacccaaacccagacgttccgcactccaaattcgggatctccggcgagcaaggcaaccgcagaaagcgctttcagtcggagagtagaaggcaaagcacaaaaccactttgaagagacgaacagcagttcgcagaactc

SEQ ID NO: 203235 - DNA, 9289 bp, Homo sapiens
  Payload ID: 20076
  Gene Name: zinc finger protein 618
  Uniprot ID: Q5T7W0
  ENST ID: ENST00000615615
  CDS Start-End: 100-2865
ggcggcggcggcggcggcggcggcggcattgtgcgcgcaccagcagcccggcccgggaggagcaggacgcgccggggccgcctcctcccgcacggacccatgaaccagccgggcggcgcggcggctccgcaggctgacggagccagtgcagccggaaggaaaagcactgcgagcagggagcgcttgaagcgcagccagaagagcaccaaggtggagggcccagagccagtgccagccgaggcctcgctgagtgccgagcaaggaacgatgacggaggtgaaggtgaagacagagctgcccgatgactacatccaggaggtgatctggcagggcgaggccaaggaggagaagaaggcggtcagcaaggatgggaccagcgacgtgcctgccgagatctgcgtggtgatcggcggcgtccgcaaccagcagacccttgggtcttacgaatgcggaatctgtggcaagaagtacaagtattacaactgcttccagacccacgtgcgggcgcaccgagacaccgaagccacctcaggggagggagcctcccaaagcaacaatttcaggtacacatgtgatatctgcgggaagaagtacaaatactacagctgtttccaagagcaccgagacctgcacgcagtggatgtgtttagtgtggaaggggcccctgagaaccgggcagaccccttcgaccaaggtgtcgtggccacggacgaggtgaaggaggagcccccggagccattccagaaaatcgggccaaaaactggcaattacacctgtgaattctgcggcaaacagtacaagtactacactccctaccaggagcatgtggccttacacgcccccatcagtactgcccccgggtgggagccaccggatgatccagacacgggctctgagtgttcacatccagaggtctccccatctccacgcttcgtggcagcgaagacccagacgaaccagtcggggaaaaaagctccggcctccgtggtccgatgtgccaccctcttacaccgcacccctccagccacccaaacccagacgttccgcactccaaattcgggatctccggcgagcaaggcaaccgcagaaagcgctttcagtcggagagtagaaggcaaagcacaaaaccactttgaagagacgaacagcagttcgcagaactccagcgaaccctacacctgcggcgcctgtgggatccagttccagttctacaacaacctgttggagcacatgcagtcccatgcagctgacaatgaaaacaacattgcctccaaccagtcccgatcgccacctgctgttgtagaagagaagtggaaacctcaggcccagaggaacagtgccaataacaccactaccagtggtttaacacccaacagcatgatccccgaaaaggagcggcagaacatcgcagagcggctgttgagggtcatgtgtgccgacctgggtgcactgagcgtggtcagcgggaaggagttcctgaagttggcccagaccttagtagacagtggtgcccgctatggggccttctcggtcactgaaatcctgggcaacttcaacacgctggcgctgaagcacctgccacgcatgtacaaccaggtgaaggtgaaagtgacctgtgccttgggcagcaatgcctgcctaggcatcggtgtcacctgccactcccagagtgttggccctgactcctgctacatcctcacagcctaccaggccgagggcaaccacatcaagagctatgtgcttggtgtgaagggtgcggacattcgcgacagcggtgaccttgtgcaccactgggtgcagaacgtgctgtcggagttcgtgatgtcggagatcaggacagtgtacgtgacggattgccgggtgagcacgtccgccttctccaaggccggcatgtgccttcgctgctcagcctgtgccttgaactcggtggtgcagagcgtgctgagcaagcggacactgcaggcccgcagcatgcacgaggtcatcgagctgctcaacgtgtgcgaggacctggcgggctccacgggcctggccaaggagaccttcgggtcgctggaggagacgtctccaccaccctgctggaactcggtgacggactcactgttgctggtgcatgagcgctatgagcagatctgcgagttctacagccgggccaagaagatgaacctcatccagagcctcaacaagcacctgctcagcaacctggcggccatcctgacgccggtgaagcaggcagtcatcgagctgagcaacgagagccagcccaccctgcagctggtgctgcccacctacgtcaggctggagaagctgttcacggccaaggccaacgacgcaggcactgtcagcaagctctgccacctcttcctggaggcgctcaaggagaacttcaaggtgcacccggcccacaaggtggccatgatcctggacccgcagcagaagctgcggcctgtgccaccctaccagcacgaggagatcatcggcaaggtctgtgagctcatcaacgaggtgaaggagtcctgggccgaggaggccgacttcgagcccgctgccaagaagccccgctctgctgccgtcgagaaccccgcagctcaggaagatgatcggctaggcaaaaatgaagtgtacgattacctgcaggagcccctcttccaggctacccctgatctcttccagtactggtcgtgcgttacccaaaagcacacaaaactcgccaagctcgccttctggctcctggcggttccggccgtgggcgccagaagcgggtgtgtaaatatgtgtgaacaagcgcttctaatcaaacggaggcggctgctcagtccagaagatatgaataaactcatgtttctgaaatccaacatgctttaagacttgacttcgggggaaaaaaaaagaaaaagagaagataacattagaaaaaaaccacacaacactgtcacaaagaaaaggaatttaagttctaaacactgtggacctcattataaatgccccctggaaacttaagtgctttttttatatgtgtgtgtgtgcgtgtatgtacacagccacacgtgtgtgcacgtgtctgaacacgtgctgtggttgtgggggtgtgggggggtctctgtgctcatctccatggccagagaaactttgcacacacgcacacacacacacacacacacacacacacacacgaccctggtgcgtgtacatacgcctgtgcttggacgggtgtgcattgaactgggcgtgtcaggaaagctgagcgattgggaaagagggagatgtttcacctccttttctcagtaagggggctttagaagactccgctttcaggtgtgcagattggcagaaagctgatgttgtgaaatgttcaggcagctgagatctgaagtgacttgacgctctctgtccttcaccccggtcctccttttccctctttgaccctcttccagccctcctaccctcctgatcccattgtgcacccccccacacactcggctgctctgctgtggactctccacactgcatcagatggacggtttctgcactggactttgtttcttgttcaccttcagggcattgagctgctgcctttgagataccccttgggtgtcccggggcagccgccttagaaacacacctatctatctccccaaatcaggaaaggagacttaaagagtataaagctgacattttgctttttaatataagagaggagaaaaagacatttttcagagaagtatagatactgtctccactccctaataatttctctccctaacattttagcaatttttaccttgtttgggggttcattttgtttcttcagatttgatttagactctgctaggaggcactgaatgtctataacttatgttttggagttttgtttttttacttgccccttttgttcctcaagtcacactgtaaactagctcatctctgtggtgtactcagtatcctacagtctttcttggccttccctgtacagttcagttttcacatattcgaacggccaagaccaggttcttggctgtgctatttggagaccaggcgttggggaggattcacgggttccacagctgcggggtttggtggccgtaggggaagcagtggtttgggagttctgaatgtaagcgccagagctgccctcctggtccgctgtgcgtggtacccagtgtgcatcacactactcaccccctcccggaccctggcagtccacagcgactccgaagtcagcccatagtcacatccaccacacctcagacctgccacagcctctcctcacttcccaggaccctgaggcttccaggagctctgctgcccacagccctcggggtcctcactcacacctccgacttccaggacggcagtgagcatggtgccttgtggccccaacagttgatgttccgagggtgggatggtgtttggccatgttcgactcgatgctgtgaaagatgtcttcaggcttttctctcctgttcccccagctgtgagcaaattaggttctacacacacagttcggatgccaagggtgacaccccattcccttcacaagaggcggttctgtcacaaatcagcactccacccccaccacacctctcagtgaatgaagtgctggtggtctcactcccctggtgacccttagccgtgggatggggtggttacactaaggcttcaagctgagaatggccatcatggcgggaggctgtttgcaaaggcaccttctgtcatcctggggttggctaagtcaactccaccccttcccaataataaagcatcactcaactgtgagatacctcgactacaaaaagcactgtaccacagccctctccccctgggtccatgacaggagcagggagtaaagttgattgcaaacctcatgaaggcttaggatcatggacctggaacatagtgtttgggggccaagcctgcacactttgcctcatgagaactcacccagctctccccttgaaacttggacacactgaaatggatcaaagtgggccatttccacatttgctccagcaaactgtggtctcaggaactaccatgccatttcctctcctggagaagttctaggtattacctccacaacatttccaactgggggactgagcccacttatcagagaagagccgccatccacactggagcaggaacagggagaaatccagacaggaacctcatgtcacttcctagggaatatgggaagaaacatcagcagactttatgatgtcagttgggcctttggaggcattctggaaggtggcctcagcatcactgatgattgacagatgctacagcaaaaggtccctctagcgttgcttgactgctggggaagggacagtgaccggcactttgacccacacaaggataggagctgcctactttgtgtggtaggtgagagcagagcctgggagcccatcctccctctacttggagcaaagttgtgctggtgatgccccattattgggccagttgattagaaaataggcatttcactttcttggaaagccatcggactaagcccagatgtgcatttagagcactcagcattcttctctttgaagcatgggatgtctgtcctccaggaagagatttgatcttaggttgttacctccctttcacttcttttccacctcaattcaatacttaggggttggcttgcctctgcaggtttgatgtgaatgccactgggtactcagaaagctgtcctctggggctgccttgtccagttagataacaagatagcagatgattgtttcttgcaacctctggttccctccggaaactggtgtcaccaacaggaaaggctgtaccaaggtgccctcttctcagacaggctgttctcagagtgcaaatcctgctgcaactaacagcttaataaaacccaaagatctcacaggtccagccactggcccctttatctccaacaatatccacctcaccaaattctagttcagccaaaggattgagacaggctcttccagttcatctcctggtgtccagcctgaccttcacatctggaaggattttgtcgtctgcctcccagttctgggtccactgtaggtctttccatcacaagcctttgggggatctgggaccaggaatttgggccgtttctaccatattctcagcagcctaaggtggtggcctgctgatgtggagactactcaccttgagccatgtggtccccaggacagaaatggcctttgttttgacatacatggacccaaaaggggaggtgaagaaaacacacctccacctggcaagtttttctccctcatctgaggtcagttgcttcaccaacaaagcccaagccaagaactgcagcgttgagggttgtccctcggagtggagtagcccaaggaatctcaggtccaccaagagcattggtaccatctgggccacgggtggatgcctttgttctggcacagttctccacttcccgattcctggctcagccagccaggcctccctctaatggcatttagtaaccaggaaacaaaacacatgccacctgagcaaaactgcctgcacttcatctctggaggttcgctgcacagaggccacctgccgcatcaccagtgaggaagctttgccaccatcctgcttggcagcttcacacttgacatctgaggattggtttttggctggaaaaagggtaccagggtttcctggcaaggacaggagagcagtgcagtgacacagatgagaagctgtgagtctccaggattcaaggaagccaccaggtgtgcaggctgggaagagacatctctttcagtttgaccctttatctcctgcacttttaaagaaacaccagagaaaaaatctacaaggcgtgtttccactgaagctgaacctctgcctttaggagtcccctatatttgagcaaggccacctgcttcccctggacttgagctggactccttgaagagtgggcttctggagagatgttaggaatatagcacatgctctctgggggccacagggtcattgggaaggtttgaaatgaagatgggatgtggctggaacagcctgtgagatggctccattggggacactcccctcatcttgtcatcacgatggatatgctggaagaggaggtgtcccagtgagccgcccgaagttcatagctttgccctcgccttggcaacagcggcaatgcctctatctctgggatgcatcttaaggagggctcctaacaaggccgatgatttagacagaacaagagactaagtaaggtccggctatcccgtggagccagtagtaggtgggagctcctgtccccgccagccctgctccagcccccgtgtccagctgggccagtggaagaactgggaaggaggaagcccctccctttcactgtggctaatgtttgctaggccagttatggtgaaccaatgatacagtgttttccctcttaacgttcccctcctggttttgccttttcagggttttctgggggattttgttgtagtagttgcttttcttcctctctcatttgggtttgaggattgtggtcgggggagccctggctttcaccaaaggagcccagtggtttctgtggaagaggcgcccactcccactttaatgagggtgaagattgtcaggtcactgtttgacatattcatgccccgtcccttccccccccacccccccgcccacccaccacgggtgtcgctttaaagagtcaattcttgtacagagaaggatttgctaggtttgcatttgggtgttagcatcacgacccacgagggccctgcccaaccgtgcgtcccatggggcaccttgactcttcaaaccaaaattccttaaaggggcacagcccagccttgtccgcaacctcaggggcctgggattcctgtggcgcttcctgaattccaggttggcacagatgatgaggtctgagaccagccggaaggaggggctcctgccataacccaggtgccagccggtctccgcctaggaccttccctcccgcccagccagggtgggcggcatcctacgcggtgaaacgagctcatggactgacccggggctgggcctcgccagccaggagagagcgagggccgcacggcagggctggcccaggcagctcgtccagggccattcagatcccaagcatcaggaaatcattttgtacaaccacccgaagcagagatattttttaagaagcgtaaattattttcagttgttttctgatcctgcctttttcttttccccacaacttcacgccagtgagtcgttcacatcaggtaaatcttgagaaagccttggtgccctcctccccaccccccactcagtaaccacgtgcgtgcacccccgcatcctttctcagtagttaagacgttctaggcaataccatagacacatctgactgtgtctctctctttgagtgcaagaaactcaagtcatcttaaaaaaaaaaaaatacaaaaaaaatttacaaaaaaacaaacacaaaaaaaatatcttttttaggccagagttttctacaggtattaatgaatatttttcttaatccttataagttttatgtgtttaatatttcttaataccggtagcattaatttatacttttgtagcaacacaatatttttataaacagccggtgcttggctcaagtcttcacgaggggtttaggcagggccatcttggggaccctgtgtaccatgtactgtatttaaaaaaaaaaaaagttacctattgtcacacttgctgtgttaattaacaaaagatgttgtgtgcggtctcctgtatcggtgtggatccaacagctctccagggagtcacattgcatgggggttgagttgacggttcttgtgatatgtaaacccccgagaccaaacttgagggtttatttagggttttctgtttgtcctttgggtttttgtttcactttgttttggtgccgtttctccatttacagccaaatcagtttcatgatgttcaaaacatttactgatgtcaaatggaggaaaggaacagaaaaaaagatttttacaaagtaataaaatttaaaactgagctgtttaatgttgctgtttttacctgtctgttcttgtccaaaagtggaacattcccagggagaagaggaaggttccactcggttctttaagtcgccaaaagccccagcccgggattcagtacctcccctgccccccgaattcttgcagcactatttcccagttggttgatgccaaggcaaaaagataacttttaacagttagagaggatcagttgcttaaatgatttcatgtcagtgttgtatttatggttttacaataaaacaacctttagg

SEQ ID NO: 203236 - DNA, 2233 bp, Homo sapiens
  Payload ID: 20077
  Gene Name: zinc finger protein 619
  Uniprot ID: Q8N2I2
  ENST ID: ENST00000314686
  CDS Start-End: 406-2088
agagaggctgtagggaccgacggccggccagctaatgcttccgtcttggccaccttgcgagcgctcgggttgagtttcccgggcttccctgactcggctacctgttctggaggtcaggctttgggcccttgcagaggtcgccgaggggcccgcgccgccgccagagcctgggcccagtccccagtcttcagagacgccctcgaccttcctgctccgaggagctggcctgatgtcctcgggtcgcgctccgcaggttcttactttttcaaacctagagggcagtgcatgaagccaggggtcatcagccatgctccagacagtgtggttccagggcttgggcaggaacctgttgtttcaggagccagtaacctttgaggatgtggctgtgtacttcacccagaatgaatgggccagcctgcaccctacgcagagggccctatacagggaggtgatgctggagaattatgcaaatgtgacttccttgtcagcatttccattccccaaaccagatctgatattccagctggagcaaggagaagcagcatggggcccagatccctggacacttgctgggggagaggccctgagaggcatgtgcacaggctggagtgcaatggcgtgatcttcactcaccgcaacctctgccttccaggtggtaaaaccaagactgagaatgaggaaaaaactgcacagctaaacatttctaaagaatcagagtcccacagactgatagtggagggactgctgatggacgttccccagcaccctgacttcaaggacaggttagagaagtcacagctacatgatacagggaataaaacaaagataggggattgcacagatttgacagtccaggatcatgaatcttccaccactgaaagggaggagatagccaggaaattggaagaaagtagtgtcagcacacatctcattacaaagcagggttttgccaaagaacaggtgttttataaatgtggtgagtgtggcagttactacaacccacattcagactttcacctgcatcagagagttcacactaatgagaagccctacacatgcaaagaatgtgggaaaaccttcagatataactcaaaactgtcacggcatcagaaaatccacactggagagaaaccatactcatgtgaggaatgtggacaagccttcagtcaaaattcccaccttcttcagcatcagaagctccatggtggacagaggccctatgaatgtactgactgtggtaaaaccttcagttataattcaaaactgattcggcatcagagaatccatactggggagaagccctttaaatgtaaggaatgtgggaaagccttcagttgtagctatgactgcatcatccatgaacgaattcacaatggggagaagccctatgaatgtaaggagtgtgggaagagtttgagttctaattcagttctgattcagcatcagagaatccacactggggagaaaccttatgaatgtaaagagtgtggcaaggccttccaccgcagttcggtatttcttcagcaccagaggttccacactggggaacaactctacaaatgtaatgaatgttggaaaactttcagctgtagctcccgcttcatagtgcatcagagaatccacaatggggagaaaccctatgaatgccaggaatgtgggaagacattcagtcaaaagatcactctggttcagcatcagcgagttcacactggggagaaaccttatgagtgtaaggagtgcgggaaagccttcagatggaatgcaagtttcatccagcatcagaagtggcatactaggaagaaactcatcaatggaacagggctatccgcagttaagccctactgtccctgcgccatcctctctcctctgcctccccaacatacctgctctgccctagccccaccagggcctcccttatcttcttcacatgcagtggtacttcctccctctgtgcctttcttcctgctgcttccctcatctgaaaaggccaacccttcacctgtccaaatagcacatttttttcaggatctcgcttttcctgggaagtcatcccttcagagcccgaatcctttgtctcactccctgtaagccccgtcacgttctcaaaatcctttgcacctcaagttagggattccactggtctcctgattgtgtctattgatattcctctggtcttgtcttgtataagttgttactgttttcctaacttcattttaaattctcacgcttaagg

SEQ ID NO: 203237 - DNA, 1749 bp, Homo sapiens
  Payload ID: 20077
  Gene Name: zinc finger protein 619
  Uniprot ID: Q8N2I2
  ENST ID: ENST00000432264
  CDS Start-End: 1-1731
atgctccagacagtgtggttccagggcttgggcaggaacctgttgtttcaggagccagtaacctttgaggatgtggctgtgtacttcacccagaatgaatgggccagcctgcaccctacgcagagggccctatacagggaggtgatgctggagaattatgcaaatgtgacttccttgtcagcatttccattccccaaaccagatctgatattccagctggagcaaggagaagcagcatggggcccagatccctggacacttgctgggggagaggccctgagaggcatgtgcacaggtggtaaaaccaagactgagaatgaggaaaaaactgcacagctaaacatttctaaagaatcagagtcccacagactgatagtggagggactgctgatggacgttccccagcaccctgacttcaaggacaggttagagaagtcacagctacatgatacagggaataaaacaaagataggggattgcacagatttgacagtccaggatcatgaatcttccaccactgaaagggaggagatagccaggaaattggaagaaagtagtgtcagcacacatctcattacaaagcagggttttgccaaagaacaggtgttttataaatgtggtgagtgtggcagttactacaacccacattcagactttcacctgcatcagagagttcacactaatgagaagccctacacatgcaaagaatgtgggaaaaccttcagatataactcaaaactgtcacggcatcagaaaatccacactggagagaaaccatactcatgtgaggaatgtggacaagccttcagtcaaaattcccaccttcttcagcatcagaagctccatggtggacagaggccctatgaatgtactgactgtggtaaaaccttcagttataattcaaaactgattcggcatcagagaatccatactggggagaagccctttaaatgtaaggaatgtgggaaagccttcagttgtagctatgactgcatcatccatgaacgaattcacaatggggagaagccctatgaatgtaaggagtgtgggaagagtttgagttctaattcagttctgattcagcatcagagaatccacactggggagaaaccttatgaatgtaaagagtgtggcaaggccttccaccgcagttcggtatttcttcagcaccagaggttccacactggggaacaactctacaaatgtaatgaatgttggaaaactttcagctgtagctcccgcttcatagtgcatcagagaatccacaatggggagaaaccctatgaatgccaggaatgtgggaagacattcagtcaaaagatcactctggttcagcatcagcgagttcacactggggagaaaccttatgagtgtaaggagtgcgggaaagccttcagatggaatgcaagtttcatccagcatcagaagtggcatactaggaagaaactcatcaatggaacagggctatccgcagttaagccctactgtccctgcgccatcctctctcctctgcctccccaacatacctgctctgccctagccccaccagggcctcccttatcttcttcacatgcagtggtacttcctccctctgtgcctttcttcctgctgcttccctcatctgaaaaggccaacccttcacctgtccaaatagcacatttttttcaggatctcgcttttcctgggaagtcatcccttcagagcccgaatcctttgtctcactccctgtaagccccgtcacgttctcaa

SEQ ID NO: 203238 - DNA, 2192 bp, Homo sapiens
  Payload ID: 20077
  Gene Name: zinc finger protein 619
  Uniprot ID: Q8N2I2
  ENST ID: ENST00000456778
  CDS Start-End: 257-1855
agctaatgcttccgtcttggccaccttgcgagcgctcgggttgagtttcccgggcttccctgactcggctacctgttctggaggtcaggctttgggcccttgcagaggtcgccgaggggcccgcgccgccgccagagcctgggcccagtccccagtcttcagagacgccctcgaccttcctgctccgaggagctggcctgatgtcctcgggtcgcgctccgcaggttcttactttttcaaacctagagggcagtgcatgaagccaggggtcatcagccatgctccagacagtgtggttccagcagcatttccattccccaaaccagatctgatattccagctggagcaaggagaagcagcatggggcccagatccctggacacttgctgggggagaggccctgagaggcatgtgcacaggtggtaaaaccaagactgagaatgaggaaaaaactgcacagctaaacatttctaaagaatcagagtcccacagactgatagtggagggactgctgatggacgttccccagcaccctgacttcaaggacaggttagagaagtcacagctacatgatacagggaataaaacaaagataggggattgcacagatttgacagtccaggatcatgaatcttccaccactgaaagggaggagatagccaggaaattggaagaaagtagtgtcagcacacatctcattacaaagcagggttttgccaaagaacaggtgttttataaatgtggtgagtgtggcagttactacaacccacattcagactttcacctgcatcagagagttcacactaatgagaagccctacacatgcaaagaatgtgggaaaaccttcagatataactcaaaactgtcacggcatcagaaaatccacactggagagaaaccatactcatgtgaggaatgtggacaagccttcagtcaaaattcccaccttcttcagcatcagaagctccatggtggacagaggccctatgaatgtactgactgtggtaaaaccttcagttataattcaaaactgattcggcatcagagaatccatactggggagaagccctttaaatgtaaggaatgtgggaaagccttcagttgtagctatgactgcatcatccatgaacgaattcacaatggggagaagccctatgaatgtaaggagtgtgggaagagtttgagttctaattcagttctgattcagcatcagagaatccacactggggagaaaccttatgaatgtaaagagtgtggcaaggccttccaccgcagttcggtatttcttcagcaccagaggttccacactggggaacaactctacaaatgtaatgaatgttggaaaactttcagctgtagctcccgcttcatagtgcatcagagaatccacaatggggagaaaccctatgaatgccaggaatgtgggaagacattcagtcaaaagatcactctggttcagcatcagcgagttcacactggggagaaaccttatgagtgtaaggagtgcgggaaagccttcagatggaatgcaagtttcatccagcatcagaagtggcatactaggaagaaactcatcaatggaacagggctatccgcagttaagccctactgtccctgcgccatcctctctcctctgcctccccaacatacctgctctgccctagccccaccagggcctcccttatcttcttcacatgcagtggtacttcctccctctgtgcctttcttcctgctgcttccctcatctgaaaaggccaacccttcacctgtccaaatagcacatttttttcaggatctcgcttttcctgggaagtcatcccttcagagcccgaatcctttgtctcactccctgtaagccccgtcacgttctcaaaatcctttgcacctcaagttagggattccactggtctcctgattgtgtctattgatattcctctggtcttgtcttgtataagttgttactgttttcctaacttcattttaaattctcacgcttaaggaccatgtttgattagtttcttttatcccccggtaggaaatggcagtacttattctttatcgtgtccacatttgggctgtattatcagtctgcatctctcttctggggctactggagttggaagagtttgcagaacattttggggtttagggcatatggcattatgattatgatgagatggggcattataatt

SEQ ID NO: 203239 - DNA, 4104 bp, Homo sapiens
  Payload ID: 20077
  Gene Name: zinc finger protein 619
  ENST ID: ENST00000429348
  CDS Start-End: 406-2109
agagaggctgtagggaccgacggccggccagctaatgcttccgtcttggccaccttgcgagcgctcgggttgagtttcccgggcttccctgactcggctacctgttctggaggtcaggctttgggcccttgcagaggtcgccgaggggcccgcgccgccgccagagcctgggcccagtccccagtcttcagagacgccctcgaccttcctgctccgaggagctggcctgatgtcctcgggtcgcgctccgcaggttcttactttttcaaacctagagggcagtgcatgaagccaggggtcatcagccatgctccagacagtgtggttccagggcttgggcaggaacctgttgtttcaggagccagtaacctttgaggatgtggctgtgtacttcacccagaatgaatgggccagcctgcaccctacgcagagggccctatacagggaggtgatgctggagaattatgcaaatgtgacttccttgtcagcatttccattccccaaaccagatctgatattccagctggagcaaggagaagcagcatggggcccagatccctggacacttgctgggggagaggccctgagaggcatgtgcacagagtttcacttttgttgcccaggctggagtgcaatggcgtgatcttcactcaccgcaacctctgccttccaggtggtaaaaccaagactgagaatgaggaaaaaactgcacagctaaacatttctaaagaatcagagtcccacagactgatagtggagggactgctgatggacgttccccagcaccctgacttcaaggacaggttagagaagtcacagctacatgatacagggaataaaacaaagataggggattgcacagatttgacagtccaggatcatgaatcttccaccactgaaagggaggagatagccaggaaattggaagaaagtagtgtcagcacacatctcattacaaagcagggttttgccaaagaacaggtgttttataaatgtggtgagtgtggcagttactacaacccacattcagactttcacctgcatcagagagttcacactaatgagaagccctacacatgcaaagaatgtgggaaaaccttcagatataactcaaaactgtcacggcatcagaaaatccacactggagagaaaccatactcatgtgaggaatgtggacaagccttcagtcaaaattcccaccttcttcagcatcagaagctccatggtggacagaggccctatgaatgtactgactgtggtaaaaccttcagttataattcaaaactgattcggcatcagagaatccatactggggagaagccctttaaatgtaaggaatgtgggaaagccttcagttgtagctatgactgcatcatccatgaacgaattcacaatggggagaagccctatgaatgtaaggagtgtgggaagagtttgagttctaattcagttctgattcagcatcagagaatccacactggggagaaaccttatgaatgtaaagagtgtggcaaggccttccaccgcagttcggtatttcttcagcaccagaggttccacactggggaacaactctacaaatgtaatgaatgttggaaaactttcagctgtagctcccgcttcatagtgcatcagagaatccacaatggggagaaaccctatgaatgccaggaatgtgggaagacattcagtcaaaagatcactctggttcagcatcagcgagttcacactggggagaaaccttatgagtgtaaggagtgcgggaaagccttcagatggaatgcaagtttcatccagcatcagaagtggcatactaggaagaaactcatcaatggaacagggctatccgcagttaagccctactgtccctgcgccatcctctctcctctgcctccccaacatacctgctctgccctagccccaccagggcctcccttatcttcttcacatgcagtggtacttcctccctctgtgcctttcttcctgctgcttccctcatctgaaaaggccaacccttcacctgtccaaatagcacatttttttcaggatctcgcttttcctgggaagtcatcccttcagagcccgaatcctttgtctcactccctgtaagccccgtcacgttctcaaaatcctttgcacctcaagttagggattccactggtctcctgattgtgtctattgatattcctctggtcttgtcttgtataagttgttactgttttcctaacttcattttaaattctcacgcttaaggaccatgtttgattagtttcttttatcccccggtaggaaatggcagtacttattctttatcgtgtccacatttgggctgtattatcagtctgcatctctcttctggggctactggagttggaagagtttgcagaacattttggggtttagggcatatggcattatgattatgatgagatggggcattataattagagactaggagaaatgcaaagcctatgggagaacataatcagataaagtgtccaatgattgctttcaagagcttttttttttttagggggtggggggtggtgccggagtttcactcttgtcacccaggctgtttgcagtggtgtgatcttggctcactgcaacctctgcctccagggttcaagtgattctcatgcctcagcctcccgagtagctgggaccacaggcatgcaccaccacgccccgctaattttgtatttttagtagagacagggtttcaccatgttggccaggctggtctcaaaatcctgacctcaggtgattcacctgcctcagtctcccaagtgctgggattacaggcatgagccactgcatctggcctgctttcaggagttaaggagggccatttggtggaccaggggcaaggctcactgaaagaatgtaagacttggaattttttattaccttgatagtataaaaaattatgagggtccttttatgcaaaaagaaaatgaagtgatgagttggcattgatagcaataatgtaaaattatgtctttgagctttattggaaggggatatggtttttcaatttgggttccttctctattttcattttccttttttttttgagacaggttcttgttctgtcatccaggctggattgcagtagtgcgatcatggatcactgcagtgtgttgaccttccaggctcaagcaatcctcccacctcagcttcccaagaagctgggaggtagtgcagcctcccagtttctcagagggctgaggtgggaggattgcttgagccctgggggcatacaccaccacacccagctaatttttgtattttttgtagagacagagttttgccatgttgcccaggctggtctcaaaactcctggactcaaatgatcctcccacttcagcctcccaaagtgctgggattacaggcttgagccaccatgtccagcctctattccttttcatatctgttgaatttcagtacccactcatatatgtaggtacaaaaagtgacttggacttgtaccctttagggtagatgcctgagtatagtaatctctaaagctgtacatggatggaacttgttggcatcacactggtgagcaccagaggcaaagaagagaaacctgaccatgacttgctgtagtttctcagaagtgagtccattcctgatgagttactatgcaggcccttggatatgtcctcacacctactccagatttccctatgattaaatctgaattttattggtggcacttttaaattagttttataaagaactgttttgatgacaccaagaaatgttttcagtgtgcagattgctattgtttgaatatccccagcaaaattcttgttgaaacttaatccccattgtaacagtactgggtggggggtctttaagaggtgatcaggattagccaagttcatcagggtggagcctccatgatgggactggtggctttatgaggagaggaagagcaactggaactgggacacatgcttgctctgtcttgccttttgatgcctcctgccatgtcatgatgcagcaagtaagcccttaccagatgcctgcacctttatattggacttcttagccttcagaactgtgaactaaataaacctctattctgtataaatt

SEQ ID NO: 203240 - DNA, 4153 bp, Homo sapiens
  Payload ID: 20077
  Gene Name: zinc finger protein 619
  Uniprot ID: Q8N2I2
  ENST ID: ENST00000447116
  CDS Start-End: 308-2158
agagaggctgtagggaccgacggccggccagctaatgcttccgtcttggccaccttgcgagcgctcgggttgagtttcccgggcttccctgactcggctacctgttctggaggtcaggctttgggcccttgcagaggtcgccgaggggcccgcgccgccgccagagcctgggcccagtccccagtcttcagagacgccctcgaccttcctgctccgaggagctggcctgatgtcctcgggtcgcgctccgcaggttcttactttttcaaacctagagggcagtgcatgaagccaggggtcatcagccatgctccagacagtgtggttccagggcttgggcaggaacctgttgtttcaggagccagtaacctttgaggatgtggctgtgtacttcacccagaatgaatgggccagcctgcaccctacgcagagggccctatacagggaggtgatgctggagaattatgcaaatgtgacttccttgtacccaactgcagggggctttcctctggatacagagagaactgagaaggttcctggtgcactgtcttcattccttccatcttccagttccctggagctgatcttggccctattgcctatgtcagcatttccattccccaaaccagatctgatattccagctggagcaaggagaagcagcatggggcccagatccctggacacttgctgggggagaggccctgagaggcatgtgcacaggtggtaaaaccaagactgagaatgaggaaaaaactgcacagctaaacatttctaaagaatcagagtcccacagactgatagtggagggactgctgatggacgttccccagcaccctgacttcaaggacaggttagagaagtcacagctacatgatacagggaataaaacaaagataggggattgcacagatttgacagtccaggatcatgaatcttccaccactgaaagggaggagatagccaggaaattggaagaaagtagtgtcagcacacatctcattacaaagcagggttttgccaaagaacaggtgttttataaatgtggtgagtgtggcagttactacaacccacattcagactttcacctgcatcagagagttcacactaatgagaagccctacacatgcaaagaatgtgggaaaaccttcagatataactcaaaactgtcacggcatcagaaaatccacactggagagaaaccatactcatgtgaggaatgtggacaagccttcagtcaaaattcccaccttcttcagcatcagaagctccatggtggacagaggccctatgaatgtactgactgtggtaaaaccttcagttataattcaaaactgattcggcatcagagaatccatactggggagaagccctttaaatgtaaggaatgtgggaaagccttcagttgtagctatgactgcatcatccatgaacgaattcacaatggggagaagccctatgaatgtaaggagtgtgggaagagtttgagttctaattcagttctgattcagcatcagagaatccacactggggagaaaccttatgaatgtaaagagtgtggcaaggccttccaccgcagttcggtatttcttcagcaccagaggttccacactggggaacaactctacaaatgtaatgaatgttggaaaactttcagctgtagctcccgcttcatagtgcatcagagaatccacaatggggagaaaccctatgaatgccaggaatgtgggaagacattcagtcaaaagatcactctggttcagcatcagcgagttcacactggggagaaaccttatgagtgtaaggagtgcgggaaagccttcagatggaatgcaagtttcatccagcatcagaagtggcatactaggaagaaactcatcaatggaacagggctatccgcagttaagccctactgtccctgcgccatcctctctcctctgcctccccaacatacctgctctgccctagccccaccagggcctcccttatcttcttcacatgcagtggtacttcctccctctgtgcctttcttcctgctgcttccctcatctgaaaaggccaacccttcacctgtccaaatagcacatttttttcaggatctcgcttttcctgggaagtcatcccttcagagcccgaatcctttgtctcactccctgtaagccccgtcacgttctcaaaatcctttgcacctcaagttagggattccactggtctcctgattgtgtctattgatattcctctggtcttgtcttgtataagttgttactgttttcctaacttcattttaaattctcacgcttaaggaccatgtttgattagtttcttttatcccccggtaggaaatggcagtacttattctttatcgtgtccacatttgggctgtattatcagtctgcatctctcttctggggctactggagttggaagagtttgcagaacattttggggtttagggcatatggcattatgattatgatgagatggggcattataattagagactaggagaaatgcaaagcctatgggagaacataatcagataaagtgtccaatgattgctttcaagagcttttttttttttagggggtggggggtggtgccggagtttcactcttgtcacccaggctgtttgcagtggtgtgatcttggctcactgcaacctctgcctccagggttcaagtgattctcatgcctcagcctcccgagtagctgggaccacaggcatgcaccaccacgccccgctaattttgtatttttagtagagacagggtttcaccatgttggccaggctggtctcaaaatcctgacctcaggtgattcacctgcctcagtctcccaagtgctgggattacaggcatgagccactgcatctggcctgctttcaggagttaaggagggccatttggtggaccaggggcaaggctcactgaaagaatgtaagacttggaattttttattaccttgatagtataaaaaattatgagggtccttttatgcaaaaagaaaatgaagtgatgagttggcattgatagcaataatgtaaaattatgtctttgagctttattggaaggggatatggtttttcaatttgggttccttctctattttcattttccttttttttttgagacaggttcttgttctgtcatccaggctggattgcagtagtgcgatcatggatcactgcagtgtgttgaccttccaggctcaagcaatcctcccacctcagcttcccaagaagctgggaggtagtgcagcctcccagtttctcagagggctgaggtgggaggattgcttgagccctgggggcatacaccaccacacccagctaatttttgtattttttgtagagacagagttttgccatgttgcccaggctggtctcaaaactcctggactcaaatgatcctcccacttcagcctcccaaagtgctgggattacaggcttgagccaccatgtccagcctctattccttttcatatctgttgaatttcagtacccactcatatatgtaggtacaaaaagtgacttggacttgtaccctttagggtagatgcctgagtatagtaatctctaaagctgtacatggatggaacttgttggcatcacactggtgagcaccagaggcaaagaagagaaacctgaccatgacttgctgtagtttctcagaagtgagtccattcctgatgagttactatgcaggcccttggatatgtcctcacacctactccagatttccctatgattaaatctgaattttattggtggcacttttaaattagttttataaagaactgttttgatgacaccaagaaatgttttcagtgtgcagattgctattgtttgaatatccccagcaaaattcttgttgaaacttaatccccattgtaacagtactgggtggggggtctttaagaggtgatcaggattagccaagttcatcagggtggagcctccatgatgggactggtggctttatgaggagaggaagagcaactggaactgggacacatgcttgctctgtcttgccttttgatgcctcctgccatgtcatgatgcagcaagtaagcccttaccagatgcctgcacctttatattggacttcttagccttcagaactgtgaactaaataaacctctattctgtataaatt

SEQ ID NO: 203241 - DNA, 2030 bp, Homo sapiens
  Payload ID: 20077
  Gene Name: zinc finger protein 619
  ENST ID: ENST00000522736
  CDS Start-End: 309-2012
ttgcaacatcccatgaatcagtggagagggtgaatgacagcagctagtgtgccaagaatatctgcaatgctagtggcaggagacagaggggaagaggcggcaagtgtaggagacgagacagatcagtctcattgtggttctctcttagctccgcaggttcttactttttcaaacctagagggcagtgcatgaagccaggggtcatcagccatgctccagacagtgtggttccagggcttgggcaggaacctgttgtttcaggagccagtaacctttgaggatgtggctgtgtacttcacccagaatgaatgggccagcctgcaccctacgcagagggccctatacagggaggtgatgctggagaattatgcaaatgtgacttccttgtcagcatttccattccccaaaccagatctgatattccagctggagcaaggagaagcagcatggggcccagatccctggacacttgctgggggagaggccctgagaggcatgtgcacagagtttcacttttgttgcccaggctggagtgcaatggcgtgatcttcactcaccgcaacctctgccttccaggtggtaaaaccaagactgagaatgaggaaaaaactgcacagctaaacatttctaaagaatcagagtcccacagactgatagtggagggactgctgatggacgttccccagcaccctgacttcaaggacaggttagagaagtcacagctacatgatacagggaataaaacaaagataggggattgcacagatttgacagtccaggatcatgaatcttccaccactgaaagggaggagatagccaggaaattggaagaaagtagtgtcagcacacatctcattacaaagcagggttttgccaaagaacaggtgttttataaatgtggtgagtgtggcagttactacaacccacattcagactttcacctgcatcagagagttcacactaatgagaagccctacacatgcaaagaatgtgggaaaaccttcagatataactcaaaactgtcacggcatcagaaaatccacactggagagaaaccatactcatgtgaggaatgtggacaagccttcagtcaaaattcccaccttcttcagcatcagaagctccatggtggacagaggccctatgaatgtactgactgtggtaaaaccttcagttataattcaaaactgattcggcatcagagaatccatactggggagaagccctttaaatgtaaggaatgtgggaaagccttcagttgtagctatgactgcatcatccatgaacgaattcacaatggggagaagccctatgaatgtaaggagtgtgggaagagtttgagttctaattcagttctgattcagcatcagagaatccacactggggagaaaccttatgaatgtaaagagtgtggcaaggccttccaccgcagttcggtatttcttcagcaccagaggttccacactggggaacaactctacaaatgtaatgaatgttggaaaactttcagctgtagctcccgcttcatagtgcatcagagaatccacaatggggagaaaccctatgaatgccaggaatgtgggaagacattcagtcaaaagatcactctggttcagcatcagcgagttcacactggggagaaaccttatgagtgtaaggagtgcgggaaagccttcagatggaatgcaagtttcatccagcatcagaagtggcatactaggaagaaactcatcaatggaacagggctatccgcagttaagccctactgtccctgcgccatcctctctcctctgcctccccaacatacctgctctgccctagccccaccagggcctcccttatcttcttcacatgcagtggtacttcctccctctgtgcctttcttcctgctgcttccctcatctgaaaaggccaacccttcacctgtccaaatagcacatttttttcaggatctcgcttttcctgggaagtcatcccttcagagcccgaatcctttgtctcactccctgtaagccccgtcacgttctcaa

SEQ ID NO: 203242 - DNA, 2309 bp, Homo sapiens
  Payload ID: 20077
  Gene Name: zinc finger protein 619
  ENST ID: ENST00000494154
  CDS Start-End: 237-416
gagtttcccgggcttccctgactcggctacctgttctggaggtcaggctttgggcccttgcagaggtcgccgaggggcccgcgccgccgccagagcctgggcccagtccccagtcttcagagacgccctcgaccttcctgctccgaggagctggcctgatgtcctcgggtcgcgctccgcaggttcttactttttcaaacctagagggcagtgcatgaagccaggggtcatcagccatgctccagacagtgtggttccagggcttgggcaggaacctgttgtttcaggagccagtaacctttgaggatgtggctgtgtacttcacccagaatgaatgggccagcctgcaccctacgcagagggccctatacagggaggtgatgctggagaattatgcaaatgtgacttccttgtgacttttctcttccctggttcctaatggagacccaactgcagggggctttcctctggatacagagagaactgagaaggttcctggtgcactgtcttcattccttccatcttccagttccctggagctgatcttggccctattgcctatgtcagcatttccattccccaaaccagatctgatattccagctggagcaaggagaagcagcatggggcccagatccctggacacttgctgggggagaggccctgagaggcatgtgcacaggtggtaaaaccaagactgagaatgaggaaaaaactgcacagctaaacatttctaaagaatcagagtcccacagactgatagtggagggactgctgatggacgttccccagcaccctgacttcaaggacaggttagagaagtcacagctacatgatacagggaataaaacaaagataggggattgcacagatttgacagtccaggatcatgaatcttccaccactgaaagggaggagatagccaggaaattggaagaaagtagtgtcagcacacatctcattacaaagcagggttttgccaaagaacaggtgttttataaatgtggtgagtgtggcagttactacaacccacattcagactttcacctgcatcagagagttcacactaatgagaagccctacacatgcaaagaatgtgggaaaaccttcagatataactcaaaactgtcacggcatcagaaaatccacactggagagaaaccatactcatgtgaggaatgtggacaagccttcagtcaaaattcccaccttcttcagcatcagaagctccatggtggacagaggccctatgaatgtactgactgtggtaaaaccttcagttataattcaaaactgattcggcatcagagaatccatactggggagaagccctttaaatgtaaggaatgtgggaaagccttcagttgtagctatgactgcatcatccatgaacgaattcacaatggggagaagccctatgaatgtaaggagtgtgggaagagtttgagttctaattcagttctgattcagcatcagagaatccacactggggagaaaccttatgaatgtaaagagtgtggcaaggccttccaccgcagttcggtatttcttcagcaccagaggttccacactggggaacaactctacaaatgtaatgaatgttggaaaactttcagctgtagctcccgcttcatagtgcatcagagaatccacaatggggagaaaccctatgaatgccaggaatgtgggaagacattcagtcaaaagatcactctggttcagcatcagcgagttcacactggggagaaaccttatgagtgtaaggagtgcgggaaagccttcagatggaatgcaagtttcatccagcatcagaagtggcatactaggaagaaactcatcaatggaacagggctatccgcagttaagccctactgtccctgcgccatcctctctcctctgcctccccaacatacctgctctgccctagccccaccagggcctcccttatcttcttcacatgcagtggtacttcctccctctgtgcctttcttcctgctgcttccctcatctgaaaaggccaacccttcacctgtccaaatagcacatttttttcaggatctcgcttttcctgggaagtcatcccttcagagcccgaatcctttgtctcactccctgtaagccccgtcacgttctcaaaatcctttgcacctcaagttagggattccactggtctcctgattgtgtctattgatattcctctggtcttgtcttgtataagttgttactgttttcctaacttcattttaaattctcacgcttaaggaccatgtttgattagtttcttttatcccccggtaggaaatggcagta

SEQ ID NO: 203243 - DNA, 1869 bp, Homo sapiens
  Payload ID: 20077
  Gene Name: zinc finger protein 619
  Uniprot ID: Q8N2I2
  ENST ID: ENST00000521353
  CDS Start-End: 1-1851
atgctccagacagtgtggttccagggcttgggcaggaacctgttgtttcaggagccagtaacctttgaggatgtggctgtgtacttcacccagaatgaatgggccagcctgcaccctacgcagagggccctatacagggaggtgatgctggagaattatgcaaatgtgacttccttgtacccaactgcagggggctttcctctggatacagagagaactgagaaggttcctggtgcactgtcttcattccttccatcttccagttccctggagctgatcttggccctattgcctatgtcagcatttccattccccaaaccagatctgatattccagctggagcaaggagaagcagcatggggcccagatccctggacacttgctgggggagaggccctgagaggcatgtgcacaggtggtaaaaccaagactgagaatgaggaaaaaactgcacagctaaacatttctaaagaatcagagtcccacagactgatagtggagggactgctgatggacgttccccagcaccctgacttcaaggacaggttagagaagtcacagctacatgatacagggaataaaacaaagataggggattgcacagatttgacagtccaggatcatgaatcttccaccactgaaagggaggagatagccaggaaattggaagaaagtagtgtcagcacacatctcattacaaagcagggttttgccaaagaacaggtgttttataaatgtggtgagtgtggcagttactacaacccacattcagactttcacctgcatcagagagttcacactaatgagaagccctacacatgcaaagaatgtgggaaaaccttcagatataactcaaaactgtcacggcatcagaaaatccacactggagagaaaccatactcatgtgaggaatgtggacaagccttcagtcaaaattcccaccttcttcagcatcagaagctccatggtggacagaggccctatgaatgtactgactgtggtaaaaccttcagttataattcaaaactgattcggcatcagagaatccatactggggagaagccctttaaatgtaaggaatgtgggaaagccttcagttgtagctatgactgcatcatccatgaacgaattcacaatggggagaagccctatgaatgtaaggagtgtgggaagagtttgagttctaattcagttctgattcagcatcagagaatccacactggggagaaaccttatgaatgtaaagagtgtggcaaggccttccaccgcagttcggtatttcttcagcaccagaggttccacactggggaacaactctacaaatgtaatgaatgttggaaaactttcagctgtagctcccgcttcatagtgcatcagagaatccacaatggggagaaaccctatgaatgccaggaatgtgggaagacattcagtcaaaagatcactctggttcagcatcagcgagttcacactggggagaaaccttatgagtgtaaggagtgcgggaaagccttcagatggaatgcaagtttcatccagcatcagaagtggcatactaggaagaaactcatcaatggaacagggctatccgcagttaagccctactgtccctgcgccatcctctctcctctgcctccccaacatacctgctctgccctagccccaccagggcctcccttatcttcttcacatgcagtggtacttcctccctctgtgcctttcttcctgctgcttccctcatctgaaaaggccaacccttcacctgtccaaatagcacatttttttcaggatctcgcttttcctgggaagtcatcccttcagagcccgaatcctttgtctcactccctgtaagccccgtcacgttctcaa

SEQ ID NO: 203244 - DNA, 3291 bp, Homo sapiens
  Payload ID: 20078
  Gene Name: zinc finger protein 620
  Uniprot ID: Q6ZNG0
  ENST ID: ENST00000314529
  CDS Start-End: 150-1418
aagctttccccggtgtcggcggcaggtggaatttccacgctttatctgcgcctgcgccgcgcgggattcgcggtccgagctgaagaggttcgcggtccggtttcacttctccgaaccctgaggcagtgtgtgaagctgggacgccagccatgttccagaccgcttggcgccaggaaccagtgacctttgaggatgtggctgtgtacttcacccagaatgaatgggccagcctggactctgtgcagagggccctgtacagggaagtgatgctggagaattatgcaaatgtggcttccctggcattcccattcaccacgcctgttctggtctcccagctggagcaaggggaactgccatggggcctcgatccctgggaacctatgggcagggaggctctcagaggtatctgtccaggggatgaggccagaactgagaaggaaggattaactccaaaggatcatgtgtccaaagaaacagagtccttcagactgatggtggggggcctgccagggaatgtttcccagcaccttgactttgggagcagcctagagcagccacaaggtcattggataattaagacaaagtcaaagaggagacatttcacagatacctcagccaggcaccatgaggcctatgaggtcaagaatggagagaagtttgagaaattaggaaaaaatattagcgtcagcacacaactcactacaaatcagacaaatcctagtggtcagatatcttatgaatgtggacaatgtggcagatatttcattcaaatggcagacttccaccgacatgagaaatgtcacactggtgaaaagtcttttgaatgcaaagaatgtggaaaatacttcagatataactcattacttattcggcatcagataattcacactggaaagaaaccatttaaatgtaaagaatgtggaaaaggtttaagttcagacacagccttgattcagcatcagagaatccacactggagaaaagccctatgaatgtaaggagtgcggcaaggccttcagtagcagctctgtcttcctccagcaccagaggttccacactggggagaagctctatgaatgtaacgaatgttggaaaactttcagttgcagctcaagtttcactgtccatcagcgaatgcacactggggagaaaccttatgaatgtaaagagtgtggaaaacgattaagctccaacacagccttgactcagcatcagcgaattcacactggggagaagccctttgaatgtaaggagtgtgggaaggcattcaatcagaaaataaccctgattcagcaccagcgagttcacactggcgagaaaccttatgagtgtaaagtgtgtggtaaaaccttcagctggtgtggaagattcattctgcatcagaaactacacactcagaagacacctgtccaagcatagggctatccatagttaggcccactgtgcctctccttttttctctttattttcatgctttttatcagtgtcctcgctgtccttcctggttagacacttggctttcatcatgaactcttctttaagttttttgaacctgtttccccaacatgaagtctctttatggttagagaagaccaaaaaacaaacaaacaaacttagaaacataaaaggaaatgtaagtttccagatttaaaggacatgctgggtgcccagcaggatggattcaagggaaacctacattaaggaaaattgctgtgaattatgaaaacaccaagtttgaataagaggatcatggagaaaaaatgagaccctaaaaagtttctagagagagaaaacaaaagatcagaaatgaaagcggggccaggcgcggtggctcgtgcctgtaatcccagcactttgggaggctgaggcgggtggatcatgaggtcaggagttcgagaccagcccgcccaatatggtgaaaccccgtctctcctgaaaaaaaaaaacacaaaaattagccaggcatggtggcgcatgcctgtaatcccagctactagagaggctgaggcaggagaatcacttgaatccctgaggcagaggttgcagtgagctgagatcgcaccactgcactccagcctgggcgacagagtgagactttgtctcaaaaacagtaaaaaatgaaaatggcattagatttttcaagagcaaccttcaaagtcagatgacaatgtgtatgccttcagacttctcatggaaaatgttttcccctgcaattctatactccaaagtataagtatagaataaaggcatttcagaccctttaaatctgaaatctttatctcccatgcatcctttctcatatgtgcaacactacacaaggagtaaaccagtaaataaaaagacagatatatggattccctattgcagtccgtacgtcagaagtctcctaaattcaaaaacgggccctgtccatgtggagccaaatgcatcttggaagacattcctagtagggtgcaaacttccagagacctatctcaggttcagtgtccacccaccctacttattcttcagtttgtcttcactagacagttgtactctgtgcctttgcaaaagtcaggatgtatatactctttgagtcaggtgcaaggcaccatttgtcttaaatttattctcattgctgtttcaagtgacctcaaagcaggcagcattttcttgcaattccatctagttattttttatgatcatggaagaacctaccattattgctgttacctgtggaaatgagggaagatgtaaatgtgttaggttttagcatcccctctggcagccagcttgattttgcaggaagcagagagtagtgattaataatacagagccaggcagactttggtttgagtccaggtgtttgtccttggttaagttacaaaaactgcactagtttccttatctgtaaaatgaggatgacagttaatctacctcataggtttgtgttggggattaaatgcattatttgtagaagtgtttcaaacagtgactacatataataaaagtattacctattattggccgggcacagtggctcatgcctgtaatcccagcactttgggaggctgaggtgggcagatcacaaggtcaggagatcaagaccatcctgctaacacactgaaaccctgtctctactaaaagtacaaaaaattagctgggcgtggggtgacatgtgcctgtagtcccagctacttgggaggctgaggcaggagcccagggaggcagaggttgcagtgagccaagatcatgccactgcactccagtctgggtgacagattgagactccgtctcaaaaaaaaaaaaaaaa

SEQ ID NO: 203245 - DNA, 2022 bp, Homo sapiens
  Payload ID: 20078
  Gene Name: zinc finger protein 620
  Uniprot ID: Q6ZNG0
  ENST ID: ENST00000418905
  CDS Start-End: 250-1176
agctttccccggtgtcggcggcaggtggaatttccacgctttatctgcgcctgcgccgcgcgggattcgcggtccgagctgaagaggttcgcggtccggtttcacttctccgaaccctgaggcagtgtgtgaagctgggacgccagccatgttccagaccgcttggcgccaggggatgaggccagaactgagaaggaaggattaactccaaaggatcatgtgtccaaagaaacagagtccttcagactgatggtggggggcctgccagggaatgtttcccagcaccttgactttgggagcagcctagagcagccacaaggtcattggataattaagacaaagtcaaagaggagacatttcacagatacctcagccaggcaccatgaggcctatgaggtcaagaatggagagaagtttgagaaattaggaaaaaatattagcgtcagcacacaactcactacaaatcagacaaatcctagtggtcagatatcttatgaatgtggacaatgtggcagatatttcattcaaatggcagacttccaccgacatgagaaatgtcacactggtgaaaagtcttttgaatgcaaagaatgtggaaaatacttcagatataactcattacttattcggcatcagataattcacactggaaagaaaccatttaaatgtaaagaatgtggaaaaggtttaagttcagacacagccttgattcagcatcagagaatccacactggagaaaagccctatgaatgtaaggagtgcggcaaggccttcagtagcagctctgtcttcctccagcaccagaggttccacactggggagaagctctatgaatgtaacgaatgttggaaaactttcagttgcagctcaagtttcactgtccatcagcgaatgcacactggggagaaaccttatgaatgtaaagagtgtggaaaacgattaagctccaacacagccttgactcagcatcagcgaattcacactggggagaagccctttgaatgtaaggagtgtgggaaggcattcaatcagaaaataaccctgattcagcaccagcgagttcacactggcgagaaaccttatgagtgtaaagtgtgtggtaaaaccttcagctggtgtggaagattcattctgcatcagaaactacacactcagaagacacctgtccaagcatagggctatccatagttaggcccactgtgcctctccttttttctctttattttcatgctttttatcagtgtcctcgctgtccttcctggttagacacttggctttcatcatgaactcttctttaagttttttgaacctgtttccccaacatgaagtctctttatggttagagaagaccaaaaaacaaacaaacaaacttagaaacataaaaggaaatgtaagtttccagatttaaaggacatgctgggtgcccagcaggatggattcaagggaaacctacattaaggaaaattgctgtgaattatgaaaacaccaagtttgaataagaggatcatggagaaaaaatgagaccctaaaaagtttctagagagagaaaacaaaagatcagaaatgaaagcggggccaggcgcggtggctcgtgcctgtaatcccagcactttgggaggctgaggcgggtggatcatgaggtcaggagttcgagaccagcccgcccaatatggtgaaaccccgtctctcctgaaaaaaaaaaacacaaaaattagccaggcatggtggcgcatgcctgtaatcccagctactagagaggctgaggcaggagaatcacttgaatccctgaggcagaggttgcagtgagctgagatcgcaccactgcactccagcctgggcgacagagtgagactttgtctcaaaaacagtaaaaaatgaaaatggcattagatttttcaagagcaaccttcaaagtcagatgacaatgtgtatgccttcagacttctcatggaaaatgttttcccctgcaattctatactccaaagtataagtatagaataaaggcatttcagaccctttaaa

SEQ ID NO: 203246 - DNA, 533 bp, Homo sapiens
  Payload ID: 20078
  Gene Name: zinc finger protein 620
  ENST ID: ENST00000420891
  CDS Start-End: 184-533
tcctagagaggaggggcatggaaaacgcacttccggcggagggtctcaagctttccccggtgtcggcggcaggtggaatttccacgctttatctgcgcctgcgccgcgcgggattcgcggtccgagctgaagagtttcacttctccgaaccctgaggcagtgtgtgaagctgggacgccagccatgttccagaccgcttggcgccaggaaccagtgacctttgaggatgtggctgtgtacttcacccagaatgaatgggccagcctggactctgtgcagagggccctgtacagggaagtgatgctggagaattatgcaaatgtggcttccctggcattcccattcaccacgcctgttctggtctcccagctggagcaaggggaactgccatggggcctcgatccctgggaacctatgggcagggaggctctcagaggtatctgtccaggggatgaggccagaactgagaaggaaggattaactccaaaggatcatgtgtccaaagaaacagagtccttcagactgatggtggg

SEQ ID NO: 203247 - DNA, 421 bp, Homo sapiens
  Payload ID: 20078
  Gene Name: zinc finger protein 620
  ENST ID: ENST00000433723
  CDS Start-End: 81-215
gcggtccgagctgaagaggttcgcggtccggtttcacttctccgaaccctgaggcagtgtgtgaagctgggacgccagccatgttccagaccgcttggcgccagagacaatcttactctgtctcccaggctgagtgcagtggtgcaatcacagctcactgcagcctccacctcccaggcctaagtgatcctcccaaggagttgagactaagttgagactacaggaaccagtgacctttgaggatgtggctgtgtacttcacccagaatgaatgggccagcctggactctgtgcagagggccctgtacagggaagtgatgctggagaattatgcaaatgtggcttccctggcattcccattcaccacgcctgttctggtctcccagctggagcaaggggaactgccatggggcctcgatccc

SEQ ID NO: 203248 - DNA, 2404 bp, Homo sapiens
  Payload ID: 20079
  Gene Name: zinc finger protein 621
  Uniprot ID: Q6ZSS3
  ENST ID: ENST00000310898
  CDS Start-End: 460-933
gaaaggcggggcgggtctggccacggggcgaccgagatggcggcctccgggggcctagagggaccctgggcgtgcactcgcccttccggctcggcctttagttagtgaccagctcctcggcgttctgcagagcgtgggtttcagcgagttctacgtgccaggtccgcccggtgccggcttcctcgctgcccctggcggctcgtcagcccccactacccctgaacttggtcccaatggcggcccgcccctccttcacccggaccgtgggcatctgggcctcgccgaagccgtcaaggtggctgctcgggcttctagagcccgtgtccagccctttgccaccgaggcctgatcctcttttctgccctaaagaacttgccctgacagcctctggctcccgctcttgaggatcttgcttgtccaaacccagaagacagtgcatgaagccaggggacatccgccatgctccaaacaacttggcctcaggagtcagtgacctttgaggatgtggctgtttacttcacccagaatcaatgggccagcctcgaccctgcgcagagggccctgtacggggaggtgatgctggagaattatgcaaatgtggcttctctggtagcgtttccattccccaaacctgctctgatctcccacctggagagaggggaagcaccatggggcccagatccctgggacaccgagattctgagaggcatcagtcaaggtggtgagtcctggatcaaaaatgaagggctagttataaagcaggaagcctctgaagaaacagagttgcacagaatgccagtaggaggacttctcaggaacgtttctcagcactttgattttaaaaggaaggcactgaagcagactttcaatctaaatccaaatctgatacttcgaggtggatcagttgaggtcaggagtttgagaccagcctgaccaacatggagaaaccctatctctactaaaaatacaaaaattagctggatgtggtggtgtgtgcctgtaatcccagctacttgggaggctgaggcaggagaattgcttgaatccagaggcagaggttgcagtgagctgaggttgcaccactgtgcttcagcctgggtaacagagtgagactgtctcaaaaaaaaaaaaaatttagttccaaatattactgctcgttgataatgtgtctggtcacccaagagttctgatggagatgtacaaagagattaatgtttttatgtctgctaaacaacatccattctgcaggatccattactccatgggtcaaggagtaattttgactttcaagtattatttaaggaatacattttgtaaggctgtggctgccatagtggttgttctgtacaaagtaacttgaaaaccttctggaaaggattcatcattctagatgccattaaggacatttgtgattcatgggagaaggtcaaaatatcaacattaacaggagttcagaagacattgacctcaaccctgatggatgatcttgaggggttcaagacttcagtggacgaagtaactgcagatgtggtggaaatagcaagataactagacttagaagtggaacctgcatatgtgactgaattgctgcaatctcatgataaaacgtgaacaaatgaggagttgcttctaatataagagccacaaaagtggtttcttgagatggaaactactcctggtgaagatcctgtgaccattgttgaaatgacaacaaaggacttagaatattacataaacttagttgataaaacagcagcagagtttgagaggattgacttcaattttgaagaatgttccactgtgggtaaaaggctatccaacagcaacacatgctacagataaatctttcggaaaggaagagtcagttgatgttgcagccttccttgttgtctcatttaaagaaatctctagagccacactaaccttcagcaaccaccacaccgatcattcagcagccatcaacagtgaggcaagactgtcttccagcaacaaagactcactgaagacttagattatcgttaacatcttttagcaataaaatatttttaaattaaagtatgtacattgtcagatataatgctattgcaaacttaatagactataatatagattaaacataacttttataggtactggaaaataaaaataattgtgtgactccctttattgtgttaaacattttattacagttgtctggaagcaaacctgcaatatctccaagatatgcctgtatttttcaaaatgtggtcttttaacattgctatgaagtttatcagtaataatatcttatttcatggttgtccagaagttacataacttgtcttaatctaaaaatcatatcatttaaaaagcctgatgatttaatatttttcataaagaaaacttttgacaatttgtttttaag

SEQ ID NO: 203249 - DNA, 6378 bp, Homo sapiens
  Payload ID: 20079
  Gene Name: zinc finger protein 621
  Uniprot ID: Q6ZSS3
  ENST ID: ENST00000339296
  CDS Start-End: 453-1772
ggggcgggtctggccacggggcgaccgagatggcggcctccgggggcctagagggaccctgggcgtgcactcgcccttccggctcggcctttagttagtgaccagctcctcggcgttctgcagagcgtgggtttcagcgagttctacgtgccaggtccgcccggtgccggcttcctcgctgcccctggcggctcgtcagcccccactacccctgaacttggtcccaatggcggcccgcccctccttcacccggaccgtgggcatctgggcctcgccgaagccgtcaaggtggctgctcgggcttctagagcccgtgtccagccctttgccaccgaggcctgatcctcttttctgccctaaagaacttgccctgacagcctctggctcccgctcttgaggatcttgcttgtccaaacccagaagacagtgcatgaagccaggggacatccgccatgctccaaacaacttggcctcaggagtcagtgacctttgaggatgtggctgtttacttcacccagaatcaatgggccagcctcgaccctgcgcagagggccctgtacggggaggtgatgctggagaattatgcaaatgtggcttctctggtagcgtttccattccccaaacctgctctgatctcccacctggagagaggggaagcaccatggggcccagatccctgggacaccgagattctgagaggcatcagtcaaggtggtgagtcctggatcaaaaatgaagggctagttataaagcaggaagcctctgaagaaacagagttgcacagaatgccagtaggaggacttctcaggaacgtttctcagcactttgattttaaaaggaaggcactgaagcagactttcaatctaaatccaaatctgatacttcgaggtggaatgaagttctatgaatgtaaagaatgtgggaaaatcttccgatataactcaaagcttattcggcatcagatgagtcatactggggaaaagccctttaagtgtaaggagtgtggcaaagctttcaagtccagctatgattgtattgtacatgagaaaaaccacattggagaagggccctatgaatgtaaggagtgtggcaaaggtttgagttccaacacagccttgactcaacatcagaggatccacactggagagaaaccctatgaatgtaaagagtgtggaaaggctttccgtaggagtgcggcatacctgcagcatcagagattacacacgggagagaaactctataaatgtaaggaatgttggaaagctttcggttgtaggtcactttttattgtccatcagagaattcatactggggagaaaccttatcaatgtaaggagtgtggcaaagccttcacccagaaaatagcctccattcagcatcagagagttcacactggggagaagccttatgaatgtaaggtgtgtgggaaagccttcaaatggtatggaagttttgttcagcatcagaaattgcaccctgtggagaagaagccagtcaaggtccttgggccatccctggtcagtccccagtgctcctctccagccatacctcctgttcttctccagggatcctgttctgcttcagccgtagctgtgccttcactgacctttccacatgctgtgctcattcctacctctgggaattttttcatgctgctgcctacatctggaataccttcttcatctgcccaaatagtgcgtgtcttccagggtcttactcccactgtgaaaccttccccagttattctcaccccttcttctcactcctcatgagctttatcttggcagtcttacggctcttatgcctagcaaatctccagcctaattttatatatttttttgagaaagggtcttgctctgtcacccaggctagagtgcggtggtgtgatcttggctcactgcaacctccccctcctgggttcaagcgattctcctccttcagactctcgaatagctgggattacaggcacgcctcaccacgcccagctaatttctgtatttttagaagagatggggtttcgccatcttggccaggctggtctcaaacacctgacctcaagtgatccgcctgccttggccccccaaagtgctgggattacaggagtgagccactgtgcccagcctccaacctaatttgagtttcatttgtatttttttcatcaccttacatgtgttaacagctgtttcaacataaactccattataatctatatacatttaaagaccgtgtttacataatctcttctgggtagaaaatggaaatacttaacctttgcattggtccctttcaggcttgaacaacagtggctgtatctgcatcgtggggttgctggtggtagaacactttggtgttaggaaagtttggaaaagaggatatccctgtattaggccattatgattagagataagcagcctgggagaaacatacaagacctgtggctactggtagagaattggaataagcttccaacaatggactgtagagattaatggagattgtttagtgggcccatggctaggtggggtattaatacagttgaagttatgttgcccttggcacagatctttgagaatctcatacatctgtgaaaaagataatgtgaaataaacagtaaaaaaaaaaagtatgttgatggcagtgagagtaatcatgtctttaaacgtgaagtttttttttctttagttttgctcttgatagctagatgtttcttttaacttttatttcgtaagtaaatatacacaaaggcattcatctttgttgaatctgttgtgcagatttttcttgatgagcattctgtttttttttctttgtgagcactggcttctatattttatttcatatttatgaattataaatatgaatttaattactaaagaaataaaaataatggtgtaaagccaactcgaggggaatctgaataagcttccaaaatttttttttttaagaaataaagggagctgtgtagtgggtcagtggctaggtaggttagtgaagtggaatttggggttgctcttggaagtggccttgatgaggatcctttacaactattcagaggactgtgtgaagtagttactggaaaaagaacttgaattatgcatttattggcattaatgtaaacagtaagtcctaagctttgatggaagggtccatacattttttttttttttttgctgatgttgctatctagatgtttctctatagcaattaatagcaaaacctttacattcttggtttttaaactttaccatgtgtctgaattacatagtgtgcttgtaaaaagaagagttttctctcttgcacaaattctgattttggctatctgtggtgatggccagatctttagcatggaccatactttgagagatatgcttcaaacagaaaatgcccacccctcctcctttacccagcataaactctatggttaattcttaaaataatgccttacagtctccattaactcccttgcccttctcttgctttgtcatgctcgcttggcaaaacctcatctctgactaaatgcagttctttgccttctctgttcctgcaccaaaaatgatcaggagaaagcatattaccaggctgaactgtcactttaaattcatgaccagtaacttcatggaggcccttaacgtttcctgatggtcatactacaatttttggagtccacttaactcccctgctttcctaggccactactttatactttctctcttctgtaacttccaaagcatccctctcagttctcatgctcagctgatggttatgtttctgccttcggcgagagaacagcaagctccagaaagtggctgcgccttcagccccgtgctagaatgagaacatatggagccaacttgagttcggaagggctgtggccacctcgtttcgcccatctacttttcaccttgccgtatctgattcttcaccaccgtattctcagtcacttccactaaacagtgccagtgttttaaggttctgtcacactcagtaacccacttctggttcctcattccgtgtcagtgatcagcagtagactgaagaatctaccttagatttgctccatactattaattagcttacaaaatgtctaagaggagctaagctgggatgccacataggcagaagccaggaaaaatgaccaaccacagaaccaagtggttccagtggaaactcagcagctgctggtgcctgctactggactgccaccccccattgaagagactggaccaccaggaaggtcgtttcacattctgtagtaaaaatacccctacaatcattttggtagggtcttctgtcttcagccagggtgtacctgctcggtgggagttggttatatatgtatgtccaagttgcaggggcttctgggaaatacaggttttggattctgcctgggaagagagtcatagtatgaagaagtctgaaaatggggaagggattttcagaatatgttgagcagctgtaaaatatcagatacccattataggcattgaaggttacctaaatgacagaaggatgcactatattcatgggtaggaaagattagtttcatcaagatttcaatttttatcaattcataaattaaaaacaatataaaaattccagaggggtgtgtgtatagagaggcaaaggacacagagtagctaacctagttttgaagaacaagatggggggttttatgctaccagatattatatacaatgatcatcaaacacagaacaaagcaaaaaacaaactccccaaacccaagttgaaacaaaaaaaacccccagactgtaatagtattattattattttttaagatggaatcttgctctgttgctcaggctggagtgcagtggtgcaatcttggctcactgcaacctacacctcccgggttcaagtgattctcttgcctcagcctcctgagtagtgtgtgccaccacgcccagctaattttttaatttttagtagagacagggtttcaccatgttggccaggctggtcttgaactcctggcagcctcaagtgatccacccacctcggtctcccaaagtgttgggattacaggcgtgagccactgcacctggcctgtaacatgatttgctgaaatttttaaaaatcttaaataatgtactgtttagaaatatacatattttatacaaaattataaagaaagcatagagaggtaagcattagtggcacagctgagaaaatataaaaggtagttctgtctctatcctgtctcctttattctgctactgctctcattctgtctcatcccaggaatccagtcccaagtgctgcctgccaatcgtccagcaccctccacctttgccacctatttcttgttgtaaaacagatgtttgtttctaaaatataatgaattaatgattatcaaagtacaggcatacctcattttattgcagtttgttttattgtgtcttgcggatattgcattttttacaaactgaaggtttgtggcaggcctgtgttgagcaagactatcagtgccattttttttcaacagcatgtgctcatttcatttttctgtgtcttacacagaaacttaaaatatttcaaacttttcattatatgtgttttggtgattagtgacttttatgtttctattgtaattgttttggggtgccacagactgcatccatctaagacagtgagcttagttgatgtgtgtgtgtgtgttctgattactccactaactgatggttccccatctctctccctctcctcagacctcactattctctcagacacaacagtattgaaattagaccaattgataaccttacaaacacctttaagtgtttaagtgaaaaagtcacatgcctctcactttaaatcaaaagctagaaatgattaagcttagtgaggaaggctaatgtcaacagctgagataggccaaaagctagactgcttctgccaaacagtcaagttgtgaatgcaaaagaaaagttcttgaaggaaatgaaaagtacttctccagggaacacatgaacgataataaagtggccaggtgcagtggctgacacctagaatcccagcacttcggggagccaaagcgggaggatcccctgaagccaggagtccgagaccagcttgggccacaaagtgagacccctgtctctacaaaaaattaaaaatttagctgggtgtggttgtgcatgcctgtagtccgatctacttgggaggctgaagtgagaggatccctttagccagggagttcgagactgcagtgagctatgattgtgccactgcactctagcctgtgtgacagaatgaaaccaaaaaaagtgaaacagcattattactgatatggagaaagttttaggggtctggatcaaaccaaccacaaattcccttaagccaaaacctaatccagagcaa

SEQ ID NO: 203250 - DNA, 1979 bp, Homo sapiens
  Payload ID: 20079
  Gene Name: zinc finger protein 621
  Uniprot ID: Q6ZSS3
  ENST ID: ENST00000403205
  CDS Start-End: 224-1543
gaaaggcggggcgggtctggccacggggcgaccgagatggcggcctccgggggcctagagggaccctgggcgtgcactcgcccttccggctcggcctttagttagtgaccagctcctcggcgttctgcagagcgtgggtttcagcgagttctacgtgccagctcttgaggatcttgcttgtccaaacccagaagacagtgcatgaagccaggggacatccgccatgctccaaacaacttggcctcaggagtcagtgacctttgaggatgtggctgtttacttcacccagaatcaatgggccagcctcgaccctgcgcagagggccctgtacggggaggtgatgctggagaattatgcaaatgtggcttctctggtagcgtttccattccccaaacctgctctgatctcccacctggagagaggggaagcaccatggggcccagatccctgggacaccgagattctgagaggcatcagtcaaggtggtgagtcctggatcaaaaatgaagggctagttataaagcaggaagcctctgaagaaacagagttgcacagaatgccagtaggaggacttctcaggaacgtttctcagcactttgattttaaaaggaaggcactgaagcagactttcaatctaaatccaaatctgatacttcgaggtggaatgaagttctatgaatgtaaagaatgtgggaaaatcttccgatataactcaaagcttattcggcatcagatgagtcatactggggaaaagccctttaagtgtaaggagtgtggcaaagctttcaagtccagctatgattgtattgtacatgagaaaaaccacattggagaagggccctatgaatgtaaggagtgtggcaaaggtttgagttccaacacagccttgactcaacatcagaggatccacactggagagaaaccctatgaatgtaaagagtgtggaaaggctttccgtaggagtgcggcatacctgcagcatcagagattacacacgggagagaaactctataaatgtaaggaatgttggaaagctttcggttgtaggtcactttttattgtccatcagagaattcatactggggagaaaccttatcaatgtaaggagtgtggcaaagccttcacccagaaaatagcctccattcagcatcagagagttcacactggggagaagccttatgaatgtaaggtgtgtgggaaagccttcaaatggtatggaagttttgttcagcatcagaaattgcaccctgtggagaagaagccagtcaaggtccttgggccatccctggtcagtccccagtgctcctctccagccatacctcctgttcttctccagggatcctgttctgcttcagccgtagctgtgccttcactgacctttccacatgctgtgctcattcctacctctgggaattttttcatgctgctgcctacatctggaataccttcttcatctgcccaaatagtgcgtgtcttccagggtcttactcccactgtgaaaccttccccagttattctcaccccttcttctcactcctcatgagctttatcttggcagtcttacggctcttatgcctagcaaatctccagcctaattttatatatttttttgagaaagggtcttgctctgtcacccaggctagagtgcggtggtgtgatcttggctcactgcaacctccccctcctgggttcaagcgattctcctccttcagactctcgaatagctgggattacaggcacgcctcaccacgcccagctaatttctgtatttttagaagagatggggtttcgccatcttggccaggctggtctcaaacacctgacctcaagtgatccgcctgccttggccccccaaagtgctgggattacaggagtgagccactgtgcccagcctccaacctaatttgagtttcatttgtatttttttcatcaccttacatgtgttaacagctgtttcaacataaactccattataatct

SEQ ID NO: 203251 - DNA, 565 bp, Homo sapiens
  Payload ID: 20079
  Gene Name: zinc finger protein 621
  ENST ID: ENST00000453351
  CDS Start-End: 108-565
ctcttctcctgaggttctttcttttgggtccacgtcatcgtccctctcttgaggatcttgcttgtccaaacccagaagacagtgcatgaagccaggggacatccgccatgctccaaacaacttggcctcaggagtcagtgacctttgaggatgtggctgtttacttcacccagaatcaatgggccagcctcgaccctgcgcagagggccctgtacggggaggtgatgctggagaattatgcaaatgtggcttctctggtagcgtttccattccccaaacctgctctgatctcccacctggagagaggggaagcaccatggggcccagatccctgggacaccgagattctgagaggcatcagtcaaggtggtgagtcctggatcaaaaatgaagggctagttataaagcaggaagcctctgaagaaacagagttgcacagaatgccagtaggaggacttctcaggaacgtttctcagcactttgattttaaaaggaaggcactgaagcagactttcaatctaaatccaaatctgatacttcgaggtggaatgaagttctatgaatg

SEQ ID NO: 203252 - DNA, 2613 bp, Homo sapiens
  Payload ID: 20079
  Gene Name: zinc finger protein 621
  ENST ID: ENST00000431278
  CDS Start-End: 646-1632
ccacggggcgaccgagatggcggcctccgggggcctagagggaccctgggcgtgcactcgcccttccggctcggcctttagttagtgaccagctcctcggcgttctgcagagcgtgggtttcagcgagttctacgtgccaggtccgcccggtgccggcttcctcgctgcccctggcggctcgtcagcccccactacccctgaacttggtcccaatggcggcccgcccctccttcacccggaccgtgggcatctgggcctcgccgaagccgtcaaggtggctgctcgggcttctagagcccgtgtccagccctttgccaccgaggcctgatcctcttttctgccctaaagaacttgccctgacagcctctggctcccgctcttgaggatcttgcttgtccaaacccagaagacagtgcatgaagccaggggacatccgccatgctccaaacaacttggcctcagtagcgtttccattccccaaacctgctctgatctcccacctggagagaggggaagcaccatggggcccagatccctgggacaccgagattctgagaggcatcagtcaaggtggtgagtcctggatcaaaaatgaagggctagttataaagcaggaagcctctgaagaaacagagttgcacagaatgccagtaggaggacttctcaggaacgtttctcagcactttgattttaaaaggaaggcactgaagcagactttcaatctaaatccaaatctgatacttcgaggtggaatgaagttctatgaatgtaaagaatgtgggaaaatcttccgatataactcaaagcttattcggcatcagatgagtcatactggggaaaagccctttaagtgtaaggagtgtggcaaagctttcaagtccagctatgattgtattgtacatgagaaaaaccacattggagaagggccctatgaatgtaaggagtgtggcaaaggtttgagttccaacacagccttgactcaacatcagaggatccacactggagagaaaccctatgaatgtaaagagtgtggaaaggctttccgtaggagtgcggcatacctgcagcatcagagattacacacgggagagaaactctataaatgtaaggaatgttggaaagctttcggttgtaggtcactttttattgtccatcagagaattcatactggggagaaaccttatcaatgtaaggagtgtggcaaagccttcacccagaaaatagcctccattcagcatcagagagttcacactggggagaagccttatgaatgtaaggtgtgtgggaaagccttcaaatggtatggaagttttgttcagcatcagaaattgcaccctgtggagaagaagccagtcaaggtccttgggccatccctggtcagtccccagtgctcctctccagccatacctcctgttcttctccagggatcctgttctgcttcagccgtagctgtgccttcactgacctttccacatgctgtgctcattcctacctctgggaattttttcatgctgctgcctacatctggaataccttcttcatctgcccaaatagtgcgtgtcttccagggtcttactcccactgtgaaaccttccccagttattctcaccccttcttctcactcctcatgagctttatcttggcagtcttacggctcttatgcctagcaaatctccagcctaattttatatatttttttgagaaagggtcttgctctgtcacccaggctagagtgcggtggtgtgatcttggctcactgcaacctccccctcctgggttcaagcgattctcctccttcagactctcgaatagctgggattacaggcacgcctcaccacgcccagctaatttctgtatttttagaagagatggggtttcgccatcttggccaggctggtctcaaacacctgacctcaagtgatccgcctgccttggccccccaaagtgctgggattacaggagtgagccactgtgcccagcctccaacctaatttgagtttcatttgtatttttttcatcaccttacatgtgttaacagctgtttcaacataaactccattataatctatatacatttaaagaccgtgtttacataatctcttctgggtagaaaatggaaatacttaacctttgcattggtccctttcaggcttgaacaacagtggctgtatctgcatcgtggggttgctggtggtagaacactttggtgttaggaaagtttggaaaagaggatatccctgtattaggccattatgattagagataagcagcctgggagaaacatacaagacctgtggctactggtagagaattggaataagcttccaacaatggactgtagagattaatggagattgtttagtgggcccatggctaggtggggtattaatacagttgaagttatgttgcccttggcacagatctttgagaatctcatacatctgtgaaaaagataatgtgaaataaacagtaaaaaaaaaaagtatgttgatggcagtgagagtaatcatgtctttaaacgtgaagtttttttttctttagttttgctcttgatagctagatgtttcttttaacttttatttcgtaagtaaatatacacaaaggcattcatc

SEQ ID NO: 203253 - DNA, 1699 bp, Homo sapiens
  Payload ID: 20080
  Gene Name: zinc finger protein 622
  Uniprot ID: Q969S3
  ENST ID: ENST00000308683
  CDS Start-End: 128-1561
tcaggaagtcggcgtgtcgagtggctcttcctggctgctgaggcgggttaaggtctgagggtcttgtggggccacggcgctgatcaccaggtgtttggcttggtcggttcttatttctcgcctggcaatggcgacgtacacctgcataacttgccgggtggcgttccgcgacgcggacatgcagcgggcccactataagacggactggcaccgctacaacctgcggcggaaggtggccagcatggccccagtgaccgccgagggcttccaggagcgagtgcgggcgcagcgggccgtcgcggaggaggagagcaagggctcggccacctactgcaccgtttgcagtaagaagtttgcctctttcaacgcctacgagaaccacctcaagtcccggcgtcacgttgagctggagaagaaggccgtgcaggcagtgaatcggaaagtggagatgatgaatgaaaagaacttggagaaaggactgggcgtggacagtgtggacaaggatgccatgaacgcggccatccagcaggccatcaaggcccagccgtccatgtctcccaagaaggcgcccccagcgcctgcaaaggaggccaggaatgtcgtggccgtgggtactggtggccgtgggacccacgaccgagacccgagtgagaaaccaccccggctccagtggtttgaacagcaggcgaagaagttggcaaagcagcaggaggaggacagcgaggaggaggaagaggacctggatggagacgattgggaagatattgattctgatgaagaattggaatgtgaggatactgaagcaatggacgatgtggtggagcaggatgcagaggaggaagaggctgaggaaggcccaccccttggtgccatccctatcacggactgcttattttgttcccatcattccagctcgctgatgaagaatgtggctcacatgaccaaagaccacagtttctttattcctgatatagaatatctttcagatattaagggactgattaaatacttgggagagaaagttggtgttggcaagatttgcttgtggtgcaacgagaaagggaagtccttctactccacagaagctgtacaggcacatatgaatgacaaaagccactgtaagctcttcacagatggcgatgctgctttggaatttgcagacttctatgattttaggagtagctatccagatcacaaggaaggggaggaccccaataaggctgaggagttgccctcagaaaagaacttggaatatgatgatgaaaccatggaattgattctgccttctggtgccagagtgggtcatcgctccttgatgagatactacaaacagcgatttggcttgtcaagagctgtggcagttgccaaaaatcggaaggccgtgggccgagtacttcagcagtacagagccctgggatggactggcagcacaggagcggctcttatgcgagagcgagacatgcagtatgtccaaaggatgaaatcaaaatggatgctgaagacaggaatgaagaacaatgccaccaagcagatgcactttcgggtccaagtgagattctgagagtctgctgggattgagcaatcatctcctgcccaagtttcctccttgccctgaggaccagtgaaagacagatcataggagagacccttttgctgctacttcattcgttctgacctaataataaaagttagaaccata

SEQ ID NO: 203254 - DNA, 2733 bp, Homo sapiens
  Payload ID: 20081
  Gene Name: zinc finger protein 623
  ENST ID: ENST00000458270
  CDS Start-End: 350-1840
ggacgggggcgggcaacgccttagccgcagccccggctggctccggagcccggccgccttgccagggcacagtccgccgagagggccgggcggggtccgcaggccgctgcccgccccgctagggcgtccaggagcggggccttggctagtcagtctcccggacgcagccacggccgcccccgcgaggctgcggcgtctctccagcgagcccgcctcgggcccgagcctggggtcttgtccctgaggagcgccgtattctaatgtaggaactggtgagaagaaggtgactgaagcctggatttctgaggatgaaaactcacataggacgacgtcagacagactcacggtgatggagctcccctctcccgagtctgaggaagtccacgagcccagattaggggagctcttgggaaatccagaaggtcagagcctggggagttccccctctcaggacaggggctgcaagcaggtgacagtgacccattggaagatccagacaggagagacagctcaagtgtgcaccaagtcaggaagaaaccatattctgaactcagaccttcttctgcttcagagagagctcatagagggggaagccaatccttgcgatatctgtggcaaaaccttcacgtttaattcggacctagttaggcatcggatttcgcatgctggggagaaaccttacacgtgcgatcagtgtgggaaaggctttggccagagctcacaccttatggagcatcagagaattcacactggagagagactctacgtctgtaatgtgtgtgggaaagacttcattcactattcaggtctcattgagcatcagcgcgttcattcaggagaaaagcccttcaaatgtgcgcagtgtgggaaggcgttttgtcacagttcagacctgattaggcaccagagagttcacaccagagagagaccttttgaatgcaaagagtgtgggaaaggcttcagtcagagctccttacttattcgccatcagaggattcacacgggagaaaggccctatgagtgcaatgaatgtgggaaatccttcataaggagctcgagcctcattcgccattatcagatccacacagaagtgaaacagtatgaatgcaaagaatgtgggaaggcattccgtcatcgctcagaccttattgaacaccagagaattcacaccggagagagaccctttgaatgcaatgagtgtgggaaagcctttattcggagttcaaagctcattcagcatcagaggatccatactggggagaggccttacgtatgcaatgagtgtgggaagcgcttcagccagacgtcaaacttcacccagcatcagagaattcacactggagagaaactctatgaatgtaacgagtgtgggaaagctttctttctgagttcataccttattcgacaccagaaaatccacactggagagagagtgtatgaatgtaaggaatgtgggaaagcgtttctccagaaagcccatctcactgagcaccagaagatccactctggggacaggcccttcgaatgtaaagactgtgggaaagccttcatccagagctccaagctgcttctgcaccagattattcacactggagaaaagccctatgtgtgcagttattgtgggaaaggctttattcagaggtcaaacttccttcaacaccagaaaattcatactgaagagaagctctatgaatgtagtcagtatgggagagattttaactcaactacaaacgttaaaaataatcaaagggttcaccaagagggactctccttgagtaaggcccccatacatttgggtgagaggtctgtagataagggggaacacacaggtaacttataaaataattactttcccgcccagtgagtgatgtttggaaatgcgtggaattaggattcatgtggtttctaagatttggacatgtcagaattttgtgagtcatggatggggctgcttttgcagtgggtgccacctgccactgtgcagccctactcggctcagcccttctcctcagctgtgagcactgtcctcaggagagtcacagggcttgacacctgactctgagctggaacagtaggggcagggagaagacaggtctcaagaaaaggtttttaagaagtttcatccccagttaagcagagtccatccttgacttaaatcccttattacagcacaactgtgtatctaatcttacgatttaggagaatgttacctaggacattttgatgtgttaagttgaagaaaggtaactcgtgtatgaaccccgagccatttccctgttgtcctgaggaggaactccaggcctcccatcgtgtgccctaaggcctcctgcgtcctggagccctgcctcccactgcctgacttcctgccacacggttaatgctgcagcaacaccgactgcttcatcttccctgtgctccacgtggcttcctacctctctcgcctttgttcttgttgaagggtctcttctcagctaattaactctgaatcatggttcaagacaagcctcaggcatcatgtcaatgggtgtttccctcaagcttagttggcagcactctccacacttctgtggctcagtgattactgctattactatatttacttgcatatgtcagaatgatgtgatagactatctctgtcactatgctgttgggttcctgaggacagtgatcatatctgattgatttccatgtgtccactgtctagcacagggcaataaaaaatacacccctaaa

SEQ ID NO: 203255 - DNA, 2612 bp, Homo sapiens
  Payload ID: 20081
  Gene Name: zinc finger protein 623
  ENST ID: ENST00000526926
  CDS Start-End: 229-1719
tctcgcgacttccggtcgcggcgggctggcggcggtgcaggctttgtcggctgatctgtggggcccgcgccggcggggtccagtcagcggctgcagggtcgggctcgcgccgtcctctccccgcccgcgccggattctaatgtaggaactggtgagaagaaggtgactgaagcctggatttctgaggatgaaaactcacataggacgacgtcagacagactcacggtgatggagctcccctctcccgagtctgaggaagtccacgagcccagattaggggagctcttgggaaatccagaaggtcagagcctggggagttccccctctcaggacaggggctgcaagcaggtgacagtgacccattggaagatccagacaggagagacagctcaagtgtgcaccaagtcaggaagaaaccatattctgaactcagaccttcttctgcttcagagagagctcatagagggggaagccaatccttgcgatatctgtggcaaaaccttcacgtttaattcggacctagttaggcatcggatttcgcatgctggggagaaaccttacacgtgcgatcagtgtgggaaaggctttggccagagctcacaccttatggagcatcagagaattcacactggagagagactctacgtctgtaatgtgtgtgggaaagacttcattcactattcaggtctcattgagcatcagcgcgttcattcaggagaaaagcccttcaaatgtgcgcagtgtgggaaggcgttttgtcacagttcagacctgattaggcaccagagagttcacaccagagagagaccttttgaatgcaaagagtgtgggaaaggcttcagtcagagctccttacttattcgccatcagaggattcacacgggagaaaggccctatgagtgcaatgaatgtgggaaatccttcataaggagctcgagcctcattcgccattatcagatccacacagaagtgaaacagtatgaatgcaaagaatgtgggaaggcattccgtcatcgctcagaccttattgaacaccagagaattcacaccggagagagaccctttgaatgcaatgagtgtgggaaagcctttattcggagttcaaagctcattcagcatcagaggatccatactggggagaggccttacgtatgcaatgagtgtgggaagcgcttcagccagacgtcaaacttcacccagcatcagagaattcacactggagagaaactctatgaatgtaacgagtgtgggaaagctttctttctgagttcataccttattcgacaccagaaaatccacactggagagagagtgtatgaatgtaaggaatgtgggaaagcgtttctccagaaagcccatctcactgagcaccagaagatccactctggggacaggcccttcgaatgtaaagactgtgggaaagccttcatccagagctccaagctgcttctgcaccagattattcacactggagaaaagccctatgtgtgcagttattgtgggaaaggctttattcagaggtcaaacttccttcaacaccagaaaattcatactgaagagaagctctatgaatgtagtcagtatgggagagattttaactcaactacaaacgttaaaaataatcaaagggttcaccaagagggactctccttgagtaaggcccccatacatttgggtgagaggtctgtagataagggggaacacacaggtaacttataaaataattactttcccgcccagtgagtgatgtttggaaatgcgtggaattaggattcatgtggtttctaagatttggacatgtcagaattttgtgagtcatggatggggctgcttttgcagtgggtgccacctgccactgtgcagccctactcggctcagcccttctcctcagctgtgagcactgtcctcaggagagtcacagggcttgacacctgactctgagctggaacagtaggggcagggagaagacaggtctcaagaaaaggtttttaagaagtttcatccccagttaagcagagtccatccttgacttaaatcccttattacagcacaactgtgtatctaatcttacgatttaggagaatgttacctaggacattttgatgtgttaagttgaagaaaggtaactcgtgtatgaaccccgagccatttccctgttgtcctgaggaggaactccaggcctcccatcgtgtgccctaaggcctcctgcgtcctggagccctgcctcccactgcctgacttcctgccacacggttaatgctgcagcaacaccgactgcttcatcttccctgtgctccacgtggcttcctacctctctcgcctttgttcttgttgaagggtctcttctcagctaattaactctgaatcatggttcaagacaagcctcaggcatcatgtcaatgggtgtttccctcaagcttagttggcagcactctccacacttctgtggctcagtgattactgctattactatatttacttgcatatgtcagaatgatgtgatagactatctctgtcactatgctgttgggttcctgaggacagtgatcatatctgattgatttccatgtgtccactgtctagcacagggcaataaaaaatacacccctaaa

SEQ ID NO: 203256 - DNA, 6759 bp, Homo sapiens
  Payload ID: 20081
  Gene Name: zinc finger protein 623
  Uniprot ID: O75123
  ENST ID: ENST00000501748
  CDS Start-End: 214-1824
gcaccacagaccagtctgtcctggtgttggatgttaaaagtggagccacaaagaagccatcttatgtgggacaggcttgggtgtgagaccagagctgtgggtagcagcatgttgggtcaggatgaggggcagaggaaacactttccacctcttggatatggattttatcctgccctgattcaggagatccccatctgttaagtaaggggaaagatgattttgttgtcttttgtttcagattctaatgtaggaactggtgagaagaaggtgactgaagcctggatttctgaggatgaaaactcacataggacgacgtcagacagactcacggtgatggagctcccctctcccgagtctgaggaagtccacgagcccagattaggggagctcttgggaaatccagaaggtcagagcctggggagttccccctctcaggacaggggctgcaagcaggtgacagtgacccattggaagatccagacaggagagacagctcaagtgtgcaccaagtcaggaagaaaccatattctgaactcagaccttcttctgcttcagagagagctcatagagggggaagccaatccttgcgatatctgtggcaaaaccttcacgtttaattcggacctagttaggcatcggatttcgcatgctggggagaaaccttacacgtgcgatcagtgtgggaaaggctttggccagagctcacaccttatggagcatcagagaattcacactggagagagactctacgtctgtaatgtgtgtgggaaagacttcattcactattcaggtctcattgagcatcagcgcgttcattcaggagaaaagcccttcaaatgtgcgcagtgtgggaaggcgttttgtcacagttcagacctgattaggcaccagagagttcacaccagagagagaccttttgaatgcaaagagtgtgggaaaggcttcagtcagagctccttacttattcgccatcagaggattcacacgggagaaaggccctatgagtgcaatgaatgtgggaaatccttcataaggagctcgagcctcattcgccattatcagatccacacagaagtgaaacagtatgaatgcaaagaatgtgggaaggcattccgtcatcgctcagaccttattgaacaccagagaattcacaccggagagagaccctttgaatgcaatgagtgtgggaaagcctttattcggagttcaaagctcattcagcatcagaggatccatactggggagaggccttacgtatgcaatgagtgtgggaagcgcttcagccagacgtcaaacttcacccagcatcagagaattcacactggagagaaactctatgaatgtaacgagtgtgggaaagctttctttctgagttcataccttattcgacaccagaaaatccacactggagagagagtgtatgaatgtaaggaatgtgggaaagcgtttctccagaaagcccatctcactgagcaccagaagatccactctggggacaggcccttcgaatgtaaagactgtgggaaagccttcatccagagctccaagctgcttctgcaccagattattcacactggagaaaagccctatgtgtgcagttattgtgggaaaggctttattcagaggtcaaacttccttcaacaccagaaaattcatactgaagagaagctctatgaatgtagtcagtatgggagagattttaactcaactacaaacgttaaaaataatcaaagggttcaccaagagggactctccttgagtaaggcccccatacatttgggtgagaggtctgtagataagggggaacacacaggtaacttataaaataattactttcccgcccagtgagtgatgtttggaaatgcgtggaattaggattcatgtggtttctaagatttggacatgtcagaattttgtgagtcatggatggggctgcttttgcagtgggtgccacctgccactgtgcagccctactcggctcagcccttctcctcagctgtgagcactgtcctcaggagagtcacagggcttgacacctgactctgagctggaacagtaggggcagggagaagacaggtctcaagaaaaggtttttaagaagtttcatccccagttaagcagagtccatccttgacttaaatcccttattacagcacaactgtgtatctaatcttacgatttaggagaatgttacctaggacattttgatgtgttaagttgaagaaaggtaactcgtgtatgaaccccgagccatttccctgttgtcctgaggaggaactccaggcctcccatcgtgtgccctaaggcctcctgcgtcctggagccctgcctcccactgcctgacttcctgccacacggttaatgctgcagcaacaccgactgcttcatcttccctgtgctccacgtggcttcctacctctctcgcctttgttcttgttgaagggtctcttctcagctaattaactctgaatcatggttcaagacaagcctcaggcatcatgtcaatgggtgtttccctcaagcttagttggcagcactctccacacttctgtggctcagtgattactgctattactatatttacttgcatatgtcagaatgatgtgatagactatctctgtcactatgctgttgggttcctgaggacagtgatcatatctgattgatttccatgtgtccactgtctagcacagggcaataaaaaatacacccctaaatctatgtgtaattggcatctctcttgctttgtcctttctatactgccattctaaaaattttcagctgttggctgttttttttgttgtttgttcattttgtatcagtataatctacgattctgttagaagtatcttctcagccctgctactgtctgctgctcctacttagaagttgcaggcaatatcctgtgcacatccacgccctcctgtgtgccaccttacagctcatgcagaactgtctacttgatctggagggcattgacacctggctcagctggaacagtggggacaggaggaggcaggtctcaagagaaggtctttacttacttgtctgtatctttctgtctcactcgaaaggcacagtctcaatgcgctacgtaactcttctgttgtagcagttctgaggttgaactgagctcttgtcattttccatgctctctggctcattgtgtcatttcaaaatgtattgatatctataaggaatagtcctcaatgttgggaaaacagatgagcaacccactaccctgaagtcatccaccgtgtagtggggaagacggagatcacagtagggtgagttaagtatgtgccctcaggtgtgaaggagcacaggtgagggggtgcctgctgtggcacagagctgggaaggccttacagaagaggtgacatttcagctgggccagagatcagtagagagcagctgaagaagaaaatagggtccaggagaggaatctgcagaaacatggagccatgacagatggctttttggctaggactgttcgaaagcaggcgaggtaaatggacagtggacagccgcctcgccaaactgttagtctttacctctgaatttcatctggacatgaaccccaaagtccagttttgtaacgatataatttttttctcatgaggccatattttgagttcttaaatactaccaaccctgaacgtctcaggacaaataattcaaaaaagagatctacattttctggaaaatcagcattactagagatgtttcaaatgtagattttaccagaccattttaatcaactttattgagattcaattttcatatagtaaaacgcctatttaagtgtacaaggttttgaaaaatctatacacctgtgtaaccaccaccacctgtgtaaccaccaccgccagaaccaaaaacgtttctgtcacccaaagaagttcccttttgccttttcctagttaagcccactccagccccagataaccactttctatcctcatagattagtgttgcttggtttagagcctcatacaaatggattcatttactatgtgttcttttgcgtctgatgtctcactttggcatgtttttagactcatccaagctgttttgtgtttcagtagttctccttgctgaatagtattccattgtgtggataagccatcatttgtttattcatccatgtgttaatgggtttccagtctcggctcttaaaactatgagcatttgtgtaaaagtatgtatttgcacatgtgtttttatttctcttgggtaagtacctaggactttaattgctgtgttgtaagtgtcttagttcattcaggctgccataacaaaataccatcaactgggaggcttataaacaacagaaatttatgttttacagttctggaggctgggaagtccaagatgagggtgtcaacatttggtgtctagtgagggcctgcttccttttaagtagatgtctttttactgtgactgcacgtggtggaaagggactagcaagcttaccccattcatgagggctctccccttgtgattctgtcccctccccaagaccccacctcatatcatcttatgggttaggaatttgacatgaattgtgcaaggatgtaaacattcagtccattgcaatacgtgtttctaacttcctaagaaattgtcacacagccctctgtagtggttgaatcattttacactattactacattatgggaagattccagttgctccatatctttgctaacacttggcattgtcagtctcttaaaatttaatccactctagcctccttatgattttaatttgtatttgcccactgaataatgtatgtctatgatttcatctgcttattgcttttccgtgtcgtcttttgtgatgtgtctgttcgtgccttttgcctgtttttaagttgggatgcttattgttgactcaagttctttccatattctgcatgaaaaacatacatgtaatatatagaattctttgtctccatttgtgacaaatattgtgaatattttcatgtttggtttgcctgttcattttcttaatggtgtcttttgaatattttttattaagcctaatttatcaaagatttgggtgtggtggctcatgtctgtaatcccagcactttgggaggccaaggtaggcagatcacctgaggccagaagtttgagaccagcctggccaacgtggtgaaaccccgtctctactaaaaatacaaaaattatctgggcgggtggcacacccctgtagtccctgctactcgggaggctgaggcaggagaatcacttgaacccaggaggcagaggttgcagtaaaccaagataataataataatgatttatgatattttataataatttgagtttaagaaatttgcctactcaaaggacatgattttttcctatgttttttatttttatggaacttttatagttttaccttttacatttaagtctgtgatccattttgagttcatttttgtgtaccatatgtgataagggtcaagattcacttttttatctgtgtggttggttggttcggttctatttgttgagactctactttcccaatgaccaagtcttcacaggtttgtaaaaactgaagtgacatagaagtggtctgttctggacaccattcttcttgtgtgtataactttacaccaatatgacactatattgattactgtagttttatttgaggcagaaatctcattctgttgcccaggctggagcgtagtggcacaatcacagctaatgtaacctcgaacatccgggctcaagtgagcctctttccttagcctcccaagtagttgggactgtaggcatgcatcaccacatcttgctaattttttatatttttttgtagagatgggggtctcactatgttgaccaggctggtcttgaactcctggcctcaagggatcctcctgcctcagcctcccaaagggattacaggtgtgagccaccactcctggccaactgtagttgaactcaggtattggaagggcttccgttttgttcttttcccatttttttttttttgacttctagatcctttgcattttcgtataaaatttgaagtcaacttctatcaacttcaggccaggcccgtggctcatgcctgtataatcccagcactttgggaggccgaggcaggcggatcacttgaggtcaggagttcaaaaccagcctggccaagatggtgaaaccccatctctactaaaaatacaaaaaaattagccaggcgtggtggcaggcgcctgtagaatcccagctactcgggaggctgaggcaggagaattgcttgaacctgggaggtggaggtttcagtgagctgagatcgtggcattgcactctagcctgggcaaccaagagtgaaactgtctcaaaaaacaacttttatcaatgtctgcaaaaagaaagtcttctgggatttatagatcaatttagggagaaatgacattttaacaattctgagttttccaattgttgaacatggtgtactgccccatttatttagatctgttaatttctctcagtttgcagctctcacattttgttaaattcatgtatttaatatttctgcatgctattgcaagtggtaaggttttcaaaaagctgttttctagttattgctagtatatagaaatgcattagacttgtacattgatcttgtatcaagcaacttagatcagttaacttattctagtagcttttttctagattctttagcattttctatgtagataatcatgtcatctgtgaataaagtattttacttttccaattt

SEQ ID NO: 203257 - DNA, 2733 bp, Homo sapiens
  Payload ID: 20081
  Gene Name: zinc finger protein 623
  ENST ID: ENST00000618766
  CDS Start-End: 350-1840
ggacgggggcgggcaacgccttagccgcagccccggctggctccggagcccggccgccttgccagggcacagtccgccgagagggccgggcggggtccgcaggccgctgcccgccccgctagggcgtccaggagcggggccttggctagtcagtctcccggacgcagccacggccgcccccgcgaggctgcggcgtctctccagcgagcccgcctcgggcccgagcctggggtcttctccctgaggagcgccgtattctaatgtaggaactggtgagaagaaggtgactgaagcctggatttctgaggatgaaaactcacataggacgacgtcagacagactcacggtgatggagctcccctctcccgagtctgaggaagtccacgagcccagattaggggagctcttgggaaatccagaaggtcagagcctggggagttccccctctcaggacaggggctgcaagcaggtgacagtgacccattggaagatccagacaggagagacagctcaagtgtgcaccaagtcaggaagaaaccatattctgaactcagaccttcttctgcttcagagagagctcatagagggggaagccaatccttgcgatatctgtggcaaaaccttcacgtttaattcggacctagttaggcatcggatttcgcatgctggggagaaaccttacacgtgcgatcagtgtgggaaaggctttggccagagctcacaccttatggagcatcagagaattcacactggagagagactctacgtctgtaatgtgtgtgggaaagacttcattcactattcaggtctcattgagcatcagcgcgttcattcaggagaaaagcccttcaaatgtgcgcagtgtgggaaggcgttttgtcacagttcagacctgattaggcaccagagagttcacaccagagagagaccttttgaatgcaaagagtgtgggaaaggcttcagtcagagctccttacttattcgccatcagaggattcacacgggagaaaggccctatgagtgcaatgaatgtgggaaatccttcataaggagctcgagcctcattcgccattatcagatccacacagaagtgaaacagtatgaatgcaaagaatgtgggaaggcattccgtcatcgctcagaccttattgaacaccagagaattcacaccggagagagaccctttgaatgcaatgagtgtgggaaagcctttattcggagttcaaagctcattcagcatcagaggatccatactggggagaggccttacgtatgcaatgagtgtgggaagcgcttcagccagacgtcaaacttcacccagcatcagagaattcacactggagagaaactctatgaatgtaacgagtgtgggaaagctttctttctgagttcataccttattcgacaccagaaaatccacactggagagagagtgtatgaatgtaaggaatgtgggaaagcgtttctccagaaagcccatctcactgagcaccagaagatccactctggggacaggcccttcgaatgtaaagactgtgggaaagccttcatccagagctccaagctgcttctgcaccagattattcacactggagaaaagccctatgtgtgcagttattgtgggaaaggctttattcagaggtcaaacttccttcaacaccagaaaattcatactgaagagaagctctatgaatgtagtcagtatgggagagattttaactcaactacaaacgttaaaaataatcaaagggttcaccaagagggactctccttgagtaaggcccccatacatttgggtgagaggtctgtagataagggggaacacacaggtaacttataaaataattactttcccgcccagtgagtgatgtttggaaatgcgtggaattaggattcatgtggtttctaagatttggacatgtcagaattttgtgagtcatggatggggctgcttttgcagtgggtgccacctgccactgtgcagccctactcggctcagcccttctcctcagctgtgagcactgtcctcaggagagtcacagggcttgacacctgactctgagctggaacagtaggggcagggagaagacaggtctcaagaaaaggtttttaagaagtttcatccccagttaagcagagtccatccttgacttaaatcccttattacagcacaactgtgtatctaatcttacgatttaggagaatgttacctaggacattttgatgtgttaagttgaagaaaggtaactcgtgtatgaaccccgagccatttccctgttgtcctgaggaggaactccaggcctcccatcgtgtgccctaaggcctcctgcgtcctggagccctgcctcccactgcctgacttcctgccacacggttaatgctgcagcaacaccgactgcttcatcttccctgtgctccacgtggcttcctacctctctcgcctttgttcttgttgaagggtctcttctcagctaattaactctgaatcatggttcaagacaagcctcaggcatcatgtcaatgggtgtttccctcaagcttagttggcagcactctccacacttctgtggctcagtgattactgctattactatatttacttgcatatgtcagaatgatgtgatagactatctctgtcactatgctgttgggttcctgaggacagtgatcatatctgattgatttccatgtgtccactgtctagcacagggcaataaaaaatacacccctaaa

SEQ ID NO: 203258 - DNA, 2612 bp, Homo sapiens
  Payload ID: 20081
  Gene Name: zinc finger protein 623
  ENST ID: ENST00000620499
  CDS Start-End: 229-1719
tctcgcgacttccggtcgcggcgggctggcggcggtgcaggctttgtcggctgatctgtggggcccgcgcccgcggggtccagtcagcggctgcagggtcgggctcgcgccgtcctctccccgcccgcgccggattctaatgtaggaactggtgagaagaaggtgactgaagcctggatttctgaggatgaaaactcacataggacgacgtcagacagactcacggtgatggagctcccctctcccgagtctgaggaagtccacgagcccagattaggggagctcttgggaaatccagaaggtcagagcctggggagttccccctctcaggacaggggctgcaagcaggtgacagtgacccattggaagatccagacaggagagacagctcaagtgtgcaccaagtcaggaagaaaccatattctgaactcagaccttcttctgcttcagagagagctcatagagggggaagccaatccttgcgatatctgtggcaaaaccttcacgtttaattcggacctagttaggcatcggatttcgcatgctggggagaaaccttacacgtgcgatcagtgtgggaaaggctttggccagagctcacaccttatggagcatcagagaattcacactggagagagactctacgtctgtaatgtgtgtgggaaagacttcattcactattcaggtctcattgagcatcagcgcgttcattcaggagaaaagcccttcaaatgtgcgcagtgtgggaaggcgttttgtcacagttcagacctgattaggcaccagagagttcacaccagagagagaccttttgaatgcaaagagtgtgggaaaggcttcagtcagagctccttacttattcgccatcagaggattcacacgggagaaaggccctatgagtgcaatgaatgtgggaaatccttcataaggagctcgagcctcattcgccattatcagatccacacagaagtgaaacagtatgaatgcaaagaatgtgggaaggcattccgtcatcgctcagaccttattgaacaccagagaattcacaccggagagagaccctttgaatgcaatgagtgtgggaaagcctttattcggagttcaaagctcattcagcatcagaggatccatactggggagaggccttacgtatgcaatgagtgtgggaagcgcttcagccagacgtcaaacttcacccagcatcagagaattcacactggagagaaactctatgaatgtaacgagtgtgggaaagctttctttctgagttcataccttattcgacaccagaaaatccacactggagagagagtgtatgaatgtaaggaatgtgggaaagcgtttctccagaaagcccatctcactgagcaccagaagatccactctggggacaggcccttcgaatgtaaagactgtgggaaagccttcatccagagctccaagctgcttctgcaccagattattcacactggagaaaagccctatgtgtgcagttattgtgggaaaggctttattcagaggtcaaacttccttcaacaccagaaaattcatactgaagagaagctctatgaatgtagtcagtatgggagagattttaactcaactacaaacgttaaaaataatcaaagggttcaccaagagggactctccttgagtaaggcccccatacatttgggtgagaggtctgtagataagggggaacacacaggtaacttataaaataattactttcccgcccagtgagtgatgtttggaaatgcgtggaattaggattcatgtggtttctaagatttggacatgtcagaattttgtgagtcatggatggggctgcttttgcagtgggtgccacctgccactgtgcagccctactcggctcagcccttctcctcagctgtgagcactgtcctcaggagagtcacagggcttgacacctgactctgagctggaacagtaggggcagggagaagacaggtctcaagaaaaggtttttaagaagtttcatccccagttaagcagagtccatccttgacttaaatcccttattacagcacaactgtgtatctaatcttacgatttaggagaatgttacctaggacattttgatgtgttaagttgaagaaaggtaactcgtgtatgaaccccgagccatttccctgttgtcctgaggaggaactccaggcctcccatcgtgtgccctaaggcctcctgcgtcctggagccctgcctcccactgcctgacttcctgccacacggttaatgctgcagcaacaccgactgcttcatcttccctgtgctccacgtggcttcctacctctctcgcctttgttcttgttgaagggtctcttctcagctaattaactctgaatcatggttcaagacaagcctcaggcatcatgtcaatgggtgtttccctcaagcttagttggcagcactctccacacttctgtggctcagtgattactgctattactatatttacttgcatatgtcagaatgatgtgatagactatctctgtcactatgctgttgggttcctgaggacagtgatcatatctgattgatttccatgtgtccactgtctagcacagggcaataaaaaatacacccctaaa

SEQ ID NO: 203259 - DNA, 6757 bp, Homo sapiens
  Payload ID: 20081
  Gene Name: zinc finger protein 623
  ENST ID: ENST00000633071
  CDS Start-End: 214-1824
gcaccacagaccagtctgtcctggtgttggatgttaaaagtggagccacaaagaagccatcttatgtgggacaggcttgggtgtgagaccagagctgtgggtagcagcatgttgggtcaggatgaggggcagaggaaacactttccacctcttggatatggattttatcctgccctgattcaggagatccccatctattaagtaaggggaaagatgattttgttgtcttttgtttcagattctaatgtaggaactggtgagaagaaggtgactgaagcctggatttctgaggatgaaaactcacataggacgacgtcagacagactcacggtgatggagctcccctctcccgagtctgaggaagtccacgagcccagattaggggagctcttgggaaatccagaaggtcagagcctggggagttccccctctcaggacaggggctgcaagcaggtgacagtgacccattggaagatccagacaggagagacagctcaagtgtgcaccaagtcaggaagaaaccatattctgaactcagaccttcttctgcttcagagagagctcatagagggggaagccaatccttgcgatatctgtggcaaaaccttcacgtttaattcggacctagttaggcatcggatttcgcatgctggggagaaaccttacacgtgcgatcagtgtgggaaaggctttggccagagctcacaccttatggagcatcagagaattcacactggagagagactctacgtctgtaatgtgtgtgggaaagacttcattcactattcaggtctcattgagcatcagcgcgttcattcaggagaaaagcccttcaaatgtgcgcagtgtgggaaggcgttttgtcacagttcagacctgattaggcaccagagagttcacaccagagagagaccttttgaatgcaaagagtgtgggaaaggcttcagtcagagctccttacttattcgccatcagaggattcacacgggagaaaggccctatgagtgcaatgaatgtgggaaatccttcataaggagctcgagcctcattcgccattatcagatccacacagaagtgaaacagtatgaatgcaaagaatgtgggaaggcattccgtcatcgctcagaccttattgaacaccagagaattcacaccggagagagaccctttgaatgcaatgagtgtgggaaagcctttattcggagttcaaagctcattcagcatcagaggatccatactggggagaggccttacgtatgcaatgagtgtgggaagcgcttcagccagacgtcaaacttcacccagcatcagagaattcacactggagagaaactctatgaatgtaacgagtgtgggaaagctttctttctgagttcataccttattcgacaccagaaaatccacactggagagagagtgtatgaatgtaaggaatgtgggaaagcgtttctccagaaagcccatctcactgagcaccagaagatccactctggggacaggcccttcgaatgtaaagactgtgggaaagccttcatccagagctccaagctgcttctgcaccagattattcacactggagaaaagccctatgtgtgcagttattgtgggaaaggctttattcagaggtcaaacttccttcaacaccagaaaattcatactgaagagaagctctatgaatgtagtcagtatgggagagattttaactcaactacaaacgttaaaaataatcaaagggttcaccaagagggactctccttgagtaaggcccccatacatttgggtgagaggtctgtagataagggggaacacacaggtaacttataaaataattactttcccgcccagtgagtgatgtttggaaatgcgtggaattaggattcatgtggtttctaagatttggacatgtcagaattttgtgagtcatggatggggctgcttttgcagtgggtgccacctgccactgtgcagccctactcggctcagcccttctcctcagctgtgagcactgtcctcaggagagtcacagggcttgacacctgactctgagctggaacagtaggggcagggagaagacaggtctcaagaaaaggtttttaagaagtttcatccccagttaagcagagtccatccttgacttaaatcccttattacagcacaactgtgtatctaatcttacgatttaggagaatgttacctaggacattttgatgtgttaagttgaagaaaggtaactcgtgtatgaaccccgagccatttccctgttgtcctgaggaggaactccaggcctcccatcgtgtgccctaaggcctcctgcgtcctggagccctgcctcccactgcctgacttcctgccacacggttaatgctgcagcaacaccgactgcttcatcttccctgtgctccacgtggcttcctacctctctcgcctttgttcttgttgaagggtctcttctcagctaattaactctgaatcatggttcaagacaagcctcaggcatcatgtcaatgggtgtttccctcaagcttagttggcagcactctccacacttctgtggctcagtgattactgctattactatatttacttgcatatgtcagaatgatgtgatagactatctctgtcactatgctgttgggttcctgaggacagtgatcatatctgattgatttccatgtgtccactgtctagcacagggcaataaaaaatacacccctaaatctatgtgtaattggcatctctcttgctttgtcctttctatactgccattctaaaaattttcagctgttggctgttttttttgttgtttgttcattttgtatcagtataatctacgattctgttagaagtatcttctcagccctgctactgtctgctgctcctacttagaagttgcaggcaatatcctgtgcacatccacgccctcctgtgtgccaccttacagctcatgcagaactgtctacttgatctggagggcattgacacctggctcagctggaacagtggggacaggaggaggcaggtctcaagagaaggtctttacttacttgtctgtatctttctgtctcactcgaaaggcacagtctcaatgcgctacgtaactcttctgttgtagcagttctgaggttgaactgagctcttgtcattttccatgctctctggctcattgtgtcatttcaaaatgtattgatatctataaggaatagtcctcaatgttgggaaaacagatgagcaacccactaccctgaagtcatccaccgtgtagtggggaagacggagatcacagtagggtgagttaagtatgtgccctcaggtgtgaaggagcacaggtgagggggtgcctgctgtggcacagagctgggaaggccttacagaagaggtgacatttcagctgggccagagatcagtagagagcagctgaagaagaaaatagggtccaggagaggaatctgcagaaacatggagccatgacagatggctttttggctaggactgttcgaaagcaggcgaggtaaatggacagtggacagccgcctcgccaaactgttagtctttacctctgaatttcatctggacatgaaccccaaagtccagttttgtaacgatataatttttttctcatgaggccatattttgagttcttaaatactaccaaccctgaacgtctcaggacaaataattcaaaaaagagatctacattttctggaaaatcagcattactagagatgtttcaaatgtagattttaccagaccattttaatcaactttattgagattcaattttcatatagtaaaacgcctatttaagtgtacaaggttttgaaaaatctatacacctgtgtaaccaccaccacctgtgtaaccaccaccgccagaaccaaaaacgtttctgtcacccaaagaagttcccttttgccttttcctagttaagcccactccagccccagataaccactttctatcctcatagattagtgttgcttggtttagagcctcatacaaatggattcatttactatgtgttcttttgcgtctgatgtctcactttggcatgtttttagactcatccaagctgttttgtgtttcagtagttctccttgctgaatagtattccattgtgtggataagccatcatttgtttattcatccacgtgttaatgggtttccagtctcggctcttaaaactatgagcatttgtgtaaaagtatgtatttgcacatgtgtttttatttctcttgggtaagtacctaggactttaattgctgtgttgtaagtgtcttagttcattcaggctgccataacaaaataccatcaactgggaggcttataaacaacagaaatttatgttttacagttctggaggctgggaagtccaagatgagggtgtcaacatttggtgtctagtgagggcctgcttccttttaagtagatgtctttttactgtgactgcacgtggtggaaagggactagcaagcttaccccattcatgagggctctccccttgtgattctgtcccctccccaagaccccacctcatatcatcttatgggttaggaatttgacatgaattgtgcaaggatgtaaacattcagtccattgcaatacgtgtttctaacttcctaagaaattgtcacacagccctctgtagtggttgaatcattttacactattactacattatgggaagattccagttgctccatatctttgctaacacttggcattgtcagtctcttaaaatttaatccactctagcctccttatgattttaatttgtatttgcccactgaataatgtatgtctatgatttcatctgcttattgcttttccgtgtcgtcttttgtgatgtgtctgttcgtgccttttgcctgtttttaagttgggatgcttattgttgactcaagttctttccatattctgcatgaaaaacatacatgtaatatatagaattctttgtctccatttgtgacaaatattgtgaatattttcatgtttggtttgcctgttcattttcttaatggtgtcttttgaatattttttattaagcctaatttatcaaagatttgggtgtggtggctcatgtctgtaatcccagcactttgggaggccaaggtaggcagatcacctgaggccagaagtttgagaccagcctggccaacgtggtgaaaccccgtctctactaaaaatacaaaaattatctgggcgggtggcacacccctgtagtccctgctactcgggaggctgaggcaggagaatcacttgaacccaggaggcagaggttgcagtaaaccaagataataataataatgatttatgatattttataataatttgagtttaagaaatttgcctactcaaaggacatgattttttcctatgttttttatttttatggaacttttatagttttaccttttacatttaagtctgtgatccattttgagttcatttttgtgtaccatatgtgataagggtcaagattcacttttttatctgtgtggttggttggttcggttctatttgttgagactctactttcccaatgaccaagtcttcacaggtttgtaaaaactgaagtgacatagaagtggtctgttctggacaccattcttcttgtgtgtataactttacaccaatatgacactatattgattactgtagttttatttgaggcagaaatctcattctgttgcccaggctggagcgtagtggcacaatcacagctaatgtaacctcgaacatccgggctcaagtgagcctctttccttagcctcccaagtagttgggactgtaggcatgcatcaccacatcttgctaattttttatatttttttgtagagatgggggtctcactatgttgaccaggctggtcttgaactcctggcctcaagggatcctcctgcctcagcctcccaaagggattacaggtgtgagccaccactcctggccaactgtagttgaactcaggtattggaagggcttccgttttgttcttttcccatttttttttttgacttctagatcctttgcattttcgtataaaatttgaagtcaacttctatcaacttcaggccaggcccgtggctcatgcctgtataatcccagcactttgggaggccgaggcaggcggatcacttgaggtcaggagttcaaaaccagcctggccaagatggtgaaaccccatctctactaaaaatacaaaaaaattagccaggcgtggtggcaggcgcctgtagaatcccagctactcgggaggctgaggcaggagaattgcttgaacctgggaggtggaggtttcagtgagctgagatcgtggcattgcactctagcctgggcaaccaagagtgaaactgtctcaaaaaacaacttttatcaatgtctgcaaaaagaaagtcttctgggatttatagatcaatttagggagaaatgacattttaacaattctgagttttccaattgttgaacatggtgtactgccccatttatttagatctgttaatttctctcagtttgcagctctcacattttgttaaattcatgtatttaatatttctgcatgctattgcaagtggtaaggttttcaaaaagctgttttctagttattgctagtatatagaaatgcattagacttgtacattgatcttgtatcaagcaacttagatcagttaacttattctagtagcttttttctagattctttagcattttctatgtagataatcatgtcatctgtgaataaagtattttacttttccaattt

SEQ ID NO: 203260 - DNA, 4241 bp, Homo sapiens
  Payload ID: 20082
  Gene Name: zinc finger protein 624
  Uniprot ID: Q9P2J8
  ENST ID: ENST00000311331
  CDS Start-End: 93-2690
gaggccggcaccgccgagccgccgccattgctggaagcgttcccgccctgctctgcgagttccctcagttgtcctcagttcggccgccaggtatgtctttgcaagactccactctttccagagaggggaaaccagagggagagattatggctgctgtgtttttctcagttggacgcctgagccctgaagttacccagccagatgaagatcttcaccttcaggcagaagaaacacaattggtaaaggaatcggtgacatttaaggatgtggctatagacttcacattggaggagtggaggttgatggaccctacacagaggaacctgcacaaggatgtgatgctagagaattacaggaatctggtctccctggggcttgcagtttccaaaccagacatgatatctcatttggagaatgggaaaggaccatgggtgacggtgagagaaatttcaagaattccctatcctgacatggagcccaaacctgcaaccaagaaggctacacgaacaaaggctatttctgaagatttatcacaggaggccatactagagaaacttacagagaatggtctgtgggattccagaatggaagggttatggaaatggaatgataggatattgagattacaaaataatcaggagaatcatttgagtcaaagaataattccactcaagaagactcccactagtcaaagaggctttagatttgaatctattcttattccagaaccaggcattgccacagaagagcttcacagcagatgccaaacacaagaggaaaatttcacagagaatttaaatttgattacagatacccatttggggaagataatttgcaaggagatgaaaggcagcaaagccataaggcagacttcagaactaactttggggaaaaaatccaataataaggaaaaaccctacaaatgtagtacatgcgaaaaggcctttcattatagatcattgctcattcaacatcaaagaactcatactaaagaaaaaccttatgaatgtaatgaatgtgggaaaacattcagccagccttcatatctcagtcagcacaaaaaaatccacactggagaaaaaccctataaatgtaatgaatgtggaaaggccttcattgcttcttcatcacttatggtacatcagagaattcacactaaagagaaaccttatcagtgtaatgtgtgtgggaaatcttttagccagtgtgcccgtcttaatcagcaccagagaattcaaactggagagaaaccctataaatgtagtgaatgcgggaaagcttttagtgataaatcaaaacttgcaagacatcaggaaactcacaatggtgagaaaccctacaaatgtgatgattgtgggaaagcctttaggaacaagtcatatcttagtgtacatcagaagacccacactgaagagaaaccatatcagtgcaacgagtgtgggaagtcttttaagaataccacaatttttaatgtgcatcagaggattcatactggagagaaaccttttagatgtaacgaatgtggaaaagcctatagaagtaattcaagccttatcgtacatataagaactcacactggggaaaaaccctatgaatgtaatgaatgtgggaaagcattcaaccgcatcgcaaatttcacagaacatcagcgaattcacacaggagaaaaaccctataaatgtaatgaatgtgggaaagcattcattaattattcatgccttactgtacaccacagaatgcatacaggagagaaaccttataaatgtactgaatgtggaaaggccttcatgcgttcttcttctctaattatacatcagcgtattcatactgaagagaaaccttatctgtgcaatgaatgtggggagtctttcagaataaaatcacacttaactgtacatcagagaattcacactggagagaaaccatataaatgtactgactgcgagagggcattcaccaaaatggtaaatctcaaggagcatcagaaaattcatactggagtgaaaccctataaatgttatgactgtggaaagtcctttaggactaaatcataccttattgtacatcagaggacccatactggagaaaaaccatataaatgtaatgaatgtgagaaagccttcactaatacatcacagcttaccgtgcaccaacgaaggcatactggagagaagccctataaatgcaatgaatgtggaaaggttttcacaagtaactcaggctttaatacacatcaaagaacacatactggagagaaaccatttaaatgtaatgactgtgggaaagcatttagccagatggtacatgtcacagaacatcagaaaatccatagtggagagaagccctataagtgtgatgtctgtggaaaagccttcaggaggggttcttaccttacagtgcattggagaacacacactggagaaaaaccctacacctgtaaggaatgtggaaagggttgtattactctatcacagctaaccctacatcagagaattcatactggggagaggccctataaatgtgaagaatgtggaaaagccttcagaactaactcagactttactgtacacttgaggatgcatactggagaaaaaccctataaatgtaatgaatgtggaaaagccttcaggagtagttcgagccttactgtacatcaaagaatacatcaaagagaaactcagttaatataaagaacaataagtcattcacctagatgtcaactccacaagatgaatcttataaactatattttatgaatataggaaaatcttcattaggaatttatcagaaagtatacagagaaactataagcaattatgtgggaaatcatttaataatattaaatcttagaagttataaggaaactctcactagaggaaaataatgaacaaatgaaagtgttcatccagatttcatactttactcatttaacaaattatctttagttaattgcctatatatgtatttgcctatttttctattcatttatctgtcttttcttataaacctggaggtgctttttatatatttttgatattaatcctttgtcattatgtagcagatgtttttcttaatctagcatttgtctttatactttatagtaatgcacaacatttttataggaaaatatttgtatcatttcctttttagattttttattttactcattttacttaaaagagatctccttaatccctaggttatacgtagtatcctaaatgtgtttttaagatttttatgattttattttttacacttaagtctttaatccctctggactggatggttcttcataggagagcaactgtaggtgatcattatcctgtgaaaatattttgaacctaaaaagcactcagggaaatgcaaattgaaatgctcagtgagatgaaacttccccttcatggatctggcaaaaattaagagatcttttgctagctattggggtttgggaaaccatgtactattacttaaaggttgtgtaacatacttccaccagcagtccaacaatatatgtttaaaaatttaaaacatatatactcttagacccagcagtctcacttttggaatctgtccgttagaaataaaagcagcatcaatgcataagaatgtaaataaacatgtttgttgaagtactgtttgtagaggggggcaaagccccaactgcaaacaaagtgaatgcccattaatagggaactggttagataaattgtgacatacccatattatggaacagtgtgagagtaattttaaaaacgacttatatctatgctagctgatttcaatgtatttccacaatgtattgataaataattgctttataacaaatgtatatatacaatatatcatttttgttaaaataatcacacccatttattttgtgtttatgtgtgtgtgtgtggttagatgcacatggagacaggtatggaagaatatacaccaggctgttaatattgattaccttgaggggagtgagaaaaggagaagtagagataagggaaggggagactgtaaaaacagaaaaatgtaaatgctgcctttatggtataaaactgtaaatgtaatattatgtaattatgtgaacttttgagagagatgaaaggatggtctccaaaaaattaatgatggttatttctgttttagtggttcatcaattttttgttttttactttcttttctgtgtttttaagttaattttttccttgcaatgaacctgtaatatttacattaaaaggaaaaatatt

SEQ ID NO: 203261 - DNA, 605 bp, Homo sapiens
  Payload ID: 20082
  Gene Name: zinc finger protein 624
  ENST ID: ENST00000423860
  CDS Start-End: 274-605
gagccgccgccattgctggaagcgttcccgccctgctctgcgagttccctcagttgtcctcagttcggccgccaggtactcgttgtcccgggcgcctggcctcggttgcccgccgcccctcccttggcgcttggctcccggcggcgtccggggcgtggccgttccctctagagcccctgtccctgagcggacccgcccactcctgagaggcgattggggctgggcctccttcccgagtgtgggttcagtctccagctggcctccctcacaggtatgtctttgcaagactccactctttccagagaggggaaaccagagggagagattatggctgctgtgtttttctcagttggacgcctgagccctgaagttacccagccagatgaagatcttcaccttcaggcagaagaaacacaattggtaaaggaatcggtgacatttaaggatgtggctatagacttcacattggaggagtggaggttgatggaccctacacagaggaacctgcacaaggatgtgatgctagagaattacaggaatctggtctccctggggcttgcagtttccaaaccagacatgatatctcatttggagaatgggaaagg

SEQ ID NO: 203262 - DNA, 548 bp, Homo sapiens
  Payload ID: 20082
  Gene Name: zinc finger protein 624
  ENST ID: ENST00000583766
  CDS Start-End: 173-548
ctggaggccggcaccgccgagccgccgccattgctggaagcgttcccgccctgctctgcgagttccctcaagcccctgtccctgagcggacccgcccactcctgagaggcgattggggctgggcctccttcccgagtgtgggttcagtctccagctggcctccctcacaggtatgtctttgcaagactccactctttccagagaggggaaaccagagggagagattatggctgctgtgtttttctcagttggacgcctgagccctgaagttacccagccagatgaagatcttcaccttcaggcagaagaaacacaattggtaaaggaatcggtgacatttaaggatgtggctatagacttcacattggaggagtggaggttgatggaccctacacagaggaacctgcacaaggatgtgatgctagagaattacaggaatctggtctccctggggcttgcagtttccaaaccagacatgatatctcatttggagaatgggaaaggaccatgggtgacggtgagagaaatttcaagaattccctatcctg

SEQ ID NO: 203263 - DNA, 1322 bp, Homo sapiens
  Payload ID: 20083
  Gene Name: zinc finger protein 625
  Uniprot ID: Q96I27
  ENST ID: ENST00000439556
  CDS Start-End: 172-1290
tttcctgactcccaggcgtcttgcaccaaagggaggtcgggatctcggttttccggccccgagagggaccaggtgcctccgccatagcttctgtcgctccatcgcccgcactgtgactggactgttagagggatccgtggagaggaggccaggacacctggaagccgggaaatggattcagtggtctttgaggatgtagatgtgaacttcacccaggaggagtgggctttgctggatccttcccagaagaatctctacagagatgtgatgcaggaaaccttcaggaacctggcttctgtaggaaaaaaatggaaagatcagaaaattgaagatgagtacaaaaatcccaggagaaacctaagaggtcttatgggagagagactcttagaaagtaagaaagatcatcagcatggagaaattttgacccaggttccagatgacatgctgaagaagaaaactccccgagtaaaatcatgtggagaagtcagcgtgggtcatgcatcccttaataggcaccacagagctgacactggacacaagccatatgagtatcaggaatatggacagaagccatataaatgtacatactgtaagaaagccttcagtgatctcccctactttcgaacacatgaatgggctcacactggggggaaaccttatgattgtgaggaatgtggaaaaagctttatttcccgttcaagcattcgaagacacaggataatgcacagtggagatggaccctacaaatgtaacttttgtgggaaagccttgatgtgtctcagtttgtatcttatccacaaacgaactcacactggagagaaaccatatgaatgtaaacagtgtggtaaagcctttagtcattctggtagccttcgaatacatgaaagaactcacactggagagaagccttatgaatgcagtgagtgtgggaaagcattccatagttccacatgcctccatgcacataaaataactcacactggggagaagccgtatgaatgtaaacagtgtgggaaagcctttgtttctttcaattccgttcgatatcatgaaagaactcacactggagagaagccctatgaatgtaagcaatgtgggaaagccttcagatctgcctcgcaccttcgaacacatggaaggactcacactggagagaaaccctatgaatgtaaacaatgtggtaaagcctttggatgtgcctcgagcgttaaaatccatgaaaggactcacactggagaaaaaccctgtagctccaacacttcgaaaggccaaggcgagaagattgcttaattcacataagattcctagaagccaccgaatcc

SEQ ID NO: 203264 - DNA, 1678 bp, Homo sapiens
  Payload ID: 20083
  Gene Name: zinc finger protein 625
  ENST ID: ENST00000455799
  CDS Start-End: 157-342
gcgtcttgcaccaaagggaggtcgggatctcggttttccggccccgagagggaccaggtgcctccgccatagcttctgtcgctccatcgcccgcactgtgactggactgttagagggatccgtggagaggaggccaggacacctggaagccgggaaatggattcagtggtctttgaggatgtagatgtgaacttcacccaggaggagtgggctttgctggatccttcccagaagaatctctacagagatgtgatgcaggaaaccttcaggaacctggcttctgaaaaaaatggaaagatcagaaaattgaagatgagtacaaaaatcccaggagaaacctaagaggtcttatgggagagagactcttagaaagtaagaaagatcatcagcatggagaaattttgacccaggttccagatgacatgctgaagaagaaaactccccgagtaaaatcatgtggagaagtcagcgtgggtcatgcatcccttaataggcaccacagagctgacactggacacaagccatatgagtatcaggaatatggacagaagccatataaatgtacatactgtaagaaagccttcagtgatctcccctactttcgaacacatgaatgggctcacactggggggaaaccttatgattgtgaggaatgtggaaaaagctttatttcccgttcaagcattcgaagacacaggataatgcacagtggagatggaccctacaaatgtaacttttgtgggaaagccttgatgtgtctcagtttgtatcttatccacaaacgaactcacactggagagaaaccatatgaatgtaaacagtgtggtaaagcctttagtcattctggtagccttcgaatacatgaaagaactcacactggagagaagccttatgaatgcagtgagtgtgggaaagcattccatagttccacatgcctccatgcacataaaataactcacactggggagaagccgtatgaatgtaaacagtgtgggaaagcctttgtttctttcaattccgttcgatatcatgaaagaactcacactggagagaagccctatgaatgtaagcaatgtgggaaagccttcagatctgcctcgcaccttcgaacacatggaaggactcacactggagagaaaccctatgaatgtaaacaatgtggtaaagcctttggatgtgcctcgagcgttaaaatccatgaaaggactcacactggagaaaaaccctgtagctccaacacttcgaaaggccaaggcgagaagattgcttaattcacataagattcctagaagccaccgaatccaatcatggtaaaaatgtgtttccctcaaatcatgggaaccatcgcaaaattattctgaagcttctgcagtcactgtcatttgacagcattcagaaataaatgccagtagcccaggagcaaaaatttttgggagtagtttagctggggcctcactcagatacctaggacacagagttggaaataactcttaagagagacacacctccagtaagaccttaagacagttctgtcataaaaaaaatacgaggtttggccgggtgcagtggctcatgcctataatcccagcactttgggaggccgaggcaggcggaccacgaggtcagtagttcgagaccagcctggtcaatatggtgaaaccccatctctactaaaaaa

SEQ ID NO: 203265 - DNA, 695 bp, Homo sapiens
  Payload ID: 20083
  Gene Name: zinc finger protein 625
  ENST ID: ENST00000414892
  CDS Start-End: 1-315
gattcagtggtctttgaggatgtagatgtgaacttcacccaggaggagtgggctttgctggatccttcccagaagaatctctacagagatgtgatgcaggaaaccttcaggaacctggcttctgtaggaaaaaaatggaaagatcagaaaattgaagatgagtacaaaaatcccaggagaaacctaagtcttagaaagtggagttggtcgctgtacgcaagacagacattggggctggactcaccatcagtggccccgaaaagaactcatgggcagatgaacccatccacaaactcccctgccacatccagatgatgcttagtgaaaagaaacaccttgttccaaaagcagaaaaggaggatgcacggaagaaaaagataccccagaagaaacataaacttaagagacaaacaaattcagccaaaagaaaatgcaaataaaagttcaaaacaaaacaaaacaaaaaaacctctaaaattcataaaacacaaaatgacaaactctattaaatatgcccctatgatatctcttagataaaagttggccgtaatagagaaaatgaagataggtgttggtgactggcagattctgggtctacgatgaatcagagaaggatggttttcactttgttttacatttttttaatgcttgatgttgacttggtagaaagatgataataaagagattcttctgtc

SEQ ID NO: 203266 - DNA, 1123 bp, Homo sapiens
  Payload ID: 20084
  Gene Name: zinc finger protein 626
  Uniprot ID: Q68DY1
  ENST ID: ENST00000291750
  CDS Start-End: 151-429
ggtttccgggtttggtgcggcctttgtctctcgctgcagtcagagctccaggtctggttcttctcctaaaggcccaggctgtgtggccccgtgtcctgcaggtattgggagatccacagctaagacaccgggacctcctggaagccaaaaatgggaccattgcaatttagagatgtggccatagaattctctctggaggagtggcattgcctggacactgcacagcggaatttatataggaatgtgatgttagagaactacagtaacctggtcttccttggtattactgtttctaagccagacctgatcacctgtctggagcaaggaagaaaacctttgaccatgaagagaaatgagatgatagccaaaccctcagtgagcttccttcaagttcacagtgagagccaaagtcctcttcatgacatataagagactgcacagtgtggctgcttttccataatttttgggacgcacaaatgtctgcatgattttgagaaactaaaattactctcaaagttctctttgcatcagatctgaaatgtctgagagtaatagtttctgttgaatttttttttgttcatttttctgcacagtccattctgtttttattactatctaggcttgaaatatatagtttgaaattatgacatccttcctctttgttattttcctcatgattgctttggctattcaaagtttattttagtttcatgtaaatttttgaattgtattttccattattgtgaaaatagtaccactgcaattttaataggaagtttattgaatctatagattactttggataatatggcacttcaataatattcatgttttcaattcatagacaaaatattttaaaatttatttgtatcttttctaacttttcctttttttattgtaaagatttacctccttggttaatattttcctcagaaatttattatttaaggtatagtcaataaaattttcttcctctattttgtcagatagtttaagtgtatgaaaccatagatatacttgtatgttaattttatattttgctaatttactgagtgtatttattagtttagagaggttttaatgtactgtttatggttttttaaatataagattacttattttt

SEQ ID NO: 203267 - DNA, 501 bp, Homo sapiens
  Payload ID: 20084
  Gene Name: zinc finger protein 626
  ENST ID: ENST00000595405
  CDS Start-End: 97-501
cttctcctaaaggcccaggctgtgtggccccgtgtcctgcaggtattgggagatccacagctaagacaccgggacctcctggaagccaaaaatgtaatgtgttctcattttgcccaagacctttggccagagcagagcatgaaagattctttccaaaaagtggtactgagaagatatgaaaaatgtgaacatgacaatttacagttaaaaaaaggatgtataagtgtggatgagtgtaaggtgcacaaagaaggttataatgaacttaaccaatgtttgacaactaccccaagaaaaatatgtcaatgtgataaatatgtgaaagtccttcatcaatttccaaattcaaacggacaaaagagaggacatactgggaaaaaacctttcaaatatatagaatgtggcaaagcttttaagcagttctcaactcttactacacataagaaaattcatactggagggaaaccctacaaatgtgaagaatgtggcaaagcctttaac

SEQ ID NO: 203268 - DNA, 5963 bp, Homo sapiens
  Payload ID: 20084
  Gene Name: zinc finger protein 626
  Uniprot ID: Q68DY1
  ENST ID: ENST00000601440
  CDS Start-End: 148-1734
ttccgggtttggtgcggcctttgtctctcgctgcagtcagagctccaggtctggttcttctcctaaaggcccaggctgtgtggccccgtgtcctgcaggtattgggagatccacagctaagacaccgggacctcctggaagccaaaaatgggaccattgcaatttagagatgtggccatagaattctctctggaggagtggcattgcctggacactgcacagcggaatttatataggaatgtgatgttagagaactacagtaacctggtcttccttggtattactgtttctaagccagacctgatcacctgtctggagcaaggaagaaaacctttgaccatgaagagaaatgagatgatagccaaaccctcagtaatgtgttctcattttgcccaagacctttggccagagcagagcatgaaagattctttccaaaaagtggtactgagaagatatgaaaaatgtgaacatgacaatttacagttaaaaaaaggatgtataagtgtggatgagtgtaaggtgcacaaagaaggttataatgaacttaaccaatgtttgacaactaccccaagaaaaatatgtcaatgtgataaatatgtgaaagtccttcatcaatttccaaattcaaacggacaaaagagaggacatactgggaaaaaacctttcaaatatatagaatgtggcaaagcttttaagcagttctcaactcttactacacataagaaaattcatactggagggaaaccctacaaatgtgaagaatgtggcaaagcctttaaccactcttgtagccttactagacataagaaaattcatactggagagaaaccctacaaatgtgaagaatgtggcaaagcctttaagcactcctccactcttactacacataagagaaatcatactggagagaaaccctacaagtgtgataaatgtggcaaagcctttatgtcatcctcaacccttagtaaacatgagataattcatacggaaaagaaaccctacaaatgtgaagaatgtggcaaagccttcaaccggtcctcaacccttactacacataagataattcatactggagaaaaaccctacaaatgtgaagaatgtgacaaagcctttaagtactcctatacccttactacacataaaagaattcatactgaagacaaaccctacaaatgtgaagaatgtggcaaagcctttaagtactcctctacccttactacacataagagaattcatactggagagaaaccctacaaatgtgaagaatgtggcaaagccttcaagcggtcttcagaccttactacgcataagataattcatactggagagaaaccctacaaatgtgaagaatgtggcaaagcttttaagtactcctctaaccttactacacataagaaaattcatactggagagagaccctacaaatgtgaagaatgtggcaaagccttcaaccagtcctcaatccttactacacataggagaattcatactggagagaaattctacaaatgtgaagaatgtggcaaagcttttaagtgctcctctaaccttactacacataagaaaattcatactggagagagaccctacaaatgtgaagaatgtggcaaagccttcaaccagtcctcaatccttactacacatgagagaatcatactggagagaaattctacaaatgtgaagaatgtggcaaagccttcaagcggtcctcacaccttactacacataagataattcatactggagagaaattctacaaatgtgaagaatgtgacaaagcttttaagcatttctctaaccttactacacataagaaaattcatactggaaaaaaaccctacagatgtgaagaatgtggcaaagcctttaagcactcctctaaacttactacacataagagatttcatactggagagaaaccctacagatgtgaataatgtggtaaagcttttcacctatcctcacaccttactgcacataagataattcatactggagagaaaccatgtgaatgtgatgaatggggaaaatcttttaaccagccctcaatttctaactaagaattgatatgaaatataaactctacaaatataaagaatgtgacagattttttaaggaacttctcaacctttattacacataattcatactggaaagaaaccctacaagtgtgaagaatgtggcaaagcatataacaagttctgtctttttttttttttttttgagatggagtttcaactcttgtcacccagtctggtgtgcaatagcacagtctcggctcactgcaacctccgccttctgggttcaatccattctcctgcctcaacctcccaagtaagggggattacaggtgcccacccccatgcccagctaacttttgtatttttagtagagacaaggttacaccatgtttgtcaggctggtatccaacccctgacctcacatgatccacccacctcagcctcctaaagtgttgcaattacaggcatgagccaccatgcctggccacaagttcttactattaagagacatggtgataattcattctgaagaggaactctacaaacctgaaagatgtgacagtgcttttttcaacacttccatcctttctatacataaaaaatttatactagtgtgaaaccctagaaatatataaaatgtgaaacagcctttatatggttgccacatttgatagtaagataattcatactggcaaaattcctacaagcatgaagaatgtggcaaaacctttaatcaatgtgtacatcttattttgcaggaaagctattatccttgagaaaaattgtacaaatataaagaatatggaaaacccattaatgcctactcacatcttactcaacataagaaggttcatagttaatgaaagcattaaaagtgcaattactgtcaaaaaatctttcagaaaatataagcctttaaagtgaagaagagtatttattctgaagacaaccattacaaatatacaggaggtttattacacacattttgtactagaggaaaatcctgaagcagttgctcaagctttgctcaacatcagagaacttatattggagaagggtcctgcaaatgtaatgaatttggaaacactttaaaaaaaaaaaactacagcttagaaaacagcagagtttatactaaaatatatttttgcagatgcagtaaacatgaaaaaatatttaattcaaaattaattgtatgtaaatatcagaatttacagaataactaaggcactgacacttcagacattacattaaataagagtgttgagtatataaatgaattcacaactaaagttgttaaatttgtatataagtttgtataaattagtatataactttaaaaggagattttttgaagctttgtatttacattgaaagtatatttgtttccttgaaaacaatttttttgaaaagtgaatgatgtaatacagctttcaaattatgctgttactttattatattcacgtgaaagtatgtgatcaattgttgctgcatcagagatattagagattctttatgagttgggcattctttatgaccttttctataaaacagtaaggacattaaaatgtaagatgcatgacgaaaatataagtggagaggctcattgtagttaacctatattaagtaatgtttaaggtaggtgttcagagtaatacttttctacattatactgagagaaagaaattataaattaaagtatatcaattattttactaattttactgttacgtaataaaatgcaatatatttaaaaattgttagatgatgtgtgaacttaacttatattttatttacttacttaacttttcttttgagatggagtcttgctctgtcacccaggctggagggcagcagtgcagtctcagcacaatgactgcaacctccacctcccaagttcaagaaattctcctgcctcagcctcccgagtagtggggactacaggtgcgtgacaccacgcctggctaatttttatatttttaatagacatggggtttccccatattggtcaggctagtctcaaactcctgagctcaagcgatccacccacctcaggctctcaaagtgttgggattataggtgtgagccaatatgtccagcctaattttattttattttttaccatcttaaaactattgtgcatttaatgaagcattattatgccactaactttaacctatccggccttactcaaatggtgtaagcaaaagatggaagaagtatactatttggtatgtagtggaatgtcatcactagtaatcactttgccagtaaactgcaaatgaagaatattgttcccgttagttaaatttttaatcttttttcttaatttattattactatctgtgagtatatagtatgtgtatatatgtcttatagagaatattttgattcaggcatacaatatgtagtaattacattagggtaaataaggtatctgtcacctctagcatttatcctttctaatccaaacagtgtaattatacacttttagttacttttaaatgtccaattaaattgtaattgactacagggtgatttttatggtcataataaaaattatacagaaatataaatagaatatgggctggacgcagtggctcatgcctgtaatcccagcactttggtaggcgacgtcgggcagatcatgaggtcaggagttcaagaccagcctgaccaacattgtgaaactctctactaaaacaacaaaaattagttgggcatggtggtgcacccgtattcctagctactcgggaagctgaggcaggagaatggcttgaacctgggaggtggaggtttcagtgagctgagatagcaccactgcactccagcctgggtgacagacggacactccatctcaaaaagaaagaaaaaagccaggacagtggcttacacctgtaatcccagcactttgggaggcccaggcaggtggatcatgaggtcaggagatcaagaccatcctggctaacacgttgaaaccctgtctctactaaaaataaattagctgggcgtggtggtgggcgcctgtagtcccagctactccagaggctgaggcgggagaatggtgtaacccaggaggcagaggttgcagtgagccgagatcgtgccactgcactccagcctgggcaacagagcaagactccgtcacaaaaaaaaaaagaaaaaatacggccatgtgcagtgcctcatgcctattatcccagcaatttcggaggctgaggcaggtgtgttgcttgagctcaggagttcaagaccagcctcgccaatgtggtgaaaccctgtctctactaaaaatagaaaaattagccagtcatggtggcgcacacctggaggctgaggtaggagaatcacttgaacttgggaggtggagattgcagtgagccaagattgtgctgctgcactccagcctgggtgacagagtgatgagactcctcaaaggaaaaaaaattacatttctgagtcctgaaaaattattaataaatatttgttatatagtttctttgaacatgtggtcactctgcctgcaaacgtaaagacttttaattttcatagagtgaaatatacacatattcctctgaagataaaccttaggtgtaagaaaattatgaaatgagtgtttggtaaatatgcatttgtacatattttcagaagaaaacgcaattattggaacaaaataagtttttaggtgattaatggaaaactaaacaccttgaatatgctgaaagcaaatgtatactttctgctttgtatggaatttattaatataaaattttatggcttatggctcggattctccccagaatccgtgtattaaagcacaggcaactttgtctccagaaataacactcttgagtacaacaataaaagccctcttcaaacacactcaaaaaattatttttaacgcttattttaataaaaatttaaccaaaattgaataattggata

SEQ ID NO: 203269 - DNA, 4404 bp, Homo sapiens
  Payload ID: 20084
  Gene Name: zinc finger protein 626
  ENST ID: ENST00000612591
  CDS Start-End: 62-1684
cgtgtcctgcaggtattgggagatccacagctaagacaccgggacctcctggaagccaaaaatgggaccattgcaatttagagatgtggccatagaattctctctggaggagtggcattgcctggacactgcacagcggaatttatataggaatgtgatgttagagaactacagtaacctggtcttccttggtattactgtttctaagccagacctgatcacctgtctggagcaaggaagaaaacctttgaccatgaagagaaatgagatgatagccaaaccctcagtaatgtgttctcattttgcccaagacctttggccagagcagagcatgaaagattctttccaaaaagtggtactgagaagatatgaaaaatgtgaacatgacaatttacagttaaaaaaaggatgtataagtgtggatgagtgtaaggtgcacaaagaaggttataatgaacttaaccaatgtttgacaactaccccaagaaaaatatgtcaatgtgataaatatgtgaaagtccttcatcaatttccaaattcaaacggacaaaagagaggacatactgggaaaaaacctttcaaatatatagaatgtggcaaagcttttaagcagttctcaactcttactacacataagaaaattcatactggagggaaaccctacaaatgtgaagaatgtggcaaagcctttaaccactcttgtagccttactagacataagaaaattcatactggagagaaaccctacaaatgtgaagaatgtggcaaagcctttaagcactcctccactcttactacacataagagaaatcatactggagagaaaccctacaagtgtgataaatgtggcaaagcctttatgtcatcctcaacccttagtaaacatgagataattcatacggaaaagaaaccctacaaatgtgaagaatgtggcaaagccttcaaccggtcctcaacccttactacacataagataattcatactggagaaaaaccctacaaatgtgaagaatgtgacaaagcctttaagtactcctatacccttactacacataaaagaattcatactgaagacaaaccctacaaatgtgaagaatgtggcaaagcctttaagtactcctctacccttactacacataagagaattcatactggagagaaaccctacaaatgtgaagaatgtggcaaagccttcaagcggtcttcagaccttactacgcataagataattcatactggagagaaaccctacaaatgtgaagaatgtggcaaagcttttaagtactcctctaaccttactacacataagaaaattcatactggagagagaccctacaaatgtgaagaatgtggcaaagccttcaaccagtcctcaatccttactacacataggagaattcatactggagagaaattctacaaatgtgaagaatgtggcaaagccttcaagcggtcctcacaccttactacacataagataattcatactggagagaaattctacaaatgtgaagaatgtgacaaagcttttaagcatttctctaaccttactacacataagaaaattcatactggaaaaaaaccctacagatgtgaagaatgtggcaaagcctttaagcactcctctaaacttactacacataagagatttcatactggagagaaaccctacagatgtgaataatgtggtaaagcttttcacctatcctcacaccttactgcacataagataattcatactggagagaaaccatgtgaatgtgatgaatggggaaaatcttttaaccagccctcaatttctaactaagaattgatatgaaatataaactctacaaatataaagaatgtgacagattttttaaggaacttctcaacctttattacacataattcatactggaaagaaaccctacaagtgtgaagaatgtggcaaagcatataacaagttctgtctttttttttttttttttgagatggagtttcaactcttgtcacccagtctggtgtgcaatagcacagtctcggctcactgcaacctccgccttctgggttcaatccattctcctgcctcaacctcccaagtaagggggattacaggtgcccacccccatgcccagctaacttttgtatttttagtagagacaaggttacaccatgtttgtcaggctggtatccaacccctgacctcacatgatccacccacctcagcctcctaaagtgttgcaattacaggcatgagccaccatgcctggccacaagttcttactattaagagacatggtgataattcattctgaagaggaactctacaaacctgaaagatgtgacagtgcttttttcaacacttccatcctttctatacataaaaaatttatactagtgtgaaaccctagaaatatataaaatgtgaaacagcctttatatggttgccacatttgatagtaagataattcatactggcaaaattcctacaagcatgaagaatgtggcaaaacctttaatcaatgtgtacatcttattttgcaggaaagctattatccttgagaaaaattgtacaaatataaagaatatggaaaacccattaatgcctactcacatcttactcaacataagaaggttcatagttaatgaaagcattaaaagtgcaattactgtcaaaaaatctttcagaaaatataagcctttaaagtgaagaagagtatttattctgaagacaaccattacaaatatacaggaggtttattacacacattttgtactagaggaaaatcctgaagcagttgctcaagctttgctcaacatcagagaacttatattggagaagggtcctgcaaatgtaatgaatttggaaacactttaaaaaaaaaaaactacagcttagaaaacagcagagtttatactaaaatatatttttgcagatgcagtaaacatgaaaaaatatttaattcaaaattaattgtatgtaaatatcagaatttacagaataactaaggcactgacacttcagacattacattaaataagagtgttgagtatataaatgaattcacaactaaagttgttaaatttgtatataagtttgtataaattagtatataactttaaaaggagattttttgaagctttgtatttacattgaaagtatatttgtttccttgaaaacaatttttttgaaaagtgaatgatgtaatacagctttcaaattatgctgttactttattatattcacgtgaaagtatgtgatcaattgttgctgcatcagagatattagagattctttatgagttgggcattctttatgaccttttctataaaacagtaaggacattaaaatgtaagatgcatgacgaaaatataagtggagaggctcattgtagttaacctatattaagtaatgtttaaggtaggtgttcagagtaatacttttctacattatactgagagaaagaaattataaattaaagtatatcaattattttactaattttactgttacgtaataaaatgcaatatatttaaaaattgttagatgatgtgtgaacttaacttatattttatttacttacttaacttttcttttgagatggagtcttgctctgtcacccaggctggagggcagcagtgcagtctcagcacaatgactgcaacctccacctcccaagttcaagaaattctcctgcctcagcctcccgagtagtggggactacaggtgcgtgacaccacgcctggctaatttttatatttttaatagacatggggtttccccatattggtcaggctagtctcaaactcctgagctcaagcgatccacccacctcaggctctcaaagtgttgggattataggtgtgagccaatatgtccagcctaattttattttattttttaccatcttaaaactattgtgcatttaatgaagcattattatgccactaactttaacctatccggccttactcaaatggtgtaagcaaaagatggaagaagtatactatttggtatgtagtggaatgtcatcactagtaatcactttgccagtaaactgcaaatgaagaatattgttcccgttagttaaatttttaatcttttttcttaatttattattactatctgtgagtatatagtatgtgtatatatgtcttatagagaatattttgattcaggcatacaatatgtagtaattacattagggtaaataaggtatctgtcacctctagcatttatcctttctaatccaaacagtgtaattatacacttttagttacttttaaatgtccaattaaattgtaattgactacagggtgatttttatggtcataataaaaattatacagaaatataaatagaatatgggctggacgcagtggctcatgcctgtaatcccagcactttggtaggcgacgtcg

SEQ ID NO: 203270 - DNA, 2840 bp, Homo sapiens
  Payload ID: 20085
  Gene Name: zinc finger protein 627
  Uniprot ID: Q7L945
  ENST ID: ENST00000361113
  CDS Start-End: 209-1594
aactgtccattcagatgggcccgggagaggagggcagggcctgcgcctccctacggagcctttgtttctggcgaccgtccccacccgggctcgcgtctccgtttctccgagaggcccaaggtgtctccgccgcagcctctgtcgcgccgtgacctgtacaggtcgcgggagtcgtagggaggacgccgggacacctggaagccgagaaatggattcagtggcctttgaggatgtggctgtgaacttcaccctggaggagtgggctttgctggatccttcccagaagaatctctacagggatgtgatgcgggaaaccttcaggaacctggcttctgtaggaaaacaatgggaagaccagaacattgaagacccattcaaaattcccaggagaaatataagtcatattccagagagactctgtgaaagtaaagaaggtggtcaaggtgaagaaaccttcagccagattccagatggtattctgaacaagaaaactcctggagtaaaaccgtgtgaaagcagtgtgtgtggagaagttggcatgggtccttcatcacttaataggcacatcagagatcacactggacgtgaaccaaatgaatatcaggaatatggaaagaagtcatatacacgtaaccagtgtggacgagccttgagttatcatcgctcttttccagtacgtgaaaggactcatcctggaggaaagccctatgattgtaaggaatgtggagaaacctttatttctcttgtaagcattcgaagacacatgttaacgcataggggaggtgtaccttacaaatgtaaggtgtgtgggaaagcctttgattatcccagtttatttcgtatacatgaaagaagtcacactggagagaaaccttatgaatgcaagcaatgtgggaaagccttcagttgttccagttacattagaatacatgaaaggactcacactggagataaaccctatgaatgcaagcagtgtgggaaagctttcagttgttccaagtacattcgaatccatgaacgaactcacacaggagagaaaccctacgaatgtaaacagtgcggtaaagcctttaggtgcgccagttctgttcgaagtcacgagaggactcacaccggagagaaactttttgaatgtaaggaatgcgggaaggctttgacttgtcttgcaagtgttagaagacacatgataaagcacactggcaatggaccttataaatgtaaggtgtgtgggaaagcctttgatttccccagttcatttcgaatccatgaaaggacccacactggagagaaaccctatgattgtaagcaatgtgggaaagccttcagttgttccagttcgtttcgaaaacatgaaagaattcacactggagagaaaccctataaatgtacaaaatgtgggaaagccttcagtcgttccagttacttccgaatccatgaaagaactcacactggagagaaaccctatgaatgtaagcaatgtgggaaagccttcagtcgatccacttactttcgagtacatgaaaaaattcatactggagagaaaccctatgagaaccctaaccctaacgcttcagttgtcccagttctttcatgagcatgaaaggagtcacatagagaaaccccatgaaagtaagaaatttgggaaagccttcagtcctttctgtttctttcaactacgtgaaaggattcacagtggagaaagaccctgtaagataattggctttaaattacgagagacttgtgataggacagtaaaacctagagttggagttggatctctggattgtgttatgtcagtgttggtaggttaggaactagatttcccagaatccattccatttgtgattccatgatacaattcaccagtaacctatcttacatgagattcggaagtaagttaagaaggcattagtcatggtttggaagcaccatacagggagacagctgtgtgaatacaggctgtatggacacttgcttccatcccattttcctgcttctttgggttgccaatcaagagtatcctcaaaacgacttgactttaattttctcggaggtgataggcttccacacaggtctccagaagccctgcattgaatatccatccacactttggttttccttcagacattattatgtctgtactaggcaactaattcagactgtcctggttgggaatattctgtgatgctctgactcccctagtctgtagacggaattggcatacggtctaatttgtgtagtaagcacctttgttcatactagtagtgactgtattcttgattcagcctgatagctaccatgctgctgtcaaaaccaaccagaggggagcttgttcttctgctgtagtgtgcagtgactggcctcacccaggactttgatgtgagaatgagcactttcctctatcaggaaatttcaagtgtttcctgttattcgtagctcaatgtaatgcctcagttcattttcagttgtttgattatatgtgactaatatgtattttttattcaaacaagacttctgtacatgtttcttcaaaacagtttattaactgtcttcagtcttggattacatcaagtttataattttggcaaattgttaagacactgtgaagtcagcgttaaccatgtgcatacaacttaaggaattttttcctcctcatgtaaattttacttttcatgcttatatagtttcaacttttatcttcatagtaatttctcatctactcataataccaaaagttaagtcatgctgttttgtgtgctctcttgctaaagaccgcagagaccatacctgttgtcaaagagggtgtaataaactgtaataataatcatgaccacaaacca

SEQ ID NO: 203271 - DNA, 541 bp, Homo sapiens
  Payload ID: 20085
  Gene Name: zinc finger protein 627
  ENST ID: ENST00000585493
  CDS Start-End: 491-541
agtttccaggagcggcaagtgaggaatatgaaataaccttatggctgaatcagggtgaaggggaagcttgtaagcatggaagacgctctactcaaactaaaaagttcaagttctgatccagcagatgaagagggaggcctgagaggctgctgttctaactcgctcccagagacggggccttactctgctgcctaggctggagtacagtggcacaatcatagctgattgcagcctcaaactcctgggctcaagcgaaactcccacgtcagcctcctgagtacctgggactacaggtactgaggatggaggacaaggggtcagtggagacccagctttgagcagagccctgcctaaggtccagggctcgatctggccctaaccacagagtcaccttgaggattcagtggcctttgaggatgtggctgtgaacttcaccctggaggagtgggctttgctggatccttcccagaagaatctctacagggatgtgatgcgggaaaccttcaggaacctggcttctgtaggaaaacaatgggaagac

SEQ ID NO: 203272 - DNA, 2755 bp, Homo sapiens
  Payload ID: 20085
  Gene Name: zinc finger protein 627
  ENST ID: ENST00000588174
  CDS Start-End: 146-349
gtttctggcgaccgtccccacccgggctcgcgtctccgtttctccgagaggcccaaggtgtctccgccgcagcctctgtcgcgccgtgacctgtacaggtcgcgggagtcgtagggaggacgccgggacacctggaagccgagaaatggattcagtggcctttgaggatgtggctgtgaacttcaccctggaggagtgggctttgctggatccttcccagaagaatctctacagggatgtgatgcgggaaaccttcaggaacctggcttctgtaggaaaacaatgggaagaccagaacattgaagacccattcaaaattcccaggagaaatataagagagactctgtgaaagtaaagaaggtggtcaaggtgaagaaaccttcagccagattccagatggtattctgaacaagaaaactcctggagtaaaaccgtgtgaaagcagtgtgtgtggagaagttggcatgggtccttcatcacttaataggcacatcagagatcacactggacgtgaaccaaatgaatatcaggaatatggaaagaagtcatatacacgtaaccagtgtggacgagccttgagttatcatcgctcttttccagtacgtgaaaggactcatcctggaggaaagccctatgattgtaaggaatgtggagaaacctttatttctcttgtaagcattcgaagacacatgttaacgcataggggaggtgtaccttacaaatgtaaggtgtgtgggaaagcctttgattatcccagtttatttcgtatacatgaaagaagtcacactggagagaaaccttatgaatgcaagcaatgtgggaaagccttcagttgttccagttacattagaatacatgaaaggactcacactggagataaaccctatgaatgcaagcagtgtgggaaagctttcagttgttccaagtacattcgaatccatgaacgaactcacacaggagagaaaccctacgaatgtaaacagtgcggtaaagcctttaggtgcgccagttctgttcgaagtcacgagaggactcacaccggagagaaactttttgaatgtaaggaatgcgggaaggctttgacttgtcttgcaagtgttagaagacacatgataaagcacactggcaatggaccttataaatgtaaggtgtgtgggaaagcctttgatttccccagttcatttcgaatccatgaaaggacccacactggagagaaaccctatgattgtaagcaatgtgggaaagccttcagttgttccagttcgtttcgaaaacatgaaagaattcacactggagagaaaccctataaatgtacaaaatgtgggaaagccttcagtcgttccagttacttccgaatccatgaaagaactcacactggagagaaaccctatgaatgtaagcaatgtgggaaagccttcagtcgatccacttactttcgagtacatgaaaaaattcatactggagagaaaccctatgagaaccctaaccctaacgcttcagttgtcccagttctttcatgagcatgaaaggagtcacatagagaaaccccatgaaagtaagaaatttgggaaagccttcagtcctttctgtttctttcaactacgtgaaaggattcacagtggagaaagaccctgtaagataattggctttaaattacgagagacttgtgataggacagtaaaacctagagttggagttggatctctggattgtgttatgtcagtgttggtaggttaggaactagatttcccagaatccattccatttgtgattccatgatacaattcaccagtaacctatcttacatgagattcggaagtaagttaagaaggcattagtcatggtttggaagcaccatacagggagacagctgtgtgaatacaggctgtatggacacttgcttccatcccattttcctgcttctttgggttgccaatcaagagtatcctcaaaacgacttgactttaattttctcggaggtgataggcttccacacaggtctccagaagccctgcattgaatatccatccacactttggttttccttcagacattattatgtctgtactaggcaactaattcagactgtcctggttgggaatattctgtgatgctctgactcccctagtctgtagacggaattggcatacggtctaatttgtgtagtaagcacctttgttcatactagtagtgactgtattcttgattcagcctgatagctaccatgctgctgtcaaaaccaaccagaggggagcttgttcttctgctgtagtgtgcagtgactggcctcacccaggactttgatgtgagaatgagcactttcctctatcaggaaatttcaagtgtttcctgttattcgtagctcaatgtaatgcctcagttcattttcagttgtttgattatatgtgactaatatgtattttttattcaaacaagacttctgtacatgtttcttcaaaacagtttattaactgtcttcagtcttggattacatcaagtttataattttggcaaattgttaagacactgtgaagtcagcgttaaccatgtgcatacaacttaaggaattttttcctcctcatgtaaattttacttttcatgcttatatagtttcaacttttatcttcatagtaatttctcatctactcataataccaaaagttaagtcatgctgttttgtgtgctctcttgctaaagaccgcagagaccatacctgttgtcaaagagggtgtaataaactgtaataataatcatg

SEQ ID NO: 203273 - DNA, 591 bp, Homo sapiens
  Payload ID: 20085
  Gene Name: zinc finger protein 627
  ENST ID: ENST00000587939
  CDS Start-End: 418-591
gcgcctccctacggagcctttgtttctggcgaccgtccccacccgggctcgcgtctccgtttctccgagaggcccaaggtgtctccgccgcagcctctgtcgcgccgtgacctgtacaggtcgcgggagtcgtagggaggacgccgggacacctggaagccgagaaatggacaccaagaacttgaaaagataattcaccaagtggaagaacgacttgcaaatcctgtgtctggtggggcatcttatccagaagcagcctgagtctcagtcccctccatcacactccatcagggtgggggctgaattggcagccaggactcccaggattcagtggcctttgaggatgtggctgtgaacttcaccctggaggagtgggctttgctggatccttcccagaagaatctctacagggatgtgatgcgggaaaccttcaggaacctggcttctgtaggaaaacaatgggaagaccagaacattgaagacccattcaaaattcccaggagaaatataagtcatattccagagagactctgtgaaagtaaagaaggtggtcaaggtgaagaaaccttcagccagattccagatggtatt

SEQ ID NO: 203274 - DNA, 3177 bp, Homo sapiens
  Payload ID: 20086
  Gene Name: zinc finger protein 628
  ENST ID: ENST00000391718
  CDS Start-End: 1-3177
ccaggtgtgatggtcggctcccacgcggacatggcgccggcctctactgcggagggggccggggagaagccaggccctgcggcccctgccccggcggcccagtacgaatgtggggagtgtggcaagtcattccggtggtcgtcccggctcctgcaccaccagcgcacgcacacaggcgagcggccctacaagtgcccagactgccccaaggctttcaaaggctcctcggccctgctctaccaccagcgaggccacacgggcgagcggccctaccagtgccccgactgtcccaaggccttcaagcgctcctctctgctgcagatccaccgtagcgtgcacaccggcctgcgggccttcatctgcggccagtgcggcctggccttcaagtggtcgtcccactaccagtaccacttaaggcagcacacaggcgagcgcccctacccgtgcccggactgccccaaggccttcaagaactcgtccagcctgcggcgccaccgccacgtgcacaccggcgagcggccctacacctgtggagtctgcgggaagagcttcacgcagagcaccaacctgcggcagcaccagcgcgtgcacacgggcgagcggcccttccgctgcccgctctgccccaagaccttcacccactcctccaacctgctgctgcaccagcgcacgcacggcgccgcccccgccccgggtaccgcctccgcggccccgcccccccagtcccgggagcccggcaaggtcttcgtgtgcgacgcctacctgcagcggcacctccagccccacagcccgcccgcgcctcccgccccgccgcccccgcccccgcccgtggtgcctgagctctttttggcggcggcggagaccacggtggagctggtgtaccgctgcgatggctgcgagcagggattcagcagcgaggagctgctcctggagcaccagccgtgccccgggcccgatgcggcgccccagccccaggaggcacccgccgaggcgcccaaggccgaccagccaccgtcccctctgccgcagccccctcctcccgccgccgcccccgcgcctggctttgcctgtctgccctgcggcaagtccttccggacggtggctgggctctcccgccaccagcacagccacggggctgccggcgggcaagcgttccgctgcggcagctgcgacggctccttcccgcagctggccagcctcctggcgcatcagcagtgccacgtggaagaggccgcggccgggcgcccgcccccgcaggctgaggctgcggaggtgacctgcccccaggaaccgctggcgcctgccgcccccgtcccgccgccacccccgtccgcccccgcttctgcggagcggccctacaaatgtgccgagtgcggcaagtccttcaagggctcctccgggctgcgctaccacctgcgggaccacacgggcgagcggccctaccagtgtggcgagtgcggcaaggccttcaagcgctcctccctgctggccatccaccagcgggtgcacacgggcctgcgggccttcacctgtggccagtgcggcctcaccttcaagtggtcgtcccactaccagtaccacctgcggctgcactctggcgagcggccctacgcctgcggggagtgtggcaaggccttccgcaacacgtcgtgcctgcgtcgccaccgccacgtgcacactggcgagaggccccacgcctgcggtgtctgcggcaagagcttcgcgcagacctccaacctgcggcagcaccagcgcgtgcacacgggcgagcggcccttccgctgcccgctctgccccaagaccttcacccactcctccaacctgctgctgcaccagcgcacgcactcggcggagcgccccttcacctgccccatctgcggtcgcggcttcgttatggccgcctatctgcagcggcacctgaggacgcacgccccggccaacacgcctcccagcaccacagcccctgccgccggcccccagccccctgctccactggctgctgcgcgggccccgccagccacccaagatgtccacgtcctgccccacctccaggccacgctctccctcgaggtggcggggggcacggcccaggccccgagcttggggccagcagcgcccaactctcagacgttcctcctggtgcaaactgcccagggcctccagctgatccccagcagcgtgcagccccctacacctccgccccctcccgcacctcccaagctcatcctgctgccctcctccagtgctggggctgggggcggccgtgcaaggcagggcccgcgggcagtggggaaagcgggccagggggcgggagtggtctggctgccaggccctgggggtctaggggtgcagggagcggccagcgctggggccagcgggacagggcagagcctcatcgttctgcagaatgtggggggtggggaggcagggccacaggaaatgagtggggtgcagctccagcccctccgaccagccccagaagtaaccacggtccagctccagccagcgcaggaggtgaccacagtccagctccagccagcacaggaagtaaccacggtccagctccagccagcacaggaggtgaccacggtccagctccagcccgtggccggccagctctccaattccagtgggggagctgtggctactgaggcacccaacctgctggttgttcagagcggggcagctgaggagttgctcactggcccgggccccggggaggcgggggatggcgaggccagcactggtgtggtccaggatgtcctctttgagacactccagacggacgagggcttgcagagcgtgctggtgctgagcggggccgatggcgaacagactcgactctgcgtacaggaggtagaaacacttcctcctgggctgacggagccgcctgccaccggcccacccggacagaaactcctcatcatccgcagcgccccagccactgagctgctggacagcagcaacactggaggaggcaccgccacgctgcagctcctggccccaccgccgtcaggcccagcctcgggccccgcggggctccccggggctccagcctcccagatggtgcaagtggtccccgcaggagctgggcctggtgttatgacccctcagggcctgccctccatccagattgtccagactctacccgcagtccagctggtgcacacgttttga

SEQ ID NO: 203275 - DNA, 472 bp, Homo sapiens
  Payload ID: 20086
  Gene Name: zinc finger protein 628
  ENST ID: ENST00000591164
  CDS Start-End: 168-472
ggttgggtgcctcgcgccgggggccgttgggagggagtgcgcccctgccccccctccccggtccccacagctgcaccgccgctgccggggccccaccttcccgtcgacccccgcgggaaggtcctggggctgccaccctcgttcccccgattggggccgcaggtgtgatggtcggctcccacgcggacatggcgccggcctctactgcggagggggccggggagaagccaggccctgcggcccctgccccggcggcccagtacgaatgtggggagtgtggcaagtcattccggtggtcgtcccggctcctgcaccaccagcgcacgcacacaggcgagcggccctacaagtgcccagactgccccaaggctttcaaaggctcctcggccctgctctaccaccagcgaggccacacgggcgagcggccctaccagtgccccgactgtcccaaggccttcaagcgctcctctct

SEQ ID NO: 203276 - DNA, 3847 bp, Homo sapiens
  Payload ID: 20086
  Gene Name: zinc finger protein 628
  Uniprot ID: Q5EBL2
  ENST ID: ENST00000598519
  CDS Start-End: 554-3733
ggtgcatggaaggatttttttgcagatgagagggaatcgggattaataaggggaacttgcgaccccgcgtctcgagctggccgtccctggccttgggctcaccggggcctcggcccccaagacctgacaactggagtccgcgaccacaactgggagaactacaactcccaggatgccgcgcaccgcctgcgcccgagctcgacgaggcctcgcacagccaatgggagggtccgggggcgggaactcggagtacgtgcgttgtgacgcaccgacggcgacgtcggggtttgtgtgcgcgagaggccgccgataaaggttgggtgcctcgcgccgggggccgttgggagggagtgcgcccctgccccccctccccggtccccacagctgcaccgccgctgccggggccccaccttcccgtcgacccccgcgggaaggtcctggggctgccaccctcgttcccccgattggggccgcagaggcatgatcaaggacagggttgcctgccaagaacaggaggggagaggaggggctggaggtttcaggagaaagaagcatgtcaggtgtgatggtcggctcccacgcggacatggcgccggcctctactgcggagggggccggggagaagccaggccctgcggcccctgccccggcggcccagtacgaatgtggggagtgtggcaagtcattccggtggtcgtcccggctcctgcaccaccagcgcacgcacacaggcgagcggccctacaagtgcccagactgccccaaggctttcaaaggctcctcggccctgctctaccaccagcgaggccacacgggcgagcggccctaccagtgccccgactgtcccaaggccttcaagcgctcctctctgctgcagatccaccgtagcgtgcacaccggcctgcgggccttcatctgcggccagtgcggcctggccttcaagtggtcgtcccactaccagtaccacttaaggcagcacacaggcgagcgcccctacccgtgcccggactgccccaaggccttcaagaactcgtccagcctgcggcgccaccgccacgtgcacaccggcgagcggccctacacctgtggagtctgcgggaagagcttcacgcagagcaccaacctgcggcagcaccagcgcgtgcacacgggcgagcggcccttccgctgcccgctctgccccaagaccttcacccactcctccaacctgctgctgcaccagcgcacgcacggcgccgcccccgccccgggtaccgcctccgcggccccgcccccccagtcccgggagcccggcaaggtcttcgtgtgcgacgcctacctgcagcggcacctccagccccacagcccgcccgcgcctcccgccccgccgcccccgcccccgcccgtggtgcctgagctctttttggcggcggcggagaccacggtggagctggtgtaccgctgcgatggctgcgagcagggattcagcagcgaggagctgctcctggagcaccagccgtgccccgggcccgatgcggcgccccagccccaggaggcacccgccgaggcgcccaaggccgaccagccaccgtcccctctgccgcagccccctcctcccgccgccgcccccgcgcctggctttgcctgtctgccctgcggcaagtccttccggacggtggctgggctctcccgccaccagcacagccacggggctgccggcgggcaagcgttccgctgcggcagctgcgacggctccttcccgcagctggccagcctcctggcgcatcagcagtgccacgtggaagaggccgcggccgggcgcccgcccccgcaggctgaggctgcggaggtgacctgcccccaggaaccgctggcgcctgccgcccccgtcccgccgccacccccgtccgcccccgcttctgcggagcggccctacaaatgtgccgagtgcggcaagtccttcaagggctcctccgggctgcgctaccacctgcgggaccacacgggcgagcggccctaccagtgtggcgagtgcggcaaggccttcaagcgctcctccctgctggccatccaccagcgggtgcacacgggcctgcgggccttcacctgtggccagtgcggcctcaccttcaagtggtcgtcccactaccagtaccacctgcggctgcactctggcgagcggccctacgcctgcggggagtgtggcaaggccttccgcaacacgtcgtgcctgcgtcgccaccgccacgtgcacactggcgagaggccccacgcctgcggtgtctgcggcaagagcttcgcgcagacctccaacctgcggcagcaccagcgcgtgcacacgggcgagcggcccttccgctgcccgctctgccccaagaccttcacccactcctccaacctgctgctgcaccagcgcacgcactcggcggagcgccccttcacctgccccatctgcggtcgcggcttcgttatggccgcctatctgcagcggcacctgaggacgcacgccccggccaacacgcctcccagcaccacagcccctgccgccggcccccagccccctgctccactggctgctgcgcgggccccgccagccacccaagatgtccacgtcctgccccacctccaggccacgctctccctcgaggtggcggggggcacggcccaggccccgagcttggggccagcagcgcccaactctcagacgttcctcctggtgcaaactgcccagggcctccagctgatccccagcagcgtgcagccccctacacctccgccccctcccgcacctcccaagctcatcctgctgccctcctccagtgctggggctgggggcggccgtgcaaggcagggcccgcgggcagtggggaaagcgggccagggggcgggagtggtctggctgccaggccctgggggtctaggggtgcagggagcggccagcgctggggccagcgggacagggcagagcctcatcgttctgcagaatgtggggggtggggaggcagggccacaggaaatgagtggggtgcagctccagcccctccgaccagccccagaagtaaccacggtccagctccagccagcgcaggaggtgaccacagtccagctccagccagcacaggaagtaaccacggtccagctccagccagcacaggaggtgaccacggtccagctccagcccgtggccggccagctctccaattccagtgggggagctgtggctactgaggcacccaacctgctggttgttcagagcggggcagctgaggagttgctcactggcccgggccccggggaggcgggggatggcgaggccagcactggtgtggtccaggatgtcctctttgagacactccagacggacgagggcttgcagagcgtgctggtgctgagcggggccgatggcgaacagactcgactctgcgtacaggaggtagaaacacttcctcctgggctgacggagccgcctgccaccggcccacccggacagaaactcctcatcatccgcagcgccccagccactgagctgctggacagcagcaacactggaggaggcaccgccacgctgcagctcctggccccaccgccgtcaggcccagcctcgggccccgcggggctccccggggctccagcctcccagatggtgcaagtggtccccgcaggagctgggcctggtgttatgacccctcagggcctgccctccatccagattgtccagactctacccgcagtccagctggtgcacacgttttgaggagaggcagtgattcccctcccgccccgcacagagaccccgactcactgccagccggggcggggcagggtgccgcaggctgggcttgctaataaagacccgagtctccccgcc

SEQ ID NO: 203277 - DNA, 6087 bp, Homo sapiens
  Payload ID: 20087
  Gene Name: zinc finger protein 629
  Uniprot ID: Q9UEG4
  ENST ID: ENST00000262525
  CDS Start-End: 209-2818
tcctgctccgtcccagtcaccctgaactggtccccgggtcctcagcctggaatcaccccttgagaaggaccccagagtcctcggcgcccagtccgtcccccgaggcagggcactgaaggggttaagtcccctggggctggattccgccttccggcttttcccagaccccagagccggtccctggaacactgcagtcctgagctctgggatggagcccgagactgcgctgtggggcccggatctgcagggtccggaacagagccccaacgatgctcacagaggtgccgagagtgaaaacgaagaggagagccctcggcaggaaagttctggggaggagatcatcatgggagacccggctcagagtccagaatccaaggactcaacagagatgtccctggagagatcctcccaggacccctctgtcccccagaaccccccaaccccactgggtcactccaatcccttggaccaccagatccccctggaccccccagccccggaggtagtccctaccccatctgactggaccaaggcctgcgaggccagctggcagtggggcgctctcaccacatggaacagccccccagtcgtccccgccaacgagcccagcctgcgggagctggtgcagggccgcccggcgggggcggagaagccctacatctgcaacgagtgcggcaagagcttcagccagtggtccaagctgctgcggcaccagcgcatccacacgggagagcggcccaacacctgctccgagtgcggcaagagcttcacgcagagctcgcacctggtgcagcaccagcgcacgcacaccggcgagaagccctacaagtgccccgactgcggcaagtgcttcagctggagctccaacctggtgcagcaccagcgcacgcacacgggagagaagccctacaagtgcacggagtgcgagaaagccttcacccagagcaccaacctcatcaagcaccagcgatcccacaccggcgagaagccctacaagtgcggcgagtgccgccgggctttctaccgcagctcggacctcatccagcaccaggccacccacacaggcgagaaaccctacaagtgccccgagtgcgggaagcgcttcggccagaaccacaacctcctcaagcaccagaagatccacgcgggcgagaagccataccgctgcaccgagtgcgggaagagcttcatccagagctcggagctgacccagcaccagcgcacgcacacaggcgagaagccctacgagtgcctagagtgcggcaagagcttcggccacagctccaccctcatcaagcaccagcggactcacctgcgcgaggacccgttcaagtgcccagtgtgcggcaagaccttcaccctgagcgccacgttgctgcggcaccagcgcacgcacacgggcgagcggccctacaagtgcccagagtgcggcaagagcttcagcgtcagctccaacctcatcaaccaccagcgcatccaccgcggcgagcggccctacatctgcgccgactgcggcaagagcttcatcatgagctccacccttatccgccaccagcgcatccacaccggtgagaagccctacaagtgttccgactgcggcaagagcttcatccgcagctcccaccttatccagcaccgccgcacgcacaccggcgagaagccctacaagtgccccgagtgcggcaagagcttcagccagagctccaaccttattacccacgtccgcacgcacatggacgagaacctgttcgtgtgctccgactgcgggaaggccttcctggaagcccacgagctggagcagcaccgggtgatccatgagagggggaagaccccagcgcgtagggcccagggcgacagcctgctggggctcggggacccctccctgctgaccccgccgccgggagccaagccgcacaagtgtctcgtgtgcggaaagggcttcaacgacgagggcatcttcatgcaacatcagaggatccacatcggagaaaacccctacaaaaatgcagacggcctcatcgcacacgcagcccccaaacctcctcagttacgatccccaaggctccctttcagagggaattcctaccccggggctgcggagggcagagcggaggcccccggacagccccttaagccgccggagggtcaggagggcttcagccagaggcgggggctgctgtcctccaagacctacatctgctcccactgcggagagagcttcctggatcgctctgtgctcctccagcatcagctcacccacggcaacgaaaagccctttctctttcctgattatagaattggcctaggggaaggcgcagggcccagccccttcttaagtgggaagccctttaaatgccctgaatgcaaacaaagctttggcctcagctctgagctgctgctgcaccagaaagtccatgcaggcgggaagagctcccagaagagtccagagctggggaagagctcttccgtcctcctggagcatctcaggagccccctgggggccagaccctaccgctgctcagattgcagggcctccttcctcgaccgcgtggccctcacccggcaccaagaaacccacacccaggaaaaaccccccaatcccgaggacccccctccagaggcagtcaccctgtccacagatcaggaaggtgagggcgagacccctacccccacagagagcagcagccatggggaagggcaaaaccccaaaaccctagtggaagaaaagccctatctgtgccccgagtgtggagccggcttcacagaagtcgcagccctcctgctccataggagctgccacccaggtgtctccctgtgaaatgggtctggagaccaggggcctcgctctctccagagaggaacactggattttttcccccaaaaaaattacatggggaagggaggataaccctatcagatggtagtggagtggaggagaaagaaccctgggaaaaaatagtgcttttacatcagtgatgagaaaccctataaaattgttggtgggaagcacttataaggcagtagagaaaaactgttgggttagaaaccctataaatatgtaggaaaaaaaaaagccctttaagtctgtagcagaaaaaccctataaaccatagtggataaaagccctattaattgtaggaagaggtcccaatatgtctctgaacaaccctataaaattgtatcaaaatccttaggaaaatcctatagggtcggggaagtaccgcaatggcactgacccgggagtaacgaccctcagatgatgcagaaaacacctctccctcactgttccacaatgttctctcccagcagccctggacagttctcatggaggaagatgctcagctgggggagtggtgtgggaactgggtggaactgaaaaggaagaaaataggagaaaaataagtgaccaggagctctggagcccccagaggagataagacagagactaggaagaaaaggtcccactcactgcactggggtccttggggtttgaggacaatgttagatgcattgtgtgttttagggaaagaggcctatggaatcccttatcaaaaccccaaaatggggaagaaaaaacaaattggcaagcctttttaaaggctgaagtttggggtgcagaaacatggtcagtataagaatactgagaaaccaccacaaaaattagggggaagcagggggcagtttctgttagattgctttgaggggagcaaaccaaggtggggaaactgctcacatggaacccagctaactccaggccccttcttgcttccggaagcttgcgaaactgcaagtagcaggcaggtcccagctctcagagtgcaagggttctccccacaccaggcaggaccaccctttctccctgcccagccagggacttctactctgcaaggcctccagggatggcggttgcctcccaccacattctcaggtctcaccttcaggaggtttttcctgaaatctaactgccgccagtggcagctcatttcctcaaattctgtcctcagtggagagggagaaccgctgctagtcgacctccaaagaataaagcccttcagagacttagggcctgcgtgtgggcctccccagccttctccaagtcatcagggccacagaatttcttagaaagctttgattagccagcaacttgattttaaacttcagctattcatctttgttggtagcaaggctgccccgcaggataaggcagccctcctccctggtggggatccagacaccccacagactgagccacaggtccctgaagagtccgcagaggccgtatcaccctcttcaccctggtacctggagccctccagggttgtgagatccagcccaatctcagccttgagatggatgggatggattccactcacttggctcccctctcctccttagccagaaaccttcagaaggaaacagaaggatgagaaagcctcccttgccaggcccatctcacctcccacaccacacagttacacattcataaacagccaagcctgctcacaggcctgggcatatgtggctggggagagactgttgccctatgagatggtggaagacagaaaactcttgaatgaaacatctgtaacaagactcccactccctaatcctggagaccccttcaaaaggagaggactctgctcagcgctgggtcagaaaggaagtgcttgccaaccccagtaatgcgctgtcctggagtaagaggactgagatgccagctgtggggcccgtcaggagtcacgtctcaagagaggggtgacccagatttttgcaaagctgtggaagagacctctaattccatgacctaaagtttcacacaacctttatgcaaatccttcgccatttgtctatcctggccccagcaggatgaccctcacatttaaaaggatcaaaatctcaaacattgtgggaggaaaacgccaggcctgctggggagagggagaaggcaggcctcaggattgtgcggagaaccatgttgccatctgcataacgccccagcctatccaagtgccaggaagggaagcactactgaggggggtgctgcctgtgggtctcttcctaacagaacgccaacgaagggggtgccctgtaagaatgagaagtctgccaagtctaaggagatgtccccctccccaagatggtagcagaaactgaagttgtaaagacaaacctctcgcaaagccagaagcagatgctctcaaaaacaggcctaaggaatctgttcccagaagaggcctggggagcagcttttggggctcagaggccagtctggggggaggcaggcagtgtgactgaaggccggcgcaggcctgtttcggactagggtgtagcatatttagtaggatgctcacatgttgtagggatgggtgagggctaaggggcttggctcttgtacgggatggatgatgtgagcgcacagttcgtagggtcaggcgtcttgcggtaggaaaggggcagggttcgatacctctggggtgtggcgtgttctctcttgcccacctccccaagctcctttaaccaggagcttccctcccagagtgagctacgtcttgggaggattgaagcagggaggtggcagtggctagagttgctcagatcggctcagatgaaggcccaggggtcaaagcatttgctcaccacaactgagtctggaaggcactgtgcagccaaaccctcttgtccaatcacatgcaggccccaggcccctcagaaacgccctggtggagggaggagcccaacagatagggtcagggagtcagtggggaaagcagaggggagagcttagagtgaaacttgaaactgctatggacatggaggtcagatgggaacttggaactgggcatgaatcctgaatggtggggaaacttgaagccatcacagccaagaggtggggttccatgacctgccctgaggtcagcagctcccagactcctttgccctcactagggaagccccagtcaccggacttgtccccatggagtgaagagaggccccatttttgagtgttgtgtgtccaaaacagtgttgtgtcactggtggtcatgttgcttagttgaagagaataaagggaataagatttcctgggtg

SEQ ID NO: 203278 - DNA, 2791 bp, Homo sapiens
  Payload ID: 20088
  Gene Name: zinc finger protein 630
  ENST ID: ENST00000276054
  CDS Start-End: 936-2537
ctggtggccgggaacgcccactcacccggacaagtcgcggcccttccaagcctcacactgctttcgtaggatcaattccgaatacccaaactcggagatatcacgaggactcccccgggcccccaaacgcacctctcctctggctggaatgggagcctccagaagcagtgcgagaccacggccagcgacagaggtcctggcgctggcggaatgacgccatttttgttactggtagagctcggcttcgtggctgtttcggagccaccgaaagataagctccctcgtcaccctgacatctctccgggaagactggaagggaaatggcctttcgggggatgttgaacgcatttgggcaggcggggagccaagcccggcttgagagcagagccggggacgaagttccggaaatggaattaccgagtcagatgagaaacacaagtcatcaatgaattaacaagcaacacattgtcacatccagctgttgaagagtggttaactcagcttgatctccgaagactcttctgcaccccaccccgcccccaactgctttccaaagagaaacagaaaatgattgagtcccaggaaccagtgacatttgaggatgtggctgtggacttcacgcaggaagagtggcagcagttgaatcctgctcagaagaccctgcatagggatgtgatgctggagacctataatcacctggtctccgtggggtgttcaggtataaaaccagatgtaatctttaagttggaacatggaaaggacccatggatcatagagagtgagttgtcaaggtggatctacccagagtgaaaggccttgaatcttcccagcagatcatttctggagaacttttatttcaaagggagatactagaaagagccccaaaggataattcattgtactctgttttaaaaatctggcatattgataatcagatggatagatatcaaggaaatcaagacagagttttgaggcaggtcacagtcatcagtcgtgaaacattgactgatgagatgggttccaagtacagtgcatttgggaaaatgttcaatcggtgcacagaccttgctcctttaagtcaaaaattccataagtttgattcatgtgaaaatagcttgaagtctaattcagacttactaaattataacaggagctatgcaagaaagaaccccactaagagatttagatgtgggagaccacctaagtataatgcttcctgttctgtgcctgagaaggaaggcttcattcatactggaatggagccctatggagatagtcaatgtgaaaaagttctcagtcataagcaagcccatgttcagtataagaaatttcaagccagagagaaacccaatgtttgtagtatgtgtgggaaagcctttatcaagaagtcacagctcattatacatcaaagaattcatactggagagaaaccatatgtatgtggagattgtaggaaagccttcagtgagaaatcacacctcattgtgcatcagaggattcatactggggagaaaccctatgaatgtactaagtatggaagagcattctcccggaagtcacctttcactgttcatcagagagtccatactggagagaaaccctatgagtgttttgagtgtccaaaagctttctcccagaagtcacatctaattatacatcagagagttcataccagagagaagccctttgaatgcagtgaatgcaggaaagccttctgtgagatgtctcacctttttatacaccagataactcatactgggaagaagccctatgaatgtactgaatgtgggaagaccttccctcggaaaacacagctcattatacatcagagaacgcatactggagagaagccctataagtgtggtgaatgtgggaaaactttctgccaacagtcccacctcataggacatcaaagaattcatacaggagaaaaaccttatgtgtgtactgactgtgggaaggccttttcccagaagtcacacctcactggccatcaaagacttcatactggagagaaaccttatatgtgtactgaatgtggaaaatccttctctcagaaatcacctcttatcatacaccagagaattcatacaggggagaaaccttatcagtgtggtgaatgtggcaaaaccttctcccagaaatcactcctcattattcatctgagagttcacacaggggagaaaccttatgagtgtactgagtgtgggagggccttttccctgaagtcacatctcattctacatcagagaggtcatactggagagaaaccctatgaatgtagtgaatgtggaaaggccttctgtggaaagtctccactcattatacatcagaaaactcatcctagggagaaaacccctgaatgtgctgagtctggaatgacttttttctggaaatcacagatgattacatatcagagaagacacactggggagaaaccctccagatgcagtgactgtgggaaggcattctgccagcatgtatactttactgggcatcagaatccatataggaaagacaccttgtatatatgctgattgtgggaaggcctattcccagaagtcagtcctcattgtctatgggaaaactcacattgaatagaaatagtgacaacttctcaactgtagaatagactaatatgttcctcagtatacatgattacccttccacagaatgatctgcttaggccctcagaatattttcaacatcacaaatatggaatcaatttgctcaccctcaaactgtctcagccctcttcacagaataaatgtatctggaagaattagcacta

SEQ ID NO: 203279 - DNA, 2455 bp, Homo sapiens
  Payload ID: 20088
  Gene Name: zinc finger protein 630
  Uniprot ID: Q2M218
  ENST ID: ENST00000409324
  CDS Start-End: 228-2201
gagtttgtggggtgatgggggatctgtgcggtgtttgatgatgtctgtaagggacgaagttccggaaatggaattaccgagtcagatgagaaacacaagtcatcaatgaattaacaagcaacacattgtcacatccagctgttgaagagtggttaactcagcttgatctccgaagactcttctgcaccccaccccgcccccaactgctttccaaagagaaacagaaaatgattgagtcccaggaaccagtgacatttgaggatgtggctgtggacttcacgcaggaagagtggcagcagttgaatcctgctcagaagaccctgcatagggatgtgatgctggagacctataatcacctggtctccgtggggtgttcaggtataaaaccagatgtaatctttaagttggaacatggaaaggacccatggatcatagagagtgagttgtcaaggtggatctacccagacagagtgaaaggccttgaatcttcccagcagatcatttctggagaacttttatttcaaagggagatactagaaagagccccaaaggataattcattgtactctgttttaaaaatctggcatattgataatcagatggatagatatcaaggaaatcaagacagagttttgaggcaggtcacagtcatcagtcgtgaaacattgactgatgagatgggttccaagtacagtgcatttgggaaaatgttcaatcggtgcacagaccttgctcctttaagtcaaaaattccataagtttgattcatgtgaaaatagcttgaagtctaattcagacttactaaattataacaggagctatgcaagaaagaaccccactaagagatttagatgtgggagaccacctaagtataatgcttcctgttctgtgcctgagaaggaaggcttcattcatactggaatggagccctatggagatagtcaatgtgaaaaagttctcagtcataagcaagcccatgttcagtataagaaatttcaagccagagagaaacccaatgtttgtagtatgtgtgggaaagcctttatcaagaagtcacagctcattatacatcaaagaattcatactggagagaaaccatatgtatgtggagattgtaggaaagccttcagtgagaaatcacacctcattgtgcatcagaggattcatactggggagaaaccctatgaatgtactaagtatggaagagcattctcccggaagtcacctttcactgttcatcagagagtccatactggagagaaaccctatgagtgttttgagtgtccaaaagctttctcccagaagtcacatctaattatacatcagagagttcataccagagagaagccctttgaatgcagtgaatgcaggaaagccttctgtgagatgtctcacctttttatacaccagataactcatactgggaagaagccctatgaatgtactgaatgtgggaagaccttccctcggaaaacacagctcattatacatcagagaacgcatactggagagaagccctataagtgtggtgaatgtgggaaaactttctgccaacagtcccacctcataggacatcaaagaattcatacaggagaaaaaccttatgtgtgtactgactgtgggaaggccttttcccagaagtcacacctcactggccatcaaagacttcatactggagagaaaccttatatgtgtactgaatgtggaaaatccttctctcagaaatcacctcttatcatacaccagagaattcatacaggggagaaaccttatcagtgtggtgaatgtggcaaaaccttctcccagaaatcactcctcattattcatctgagagttcacacaggggagaaaccttatgagtgtactgagtgtgggagggccttttccctgaagtcacatctcattctacatcagagaggtcatactggagagaaaccctatgaatgtagtgaatgtggaaaggccttctgtggaaagtctccactcattatacatcagaaaactcatcctagggagaaaacccctgaatgtgctgagtctggaatgacttttttctggaaatcacagatgattacatatcagagaagacacactggggagaaaccctccagatgcagtgactgtgggaaggcattctgccagcatgtatactttactgggcatcagaatccatataggaaagacaccttgtatatatgctgattgtgggaaggcctattcccagaagtcagtcctcattgtctatgggaaaactcacattgaatagaaatagtgacaacttctcaactgtagaatagactaatatgttcctcagtatacatgattacccttccacagaatgatctgcttaggccctcagaatattttcaacatcacaaatatggaatcaatttgctcaccctcaaactgtctcagccctcttcacagaataaatgtatctggaagaattagcacta

SEQ ID NO: 203280 - DNA, 2829 bp, Homo sapiens
  Payload ID: 20088
  Gene Name: zinc finger protein 630
  Uniprot ID: Q2M218
  ENST ID: ENST00000442455
  CDS Start-End: 568-2541
ctggtggccgggaacgcccactcacccggacaagtcgcggcccttccaagcctcacactgctttcgtaggatcaattccgaatacccaaactcggagatatcacgaggactcccccgggcccccaaacgcacctctcctctggctggaatgggagcctccagaagcagtgcgagaccacggccagcgacagaggtcctggcgctggcggaatgacgccatttttgttactggtagagctcggcttcgtggctgtttcggagccaccgaaagataagctccctcgtcaccctgacatctctccgggaagactggaagggaaatggcctttcgggggatgttgaacgcatttgggcaggcggggagccaagcccggcttgagagcagagccggggacgaagttccggaaatggaattaccgagtcagatgagaaacacaagtcatcaatgaattaacaagcaacacattgtcacatccagctgttgaagagtggttaactcagcttgatctccgaagactcttctgcaccccaccccgcccccaactgctttccaaagagaaacagaaaatgattgagtcccaggaaccagtgacatttgaggatgtggctgtggacttcacgcaggaagagtggcagcagttgaatcctgctcagaagaccctgcatagggatgtgatgctggagacctataatcacctggtctccgtggggtgttcaggtataaaaccagatgtaatctttaagttggaacatggaaaggacccatggatcatagagagtgagttgtcaaggtggatctacccagacagagtgaaaggccttgaatcttcccagcagatcatttctggagaacttttatttcaaagggagatactagaaagagccccaaaggataattcattgtactctgttttaaaaatctggcatattgataatcagatggatagatatcaaggaaatcaagacagagttttgaggcaggtcacagtcatcagtcgtgaaacattgactgatgagatgggttccaagtacagtgcatttgggaaaatgttcaatcggtgcacagaccttgctcctttaagtcaaaaattccataagtttgattcatgtgaaaatagcttgaagtctaattcagacttactaaattataacaggagctatgcaagaaagaaccccactaagagatttagatgtgggagaccacctaagtataatgcttcctgttctgtgcctgagaaggaaggcttcattcatactggaatggagccctatggagatagtcaatgtgaaaaagttctcagtcataagcaagcccatgttcagtataagaaatttcaagccagagagaaacccaatgtttgtagtatgtgtgggaaagcctttatcaagaagtcacagctcattatacatcaaagaattcatactggagagaaaccatatgtatgtggagattgtaggaaagccttcagtgagaaatcacacctcattgtgcatcagaggattcatactggggagaaaccctatgaatgtactaagtatggaagagcattctcccggaagtcacctttcactgttcatcagagagtccatactggagagaaaccctatgagtgttttgagtgtccaaaagctttctcccagaagtcacatctaattatacatcagagagttcataccagagagaagccctttgaatgcagtgaatgcaggaaagccttctgtgagatgtctcacctttttatacaccagataactcatactgggaagaagccctatgaatgtactgaatgtgggaagaccttccctcggaaaacacagctcattatacatcagagaacgcatactggagagaagccctataagtgtggtgaatgtgggaaaactttctgccaacagtcccacctcataggacatcaaagaattcatacaggagaaaaaccttatgtgtgtactgactgtgggaaggccttttcccagaagtcacacctcactggccatcaaagacttcatactggagagaaaccttatatgtgtactgaatgtggaaaatccttctctcagaaatcacctcttatcatacaccagagaattcatacaggggagaaaccttatcagtgtggtgaatgtggcaaaaccttctcccagaaatcactcctcattattcatctgagagttcacacaggggagaaaccttatgagtgtactgagtgtgggagggccttttccctgaagtcacatctcattctacatcagagaggtcatactggagagaaaccctatgaatgtagtgaatgtggaaaggccttctgtggaaagtctccactcattatacatcagaaaactcatcctagggagaaaacccctgaatgtgctgagtctggaatgacttttttctggaaatcacagatgattacatatcagagaagacacactggggagaaaccctccagatgcagtgactgtgggaaggcattctgccagcatgtatactttactgggcatcagaatccatataggaaagacaccttgtatatatgctgattgtgggaaggcctattcccagaagtcagtcctcattgtctatgggaaaactcacattgaatagaaatagtgacaacttctcaactgtagaatagactaatatgttcctcagtatacatgattacccttccacagaatgatctgcttaggccctcagaatattttcaacatcacaaatatggaatcaatttgctcaccctcaaactgtctcagccctcttcacagaataaatgtatctggaagaattagcactactttggtgttgtttggtcattaaatgctttatag

SEQ ID NO: 203281 - DNA, 1245 bp, Homo sapiens
  Payload ID: 20088
  Gene Name: zinc finger protein 630
  ENST ID: ENST00000428463
  CDS Start-End: 253-519
aacagtatgtgggttatgcaaatgggagtttgtggggtgatgggggatctgtgcggtgtttgatgatgtctgtaagggacgaagttccggaaatggaattaccgagtcagatgagaaacacaagtcatcaatgaattaacaagcaacacattgtcacatccagctgttgaagagtggttaactcagcttgatctccgaagactcttctgcaccccaccccgcccccaactgctttccaaagagaaacagaaaatgattgagtcccaggaaccagtgacatttgaggatgtggctgtggacttcacgcaggaagagtggcagcagttgaatcctgctcagaagaccctgcatagggatgtgatgctggagacctataatcacctggtctccgtggggtgttcaggtataaaaccagatgtaatctttaagttggaacatggaaaggacccatggatcatagagagtgagttgtcaaggtggatctacccaggtatatttggattatgtatcttaatctgagaactactttagacattgtggtccaatctgagagtattctgtttttcagtagatggagtgctggctgttcctcggaacctgtgtcttcacccaggtattcatgctggcttcctggaccctttgtgtctttttctgcctggaaaagtaggaatccatggtgcatacagaagatacaaagaattgtttgagtctggagtgcagtggcacaatctcagctcactgcagcctttacctcccaggtcaagtgatcctcccacctcagcctcccaagttgctgggactacaggcacgtgccaccacgtccagagagaggatctcactcttgcccaggctggagtgcagtgatgtgattacagctcattgcagcctcgaactcctggactcaagcaatcctcctgcctcagcctcctgagtagcacagtgacctgcccctaaaggttcatgcgcatccctcagacccctctttagacgcgccccgcttctccctctgccctctccccttgcccaagccccgaggtgggggcctggtgtgaatgctccggccgaagtgaacctgcacccccgcacccgaaggcctctttccggcttctgggcaaggcggccccggtgagctcggccgtcacacatctctgctttttcccaagaagagcaggaaatggccaaaccccaggggctagtgacatttgaagatgtagctgtggatttcacccaggaggagtggcagta

SEQ ID NO: 203282 - DNA, 988 bp, Homo sapiens
  Payload ID: 20088
  Gene Name: zinc finger protein 630
  ENST ID: ENST00000428686
  CDS Start-End: 345-988
cccggacaagtcgcggcccttccaagcctcacactgctttcgtaggatcaattccgaatacccaaactcggagatatcacgaggactcccccgggcccccaaacgcacctctcctctggctggaatgggagcctccagaagcagtgcgagaccacggccagcgacagaggacgaagttccggaaatggaattaccgagtcagatgagaaacacaagtcatcaatgaattaacaagcaacacattgtcacatccagctgttgaagagtggttaactcagcttgatctccgaagactcttctgcaccccaccccgcccccaactgctttccaaagagaaacagaaaatgattgagtcccaggaaccagtgacatttgaggatgtggctgtggacttcacgcaggaagagtggcagcagttgaatcctgctcagaagaccctgcatagggatgtgatgctggagacctataatcacctggtctccgtggggtgttcaggtataaaaccagatgtaatctttaagttggaacatggaaaggacccatggatcatagagagtgagttgtcaaggtggatctacccagacagagtgaaaggccttgaatcttcccagcagatcatttctggagaacttttatttcaaagggagatactagaaagagccccaaaggataattcattgtactctgttttaaaaatctggcatattgataatcagatggatagatatcaaggaaatcaagacagagttttgaggcaggtcacagtcatcagtcgtgaaacattgactgatgagatgggttccaagtacagtgcatttgggaaaatgttcaatcggtgcacagaccttgctcctttaagtcaaaaattccataagtttgattcatgtgaaaatagcttgaagtctaattcagacttactaaattataacaggagctatgcaagaaagaaccccactaagagatttagatgtgggagaccacctaagta

SEQ ID NO: 203283 - DNA, 541 bp, Homo sapiens
  Payload ID: 20088
  Gene Name: zinc finger protein 630
  ENST ID: ENST00000421903
  CDS Start-End: 420-541
acgaagttccggaaatggaattaccgagtcagatgagaaacacaagtcatcaatgaattaacaagcaacacattgtcacatccagctgttgaagagtggttaactcagcttgatctccgaagactcttctgcaccccaccccgcccccaactgctttccaaagagaaacagaaaatgattgagtcccagggtgttcaggtataaaaccagatgtaatctttaagttggaacatggaaaggacccatggatcatagagagtgagttgtcaaggtggatctacccagacagagtgaaaggccttgaatcttcccagcagatcatttctggagaacttttatttcaaagggagatactagaaagagccccaaaggataattcattgtactctgttttaaaaatctggcatattgataatcagatggatagatatcaaggaaatcaagacagagttttgaggcaggtcacagtcatcagtcgtgaaacattgactgatgagatgggttccaagtacagtgcatttgggaaaatgttcaatcggtg

SEQ ID NO: 203284 - DNA, 2220 bp, Homo sapiens
  Payload ID: 20088
  Gene Name: zinc finger protein 630
  ENST ID: ENST00000616492
  CDS Start-End: 1-1932
atggtggaaggggaagaagagtggcagcagttgaatcctgctcagaagaccctgcatagggatgtgatgctggagacctataatcacctggtctccgtggggtgttcaggtataaaaccagatgtaatctttaagttggaacatggaaaggacccatggatcatagagagtgagttgtcaaggtggatctacccagacagagtgaaaggccttgaatcttcccagcagatcatttctggagaacttttatttcaaagggagatactagaaagagccccaaaggataattcattgtactctgttttaaaaatctggcatattgataatcagatggatagatatcaaggaaatcaagacagagttttgaggcaggtcacagtcatcagtcgtgaaacattgactgatgagatgggttccaagtacagtgcatttgggaaaatgttcaatcggtgcacagaccttgctcctttaagtcaaaaattccataagtttgattcatgtgaaaatagcttgaagtctaattcagacttactaaattataacaggagctatgcaagaaagaaccccactaagagatttagatgtgggagaccacctaagtataatgcttcctgttctgtgcctgagaaggaaggcttcattcatactggaatggagccctatggagatagtcaatgtgaaaaagttctcagtcataagcaagcccatgttcagtataagaaatttcaagccagagagaaacccaatgtttgtagtatgtgtgggaaagcctttatcaagaagtcacagctcattatacatcaaagaattcatactggagagaaaccatatgtatgtggagattgtaggaaagccttcagtgagaaatcacacctcattgtgcatcagaggattcatactggggagaaaccctatgaatgtactaagtatggaagagcattctcccggaagtcacctttcactgttcatcagagagtccatactggagagaaaccctatgagtgttttgagtgtccaaaagctttctcccagaagtcacatctaattatacatcagagagttcataccagagagaagccctttgaatgcagtgaatgcaggaaagccttctgtgagatgtctcacctttttatacaccagataactcatactgggaagaagccctatgaatgtactgaatgtgggaagaccttccctcggaaaacacagctcattatacatcagagaacgcatactggagagaagccctataagtgtggtgaatgtgggaaaactttctgccaacagtcccacctcataggacatcaaagaattcatacaggagaaaaaccttatgtgtgtactgactgtgggaaggccttttcccagaagtcacacctcactggccatcaaagacttcatactggagagaaaccttatatgtgtactgaatgtggaaaatccttctctcagaaatcacctcttatcatacaccagagaattcatacaggggagaaaccttatcagtgtggtgaatgtggcaaaaccttctcccagaaatcactcctcattattcatctgagagttcacacaggggagaaaccttatgagtgtactgagtgtgggagggccttttccctgaagtcacatctcattctacatcagagaggtcatactggagagaaaccctatgaatgtagtgaatgtggaaaggccttctgtggaaagtctccactcattatacatcagaaaactcatcctagggagaaaacccctgaatgtgctgagtctggaatgacttttttctggaaatcacagatgattacatatcagagaagacacactggggagaaaccctccagatgcagtgactgtgggaaggcattctgccagcatgtatactttactgggcatcagaatccatataggaaagacaccttgtatatatgctgattgtgggaaggcctattcccagaagtcagtcctcattgtctatgggaaaactcacattgaatagaaatagtgacaacttctcaactgtagaatagactaatatgttcctcagtatacatgattacccttccacagaatgatctgcttaggccctcagaatattttcaacatcacaaatatggaatcaatttgctcaccctcaaactgtctcagccctcttcacagaataaatgtatctggaagaattagcactactttggtgttgtttggtcattaaatgctttatag

SEQ ID NO: 203285 - DNA, 946 bp, Homo sapiens
  Payload ID: 20088
  Gene Name: zinc finger protein 630
  ENST ID: ENST00000627643
  CDS Start-End: 345-946
cccggacaagtcgcggcccttccaagcctcacactgctttcgtaggatcaattccgaatacccaaactcggagatatcacgaggactcccccgggcccccaaacgcacctctcctctggctggaatgggagcctccagaagcagtgcgagaccacggccagcgacagaggacgaagttccggaaatggaattaccgagtcagatgagaaacacaagtcatcaatgaattaacaagcaacacattgtcacatccagctgttgaagagtggttaactcagcttgatctccgaagactcttctgcaccccaccccgcccccaactgctttccaaagagaaacagaaaatgattgagtcccaggaagagtggcagcagttgaatcctgctcagaagaccctgcatagggatgtgatgctggagacctataatcacctggtctccgtggggtgttcaggtataaaaccagatgtaatctttaagttggaacatggaaaggacccatggatcatagagagtgagttgtcaaggtggatctacccagacagagtgaaaggccttgaatcttcccagcagatcatttctggagaacttttatttcaaagggagatactagaaagagccccaaaggataattcattgtactctgttttaaaaatctggcatattgataatcagatggatagatatcaaggaaatcaagacagagttttgaggcaggtcacagtcatcagtcgtgaaacattgactgatgagatgggttccaagtacagtgcatttgggaaaatgttcaatcggtgcacagaccttgctcctttaagtcaaaaattccataagtttgattcatgtgaaaatagcttgaagtctaattcagacttactaaattataacaggagctatgcaagaaagaaccccactaagagatttagatgtgggagaccacctaagta

SEQ ID NO: 203286 - DNA, 6505 bp, Homo sapiens
  Payload ID: 20089
  Gene Name: zinc finger protein 638
  Uniprot ID: Q14966
  ENST ID: ENST00000264447
  CDS Start-End: 315-6251
gcatgcgtgcagctctttggaggcggtagcgttttcggcgtcgagactggaggctgagtgctaaactgtgtggggcgcggatgggatccagctgttagtcgggtaggcatagctttgtgttattcttggaaaatttcgcaccacttgtgaattccttgaacctgggcattgcaaacccacttctgttgggcccatctcctttgcactttgctcagattaagactcagttggcgcttcagcagctgaatgccgttgcctcacatggttcaacaccaccttatactttattaaatcaggctttcttgaaaatagccatgtcgagacccaggtttaatcctcgaggagactttccacttcaaaggccacgagcacctaacccttctgggatgaggcctccaggaccatttatgaggcctggatctatgggtctcccaagattttacccagcagggagagcacgtggaattccacacagatttgctggccatgaatcttatcagaacatggggccacagagaatgaatgttcaggtaactcaacacagaactgatccaagattgaccaaagaaaaactggattttcatgaagcacaacagaagaaggggaagcctcatggtagccggtgggatgatgagcctcatatatctgcatcagtggcagtgaaacagagttctgtaacacaggttacagagcagagtcccaaagtacagagccgctatacaaaagagagtgcctcaagtatcttagcaagttttggattatctaatgaagacctagaagaacttagtcgctatcctgatgaacaactaactcctgaaaatatgccattaattttgagggatataagaatgcgaaaaatggggcgccgattacctaatttaccttctcagagcagaaataaagaaacacttggtagtgaagcagtttcaagtaatgtgatcgattatgggcatgcaagcaaatatggctacacagaagatccacttgaagtacgtatttatgatcctgaaattccaactgatgaggtcgagaatgaatttcagtcacagcagaacatttctgcatctgttcccaatccaaatgtgatatgtaattctatgtttcctgttgaagacgtatttcgccaaatggacttccccggtgagtcctccaataatcggtcctttttctcagttgagagtggaaccaagatgtcaggcttacacatttcaggaggacagtcagtccttgaacccataaaatccgtcaaccaatccattaaccaaacagttagccagacaatgagtcaatctctgattcctccatctatgaaccagcaacctttttcgtcggaattaatttcatctgtaagccagcaagagcggatcccacatgaacctgtgattaattcatctaacgtacatgttggatcaagaggaagtaaaaagaattaccagtcacaggctgacattcccattcggtctccctttggtattgtgaaagcatcctggctaccaaagttttcacatgctgatgcccagaagatgaagagacttccaactccttctatgatgaatgattattatgcagcatctccaagaatatttccacatttgtgttctctgtgtaacgtagaatgtagtcatttgaaggattggattcagcatcaaaatacatctactcatattgagagctgtcgacagttacgtcaacagtatcctgattggaatcctgagatcctcccatcgagaagaaatgagggcaatagaaaagaaaatgaaactccacgaagacgttctcattcccccagtcctaggcgttctagaagatcaagctcaagtcacagattccgtcggtctcgaagcccaatgcattacatgtataggccgagaagtcgaagtccaagaatttgccatcgtttcatttctagatacagatccagatccagatcccgttcaccatatcgaattagaaatccatttagaggtagtccaaaatgctttcgatcagttagccctgagaggatgtcaaggagatcagtgagatcatcagatagaaaaaaagcattagaagatgtagtacaacgatctgggcatgggacagaatttaataaacagaagcatcttgaagctgctgataagggacattcaccagcacaaaagcctaaaactagcagtggaacaaaaccatcagttaaacctacaagcgctacaaagagtgattcaaatctaggaggacattctattcgttgtaaatcaaagaatcttgaagatgacactttgtcagaatgtaaacaggtgtctgataaagctgtttctctccagcgaaagcttcggaaagaacagtcattgcattatggttcggttcttcttataactgaattaccagaggatggttgtactgaagaagatgtgagaaaattatttcaaccatttgggaaagtgaatgatgtcctaattgttccatatagaaaagaggcttacctagaaatggaatttaaagaggcaattactgcaattatgaagtacattgaaacaacacctcttacgataaaaggaaaaagtgtgaaaatatgtgttccaggaaagaaaaaagcacagaacaaagaggtgaagaaaaagactttagagtcaaagaaagtatctgcatctaccttaaaaagagatgcagatgcttcaaaagctgttgaaattgttacttcaacttctgctgccaaaactggacaagccaaggcatctgtagccaaagtaaacaaatctacagggaaatcagcaagttctgtaaaatctgtggtaacggtagctgttaaaggtaataaagcttcaatcaaaacagcaaaatctggtggaaagaagtctctagaagccaaaaagactgggaatgtcaaaaacaaagactctaacaaacctgtgactataccagaaaactctgaaataaagaccagtattgaagtcaaagccactgaaaactgtgctaaagaagctatttctgatgctgctttggaggccacagagaatgaaccacttaacaaggaaacagaagaaatgtgtgtgatgcttgtctctaatttgcctaataaaggatattctgtagaagaagtttatgacttagcaaaaccatttggtggtttaaaggatatcttgattttatcatctcataaaaaggcatatatagaaataaatagaaaagctgctgagtctatggtaaaattttatacctgcttcccagtattgatggatggaaatcaactctcaataagtatggctcctgaaaacatgaatataaaagatgaggaagctatatttataaccttggtaaaagaaaatgacccagaggcaaacatagatacaatttatgatcgatttgtacatcttgataatttaccggaagatggacttcagtgtgtactttgtgttggacttcagtttggaaaagtggatcaccatgtattcataagtaatagaaacaaggcaattcttcagttagatagtcctgaatctgctcagtcaatgtatagctttctgaaacaaaatccacaaaatattggtgaccatatgttgacctgctcattatctccaaagatagacttaccagaggtgcaaattgagcatgacccagaattagaaaaagaaagccctggcttgaaaaacagtccaattgatgaaagtgaggtgcaaacagcaactgatagtccctctgttaaacctaatgagcttgaagaagaaagtactcccagcattcaaacagaaactttggtacagcaggaagagccttgtgaggaagaagctgaaaaagcaacatgtgattctgactttgctgttgaaactttggagcttgaaactcaaggagaggaggtcaaagaagaaattcctcttgtagcatccgcttcagtcagtattgaacaattcactgaaaatgccgaggagtgtgctttaaatcagcagatgtttaacagtgacttggagaagaaaggggcagaaattattaaccctaaaacagcattgttaccatctgacagtgtgtttgcagaagaaaggaacctcaaaggaattctagaagaatctccatctgaagcagaagatttcatttctggaattacacagactatggtagaagctgtagctgaagtagaaaaaaatgaaactgtttcggaaatattgccatcaacttgtattgtgacgttagtaccaggaattcccactggggatgagaagacagtggacaaaaagaatatttctgaaaaaaaaggtaacatggatgaaaaggaggagaaggaatttaatactaaggaaaccagaatggatcttcaaataggaacagagaaggctgaaaagaatgaaggtaggatggatgcagaaaaggtggaaaagatggcagcaatgaaagaaaagcctgcagaaaacactttattcaaggcatacccaaataaaggagtgggtcaggctaataagcctgatgaaactagtaaaactagtattctggctgtatcagatgtatctagcagtaaaccaagcatcaaggctgttatagtctcttctcctaaggcaaaagctacagtttcaaaaactgaaaatcagaaaagttttccaaaatctgtgcccagagatcaaataaatgctgaaaagaaactttcagccaaggaatttggtctgcttaaacccacaagtgccaggtcaggcttggcagaaagcagcagtaaattcaaacctactcagagcagtcttaccagaggaggcagtggaaggatctcagccctgcaaggcaagctttctaaactggattacagagatataacaaaacaatctcaggaaacagaggctagaccttccatcatgaaacgggatgacagcaacaataagactttggctgagcaaaacactaagaatcctaaaagcactactggtagaagttccaaatctaaagaggagccattatttccatttaatttggatgaatttgttactgtggatgaggttatagaagaagtgaatccttctcaggccaagcagaatccactaaagggaaaaaggaaagaaactctcaaaaatgttcctttctctgaacttaacttaaagaagaaaaaggggaaaacttccactcctcgtggtgttgagggagaactatcttttgtgacattggatgagattggggaagaggaagatgcagctgcacatctagcacaagctctagtcactgtggatgaagtaattgatgaagaagaactaaatatggaagaaatggtaaaaaattcaaattcactttttacattagatgaattaattgaccaagatgattgcatttcccacagtgaacctaaagatgttactgttctgtcagtggctgaagaacaagatctcctcaaacaggaacgcttggtaactgtggatgaaattggagaagtggaagagctacctttgaatgagtcagcagacataacttttgccactttaaatactaaaggaaatgaaggagatactgtaagggattccattggcttcatttcttctcaggtgcccgaagacccttctactttagttactgtagatgaaatacaagatgacagcagtgatttgcatttagtgactttggatgaagtaactgaagaggatgaagactctctggcggattttaacaaccttaaagaagagcttaattttgttactgttgatgaagttggagaggaggaagatggagataatgatttaaaagttgagttagcacaaagcaaaaatgaccatcccacagataaaaaagggaatagaaagaagagagctgtggacacaaaaaagacaaaacttgaatccttgtcccaagtgggtccagtaaatgagaatgttatggaagaagatctaaaaaccatgattgaaagacacttaacagctaaaactccaaccaagagagttagaattgggaaaactctgccatcagaaaaagctgttgtgacagaaccagcaaaaggtgaagaggccttccagatgagtgaagttgatgaggaatctggattaaaggattcagaaccagagcgaaaacgcaagaagactgaagactcttcttcaggcaaatcagtggcgtctgatgtccctgaggaattagactttcttgtacctaaggctggattcttctgtccaatttgttccctcttctactcaggtgaaaaagcaatgacaaatcactgcaagagtacacgtcataagcaaaatactgagaaattcatggccaagcaaagaaaggaaaaggagcagaatgaggctgaagaaagaagctctaggtgattgggggaaaggaaagaattcactagaaatttgtttagggtccagttgatttgtgtatttttgttatcatttaatttgtaattttcgtttcagaagcaaatattcgtgttgtacaaatttctgattgccctaaatgtagagagactgatggggaaagtatgatgggtttgatttttatatcaaatcatcaggcatggagaaatatcttttagaagtgttaaaataaatgttcctactgtatatttaaaatacca

SEQ ID NO: 203287 - DNA, 6821 bp, Homo sapiens
  Payload ID: 20089
  Gene Name: zinc finger protein 638
  Uniprot ID: Q14966
  ENST ID: ENST00000409544
  CDS Start-End: 631-6567
gcatgcgtgcagctctttggaggcggtagcgttttcggcgtcgagactggaggctgagtgctaaactgtgtggggcgcggatgggatccagctgttagtcggtattacagcgtgaaataaattcccagtatttttcaagattatgtaaaaggagttgtaattactgctcagcacctaggacagcacccagtgcaacacaatgtacatgaactctggcttgaggtttggggcttgtgttctgcattcaggaaagaaaagaagagaaagtttttgggaaatttaaatcttcgtaagcccttactctaaaagtatatgaaatgcagaatggtttcatggctttatttcaaaatgttttacactggctgtagaacccacttcatgaagtagtttgagttaaaatgatctaatatttgtgttttaactttcagctttgtgttattcttggaaaatttcgcaccacttgtgaattccttgaacctgggcattgcaaacccacttctgttgggcccatctcctttgcactttgctcagattaagactcagttggcgcttcagcagctgaatgccgttgcctcacatggttcaacaccaccttatactttattaaatcaggctttcttgaaaatagccatgtcgagacccaggtttaatcctcgaggagactttccacttcaaaggccacgagcacctaacccttctgggatgaggcctccaggaccatttatgaggcctggatctatgggtctcccaagattttacccagcagggagagcacgtggaattccacacagatttgctggccatgaatcttatcagaacatggggccacagagaatgaatgttcaggtaactcaacacagaactgatccaagattgaccaaagaaaaactggattttcatgaagcacaacagaagaaggggaagcctcatggtagccggtgggatgatgagcctcatatatctgcatcagtggcagtgaaacagagttctgtaacacaggttacagagcagagtcccaaagtacagagccgctatacaaaagagagtgcctcaagtatcttagcaagttttggattatctaatgaagacctagaagaacttagtcgctatcctgatgaacaactaactcctgaaaatatgccattaattttgagggatataagaatgcgaaaaatggggcgccgattacctaatttaccttctcagagcagaaataaagaaacacttggtagtgaagcagtttcaagtaatgtgatcgattatgggcatgcaagcaaatatggctacacagaagatccacttgaagtacgtatttatgatcctgaaattccaactgatgaggtcgagaatgaatttcagtcacagcagaacatttctgcatctgttcccaatccaaatgtgatatgtaattctatgtttcctgttgaagacgtatttcgccaaatggacttccccggtgagtcctccaataatcggtcctttttctcagttgagagtggaaccaagatgtcaggcttacacatttcaggaggacagtcagtccttgaacccataaaatccgtcaaccaatccattaaccaaacagttagccagacaatgagtcaatctctgattcctccatctatgaaccagcaacctttttcgtcggaattaatttcatctgtaagccagcaagagcggatcccacatgaacctgtgattaattcatctaacgtacatgttggatcaagaggaagtaaaaagaattaccagtcacaggctgacattcccattcggtctccctttggtattgtgaaagcatcctggctaccaaagttttcacatgctgatgcccagaagatgaagagacttccaactccttctatgatgaatgattattatgcagcatctccaagaatatttccacatttgtgttctctgtgtaacgtagaatgtagtcatttgaaggattggattcagcatcaaaatacatctactcatattgagagctgtcgacagttacgtcaacagtatcctgattggaatcctgagatcctcccatcgagaagaaatgagggcaatagaaaagaaaatgaaactccacgaagacgttctcattcccccagtcctaggcgttctagaagatcaagctcaagtcacagattccgtcggtctcgaagcccaatgcattacatgtataggccgagaagtcgaagtccaagaatttgccatcgtttcatttctagatacagatccagatccagatcccgttcaccatatcgaattagaaatccatttagaggtagtccaaaatgctttcgatcagttagccctgagaggatgtcaaggagatcagtgagatcatcagatagaaaaaaagcattagaagatgtagtacaacgatctgggcatgggacagaatttaataaacagaagcatcttgaagctgctgataagggacattcaccagcacaaaagcctaaaactagcagtggaacaaaaccatcagttaaacctacaagcgctacaaagagtgattcaaatctaggaggacattctattcgttgtaaatcaaagaatcttgaagatgacactttgtcagaatgtaaacaggtgtctgataaagctgtttctctccagcgaaagcttcggaaagaacagtcattgcattatggttcggttcttcttataactgaattaccagaggatggttgtactgaagaagatgtgagaaaattatttcaaccatttgggaaagtgaatgatgtcctaattgttccatatagaaaagaggcttacctagaaatggaatttaaagaggcaattactgcaattatgaagtacattgaaacaacacctcttacgataaaaggaaaaagtgtgaaaatatgtgttccaggaaagaaaaaagcacagaacaaagaggtgaagaaaaagactttagagtcaaagaaagtatctgcatctaccttaaaaagagatgcagatgcttcaaaagctgttgaaattgttacttcaacttctgctgccaaaactggacaagccaaggcatctgtagccaaagtaaacaaatctacagggaaatcagcaagttctgtaaaatctgtggtaacggtagctgttaaaggtaataaagcttcaatcaaaacagcaaaatctggtggaaagaagtctctagaagccaaaaagactgggaatgtcaaaaacaaagactctaacaaacctgtgactataccagaaaactctgaaataaagaccagtattgaagtcaaagccactgaaaactgtgctaaagaagctatttctgatgctgctttggaggccacagagaatgaaccacttaacaaggaaacagaagaaatgtgtgtgatgcttgtctctaatttgcctaataaaggatattctgtagaagaagtttatgacttagcaaaaccatttggtggtttaaaggatatcttgattttatcatctcataaaaaggcatatatagaaataaatagaaaagctgctgagtctatggtaaaattttatacctgcttcccagtattgatggatggaaatcaactctcaataagtatggctcctgaaaacatgaatataaaagatgaggaagctatatttataaccttggtaaaagaaaatgacccagaggcaaacatagatacaatttatgatcgatttgtacatcttgataatttaccggaagatggacttcagtgtgtactttgtgttggacttcagtttggaaaagtggatcaccatgtattcataagtaatagaaacaaggcaattcttcagttagatagtcctgaatctgctcagtcaatgtatagctttctgaaacaaaatccacaaaatattggtgaccatatgttgacctgctcattatctccaaagatagacttaccagaggtgcaaattgagcatgacccagaattagaaaaagaaagccctggcttgaaaaacagtccaattgatgaaagtgaggtgcaaacagcaactgatagtccctctgttaaacctaatgagcttgaagaagaaagtactcccagcattcaaacagaaactttggtacagcaggaagagccttgtgaggaagaagctgaaaaagcaacatgtgattctgactttgctgttgaaactttggagcttgaaactcaaggagaggaggtcaaagaagaaattcctcttgtagcatccgcttcagtcagtattgaacaattcactgaaaatgccgaggagtgtgctttaaatcagcagatgtttaacagtgacttggagaagaaaggggcagaaattattaaccctaaaacagcattgttaccatctgacagtgtgtttgcagaagaaaggaacctcaaaggaattctagaagaatctccatctgaagcagaagatttcatttctggaattacacagactatggtagaagctgtagctgaagtagaaaaaaatgaaactgtttcggaaatattgccatcaacttgtattgtgacgttagtaccaggaattcccactggggatgagaagacagtggacaaaaagaatatttctgaaaaaaaaggtaacatggatgaaaaggaggagaaggaatttaatactaaggaaaccagaatggatcttcaaataggaacagagaaggctgaaaagaatgaaggtaggatggatgcagaaaaggtggaaaagatggcagcaatgaaagaaaagcctgcagaaaacactttattcaaggcatacccaaataaaggagtgggtcaggctaataagcctgatgaaactagtaaaactagtattctggctgtatcagatgtatctagcagtaaaccaagcatcaaggctgttatagtctcttctcctaaggcaaaagctacagtttcaaaaactgaaaatcagaaaagttttccaaaatctgtgcccagagatcaaataaatgctgaaaagaaactttcagccaaggaatttggtctgcttaaacccacaagtgccaggtcaggcttggcagaaagcagcagtaaattcaaacctactcagagcagtcttaccagaggaggcagtggaaggatctcagccctgcaaggcaagctttctaaactggattacagagatataacaaaacaatctcaggaaacagaggctagaccttccatcatgaaacgggatgacagcaacaataagactttggctgagcaaaacactaagaatcctaaaagcactactggtagaagttccaaatctaaagaggagccattatttccatttaatttggatgaatttgttactgtggatgaggttatagaagaagtgaatccttctcaggccaagcagaatccactaaagggaaaaaggaaagaaactctcaaaaatgttcctttctctgaacttaacttaaagaagaaaaaggggaaaacttccactcctcgtggtgttgagggagaactatcttttgtgacattggatgagattggggaagaggaagatgcagctgcacatctagcacaagctctagtcactgtggatgaagtaattgatgaagaagaactaaatatggaagaaatggtaaaaaattcaaattcactttttacattagatgaattaattgaccaagatgattgcatttcccacagtgaacctaaagatgttactgttctgtcagtggctgaagaacaagatctcctcaaacaggaacgcttggtaactgtggatgaaattggagaagtggaagagctacctttgaatgagtcagcagacataacttttgccactttaaatactaaaggaaatgaaggagatactgtaagggattccattggcttcatttcttctcaggtgcccgaagacccttctactttagttactgtagatgaaatacaagatgacagcagtgatttgcatttagtgactttggatgaagtaactgaagaggatgaagactctctggcggattttaacaaccttaaagaagagcttaattttgttactgttgatgaagttggagaggaggaagatggagataatgatttaaaagttgagttagcacaaagcaaaaatgaccatcccacagataaaaaagggaatagaaagaagagagctgtggacacaaaaaagacaaaacttgaatccttgtcccaagtgggtccagtaaatgagaatgttatggaagaagatctaaaaaccatgattgaaagacacttaacagctaaaactccaaccaagagagttagaattgggaaaactctgccatcagaaaaagctgttgtgacagaaccagcaaaaggtgaagaggccttccagatgagtgaagttgatgaggaatctggattaaaggattcagaaccagagcgaaaacgcaagaagactgaagactcttcttcaggcaaatcagtggcgtctgatgtccctgaggaattagactttcttgtacctaaggctggattcttctgtccaatttgttccctcttctactcaggtgaaaaagcaatgacaaatcactgcaagagtacacgtcataagcaaaatactgagaaattcatggccaagcaaagaaaggaaaaggagcagaatgaggctgaagaaagaagctctaggtgattgggggaaaggaaagaattcactagaaatttgtttagggtccagttgatttgtgtatttttgttatcatttaatttgtaattttcgtttcagaagcaaatattcgtgttgtacaaatttctgattgccctaaatgtagagagactgatggggaaagtatgatgggtttgatttttatatcaaatcatcaggcatggagaaatatcttttagaagtgttaaaataaatgttcctactgtatatttaaaatacca

SEQ ID NO: 203288 - DNA, 931 bp, Homo sapiens
  Payload ID: 20089
  Gene Name: zinc finger protein 638
  ENST ID: ENST00000437658
  CDS Start-End: 341-931
gggagcctacgagggctcgcaggagctgggaggcgcgcatgcgtgcagctctttggaggcggtagcgttttcggcgtcgagactggaggctgagtgctaaactgtgtggggcgcggatgggatccagctgttagtcggctttgtgttattcttggaaaatttcgcaccacttgtgaattccttgaacctgggcattgcaaacccacttctgttgggcccatctcctttgcactttgctcagattaagactcagttggcgcttcagcagctgaatgccgttgcctcacatggttcaacaccaccttatactttattaaatcaggctttcttgaaaatagccatgtcgagacccaggtttaatcctcgaggagactttccacttcaaaggccacgagcacctaacccttctgggatgaggcctccaggaccatttatgaggcctggatctatgggtctcccaagattttacccagcagggagagcacgtggaattccacacagatttgctggccatgaatcttatcagaacatggggccacagagaatgaatgttcaggtaactcaacacagaactgatccaagattgaccaaagaaaaactggattttcatgaagcacaacagaagaaggggaagcctcatggtagccggtgggatgatgagcctcatatatctgcatcagtggcagtgaaacagagttctgtaacacaggttacagagcagagtcccaaagtacagagccgctatacaaaagagagtgcctcaagtatcttagcaagttttggattatctaatgaagacctagaagaacttagtcgctatcctgatgaacaactaactcctgaaaatatgccattaattttgagggatataagaatgcgaaaaatggggcgccgattacctaatttaccttctcagagcagaaataaagaa

SEQ ID NO: 203289 - DNA, 760 bp, Homo sapiens
  Payload ID: 20089
  Gene Name: zinc finger protein 638
  ENST ID: ENST00000417778
  CDS Start-End: 673-760
ggaggcggtagcgttttcggcgtcgagactggaggctgagtgctaaactgtgtggggcgcggatgggatccagctgttagtcgggtaggcataggcgaagtttggggccaggaccagaaattgtagtagtttaaaggagtcccgatgaaaaacttgtcaccaggatccagcgatttatgttcaagtactttttccaacgagctctggaattttgcacaaaaaattttctgctttttcccctcatttgttgtaaaggattattttttcagggatgttgtgcttgctggttcagatttacaattaaaaattgataacctggagaaaaggattgaccaaaaaaaggttatttatttcataagatgactatccataaatcttccgatgaacgaacctctttatgaccagagctcctggggttaaaggagaaaggttttataatggctgtcttaatttgtttggtggttttccagctttgtgttattcttggaaaatttcgcaccacttgtgaattccttgaacctgggcattgcaaacccacttctgttgggcccatctcctttgcactttgctcagattaagactcagttggcgcttcagcagctgaatgccgttgcctcacatggttcaacaccaccttatactttattaaatcaggctttcttgaaaatagccatgtcgagacccaggtttaatcctcgaggagactttccacttcaaaggccacgagcacctaacccttctgggatgaggcctccaggac

SEQ ID NO: 203290 - DNA, 595 bp, Homo sapiens
  Payload ID: 20089
  Gene Name: zinc finger protein 638
  ENST ID: ENST00000454278
  CDS Start-End: 409-595
atgcgtgcagctctttggaggcggtagcgttttcggcgtcgagactggaggctgagtgctaaactgtgtggggcgcggatgggatccagctgttagtcgggtaggcatagtgttttgaaatttgtgatggaaaattaaaatggaaggaaaataagtatatagaagatgagaagagaataatggaaaggaaaaagagtgaggaaaagctttgtgttattcttggaaaatttcgcaccacttgtgaattccttgaacctgggcattgcaaacccacttctgttgggcccatctcctttgcactttgctcagattaagactcagttggcgcttcagcagctgaatgccgttgcctcacatggttcaacaccaccttatactttattaaatcaggctttcttgaaaatagccatgtcgagacccaggtttaatcctcgaggagactttccacttcaaaggccacgagcacctaacccttctgggatgaggcctccaggaccatttatgaggcctggatctatgggtctcccaagattttacccagcagggagagcacgtggaattccacacagatttgctggccatgaatcttatcaga

SEQ ID NO: 203291 - DNA, 585 bp, Homo sapiens
  Payload ID: 20089
  Gene Name: zinc finger protein 638
  ENST ID: ENST00000455226
  CDS Start-End: 399-585
atgcgtgcagctctttggaggcggtagcgttttcggcgtcgagactggaggctgagtgctaaactgtgtggggcgcggatgggatccagctgttagtcggtgttttgaaatttgtgatggaaaattaaaatggaaggaaaataagtatatagaagatgagaagagaataatggaaaggaaaaagagtgaggaaaagctttgtgttattcttggaaaatttcgcaccacttgtgaattccttgaacctgggcattgcaaacccacttctgttgggcccatctcctttgcactttgctcagattaagactcagttggcgcttcagcagctgaatgccgttgcctcacatggttcaacaccaccttatactttattaaatcaggctttcttgaaaatagccatgtcgagacccaggtttaatcctcgaggagactttccacttcaaaggccacgagcacctaacccttctgggatgaggcctccaggaccatttatgaggcctggatctatgggtctcccaagattttacccagcagggagagcacgtggaattccacacagatttgctggccatgaatcttatcaga

SEQ ID NO: 203292 - DNA, 731 bp, Homo sapiens
  Payload ID: 20089
  Gene Name: zinc finger protein 638
  ENST ID: ENST00000454122
  CDS Start-End: 623-731
ggaggcggtagcgttttcggcgtcgagactggaggctgagtgctaaactgtgtggggcgcggatgggatccagctgttagtcgggtaggcatagtattacagcgtgaaataaattcccagtatttttcaagattatgtaaaaggagttgtaattactgctcagcacctaggacagcacccagtgcaacacaatgtacatgaactctggcttgaggtttggggcttgtgttctgcattcaggaaagaaaagaagagaaagtttttgggaaatttaaatcttcgtaagcccttactctaaaagtatatgaaatgcagaatggtttcatggctttatttcaaaatgttttacactggctgtagaacccacttcatgaagtagtttgagttaaaatgatctaatatttgtgttttaactttcagctttgtgttattcttggaaaatttcgcaccacttgtgaattccttgaacctgggcattgcaaacccacttctgttgggcccatctcctttgcactttgctcagattaagactcagttggcgcttcagcagctgaatgccgttgcctcacatggttcaacaccaccttatactttattaaatcaggctttcttgaaaatagccatgtcgagacccaggtttaatcctcgaggagactttccacttcaaaggccacgagcacctaacccttctgggatgaggcctccaggaccatttatgaggcctggatcta

SEQ ID NO: 203293 - DNA, 560 bp, Homo sapiens
  Payload ID: 20089
  Gene Name: zinc finger protein 638
  ENST ID: ENST00000466975
  CDS Start-End: 47-560
gtgcaaggcgtgtgaggcgcgtagagagccgcgcgcgccgtctgcgatgccccgggacggcgttcctgccgggaataccaccccggcggcagcccaggctgccgcgcagagcccggattccgcgactgccggggcaccgcaggttttggactcgctgaagcggtatcctgattggaatcctgagatcctcccatcgagaagaaatgagggcaatagaaaagaaaatgaaactccacgaagacgttctcattcccccagtcctaggcgttctagaagatcaagctcaagtcacagattccgtcggtctcgaagcccaatgcattacatgtataggccgagaagtcgaagtccaagaatttgccatcgtttcatttctagatacagatccagatccagatcccgttcaccatatcgaattagaaatccatttagaggtagtccaaaatgctttcgatcagttagccctgagaggatgtcaaggagatcagtgagatcatcagatagaaaaaaagcattagaagatgtagtacaacgatctgggcatgggacagaatttaata

SEQ ID NO: 203294 - DNA, 590 bp, Homo sapiens
  Payload ID: 20089
  Gene Name: zinc finger protein 638
  ENST ID: ENST00000475743
  CDS Start-End: 321-590
gcgcatgcgtgcagctctttggaggcggtagcgttttcggcgtcgagactggaggctgagtgctaaactgtgtggggcgcggatgggatccagctgttagtcgggattggattcagcatcaaaatacatctactcatattgagagctgtcgacagttacgtcaacagtatcctgattggaatcctgagatcctcccatcgagaagaaatgagggcaatagaaaagaaaatgaaactccacgaagacgttctcattcccccagtcctaggcgttctagaagatcaagctcaagtcacagattccgtcggtctcgaagcccaatgcattacatgtataggccgagaagtcgaagtccaagaatttgccatcgtttcatttctagatacagatccagatccagatcccgttcaccatatcgaattagaaatccatttagaggtagtccaaaatgctttcgatcagttagccctgagaggatgtcaaggagatcagtgagatcatcagatagaaaaaaagcattagaagatgtagtacaacgatctgggcatgggacagaatttaataaacagaagcatcttgaagctgctgat

SEQ ID NO: 203295 - DNA, 846 bp, Homo sapiens
  Payload ID: 20089
  Gene Name: zinc finger protein 638
  ENST ID: ENST00000461991
  CDS Start-End: 1-476
aaaaagggaatagaaagaagagagctgtggacacaaaaaagacaaaacttgaatccttgtcccaagtgggtccagtaaatgagaatgttatggaagaagatctaaaaaccatgattgaaagacacttaacagctaaaactccaaccaagagagttagaattgggaaaactctgccatcagaaaaagctgttgtgacagaaccagcaaaaggtgaagaggccttccagatgagtgaagttgatgaggaatctggattaaaggattcagaaccagagcgaaaacgcaagaagactgaagactcttcttcaggcaaatcagtggcgtctgatgtccctgaggaattagactttcttgtacctaaggctggattcttctgtccaatttgttccctcttctactcaggtgaaaaagcaatgacaaatcactgcaagagtacacgtcataagcaaaatactgagcaacatttgccagagtagattctgcagatcactagtctcatatgacactccattattaaaaaattcatggccaagcaaagaaaggaaaaggagcagaatgaggctgaagaaagaagctctaggtgattgggggaaaggaaagaattcactagaaatttgtttagggtccagttgatttgtgtatttttgttatcatttaatttgtaattttcgtttcagaagcaaatattcgtgttgtacaaatttctgattgccctaaatgtagagagactgatggggaaagtatgatgggtttgatttttatatcaaatcatcaggcatggagaaatatcttttagaagtgttaaaataaatgttcctactgtatatttaaaataccatctgtgtt

SEQ ID NO: 203296 - DNA, 626 bp, Homo sapiens
  Payload ID: 20089
  Gene Name: zinc finger protein 638
  ENST ID: ENST00000464375
  CDS Start-End: 333-626
gcgcgcatgcgtgcagctctttggaggcggtagcgttttcggcgtcgagactggaggctgagtgctaaactgtgtggggcgcggatgggatccagctgttagtcgggtaggcataggattggattcagcatcaaaatacatctactcatattgagagctgtcgacagttacgtcaacagtatcctgattggaatcctgagatcctcccatcgagaagaaatgagggcaatagaaaagaaaatgaaactccacgaagacgttctcattcccccagtcctaggcgttctagaagatcaagctcaagtcacagattccgtcggtctcgaagcccaatgcattacatgtataggccgagaagtcgaagtccaagaatttgccatcgtttcatttctagatacagatccagatccagatcccgttcaccatatcgaattagaaatccatttagaggtagtccaaaatgctttcgatcagttagccctgagaggatgtcaaggagatcagtgagatcatcagatagaaaaaaagcattagaagatgtagtacaacgatctgggcatgggacagaatttaataaacagaagcatcttgaagctgctgataagggacattcaccagcacaaaag

SEQ ID NO: 203297 - DNA, 746 bp, Homo sapiens
  Payload ID: 20089
  Gene Name: zinc finger protein 638
  ENST ID: ENST00000466330
  CDS Start-End: 195-746
cgggacggcgttcctgccgggaataccaccccggcggcagcccaggctgccgcgcagagcccggattccgcgactgccggggcaccgcaggttttggactcgctgaagcggattggattcagcatcaaaatacatctactcatattgagagctgtcgacagttacgtcaacatttgtcctctcataattaaaagatgctccagacaatatatctattctcaaagtatcctgattggaatcctgagatcctcccatcgagaagaaatgagggcaatagaaaagaaaatgaaactccacgaagacgttctcattcccccagtcctaggcgttctagaagatcaagctcaagtcacagattccgtcggtctcgaagcccaatgcattacatgtataggccgagaagtcgaagtccaagaatttgccatcgtttcatttctagatacagatccagatccagatcccgttcaccatatcgaattagaaatccatttagaggtagtccaaaatgctttcgatcagttagccctgagaggatgtcaaggagatcagtgagatcatcagatagaaaaaaagcattagaagatgtagtacaacgatctgggcatgggacagaatttaataaacagaagcatcttgaagctgctgataagggacattcaccagcacaaaagcctaaaactagcagtggaacaaaaccatcagttaaacctacaagcgctacaaagagtgattcaaatctaggagga

SEQ ID NO: 203298 - DNA, 3518 bp, Homo sapiens
  Payload ID: 20089
  Gene Name: zinc finger protein 638
  ENST ID: ENST00000410075
  CDS Start-End: 365-3121
gtgcaaggcgtgtgaggcgcgtagagagccgcgcgcgccgtctgcgatgccccgggacggcgttcctgccgggaataccaccccggcggcagcccaggctgccgcgcagagcccggattccgcgactgccggggcaccgcaggttttggactcgctgaagcgctttgtgttattcttggaaaatttcgcaccacttgtgaattccttgaacctgggcattgcaaacccacttctgttgggcccatctcctttgcactttgctcagattaagactcagttggcgcttcagcagctgaatgccgttgcctcacatggttcaacaccaccttatactttattaaatcaggctttcttgaaaatagccatgtcgagacccaggtttaatcctcgaggagactttccacttcaaaggccacgagcacctaacccttctgggatgaggcctccaggaccatttatgaggcctggatctatgggtctcccaagattttacccagcagggagagcacgtggaattccacacagatttgctggccatgaatcttatcagaacatggggccacagagaatgaatgttcaggtaactcaacacagaactgatccaagattgaccaaagaaaaactggattttcatgaagcacaacagaagaaggggaagcctcatggtagccggtgggatgatgagcctcatatatctgcatcagtggcagtgaaacagagttctgtaacacaggttacagagcagagtcccaaagtacagagccgctatacaaaagagagtgcctcaagtatcttagcaagttttggattatctaatgaagacctagaagaacttagtcgctatcctgatgaacaactaactcctgaaaatatgccattaattttgagggatataagaatgcgaaaaatggggcgccgattacctaatttaccttctcagagcagaaataaagaaacacttggtagtgaagcagtttcaagtaatgtgatcgattatgggcatgcaagcaaatatggctacacagaagatccacttgaagtacgtatttatgatcctgaaattccaactgatgaggtcgagaatgaatttcagtcacagcagaacatttctgcatctgttcccaatccaaatgtgatatgtaattctatgtttcctgttgaagacgtatttcgccaaatggacttccccggtgagtcctccaataatcggtcctttttctcagttgagagtggaaccaagatgtcaggcttacacatttcaggaggacagtcagtccttgaacccataaaatccgtcaaccaatccattaaccaaacagttagccagacaatgagtcaatctctgattcctccatctatgaaccagcaacctttttcgtcggaattaatttcatctgtaagccagcaagagcggatcccacatgaacctgtgattaattcatctaacgtacatgttggatcaagaggaagtaaaaagaattaccagtcacaggctgacattcccattcggtctccctttggtattgtgaaagcatcctggctaccaaagttttcacatgctgatgcccagaagatgaagagacttccaactccttctatgatgaatgattattatgcagcatctccaagaatatttccacatttgtgttctctgtgtaacgtagaatgtagtcatttgaaggattggattcagcatcaaaatacatctactcatattgagagctgtcgacagttacgtcaacagtatcctgattggaatcctgagatcctcccatcgagaagaaatgagggcaatagaaaagaaaatgaaactccacgaagacgttctcattcccccagtcctaggcgttctagaagatcaagctcaagtcacagattccgtcggtctcgaagcccaatgcattacatgtataggccgagaagtcgaagtccaagaatttgccatcgtttcatttctagatacagatccagatccagatcccgttcaccatatcgaattagaaatccatttagaggtagtccaaaatgctttcgatcagttagccctgagaggatgtcaaggagatcagtgagatcatcagatagaaaaaaagcattagaagatgtagtacaacgatctgggcatgggacagaatttaataaacagaagcatcttgaagctgctgataagggacattcaccagcacaaaagcctaaaactagcagtggaacaaaaccatcagttaaacctacaagcgctacaaagagtgattcaaatctaggaggacattctattcgttgtaaatcaaagaatcttgaagatgacactttgtcagaatgtaaacaggtgtctgataaagctgtttctctccagcgaaagcttcggaaagaacagtcattgcattatggttcggttcttcttataactgaattaccagaggatggttgtactgaagaagatgtgagaaaattatttcaaccatttgggaaagtgaatgatgtcctaattgttccatatagaaaagaggcttacctagaaatggaatttaaagaggcaattactgcaattatgaagtacattgaaacaacacctcttacgataaaaggaaaaagtgtgaaaatatgtgttccaggaaagaaaaaagcacagaacaaagaggtgaagaaaaagactttagagtcaaagaaagtatctgcatctaccttaaaaagagatgcagatgcttcaaaagctgttgaaattgttacttcaacttctgctgagtcggtggatcagactcagcagctggtgcccctcgtgaggaacactgcaagggatcacgacggaacccccgaaaatgaaggcgaagagactgtgcagtcagccctctttggattccagtacgatgcatcagaccataccatggcgtggctaggacccaacacagtaccagaagtgaaggaaatgatcctgcaggacccgcagctccagacaacacagcttcctcagacgacacaagccccggacattacctgggggatgctgaagaagacaacttacaaggctgagcaaatcctgctccagacacagaaaccattcactccagataatttgttccttgctctgctctctggtgatgcaaagccggaatacgagcagtaatcgctacgcctgacaaacctgctgctgtgcacatctgtactcttcaatcaacaaaacctgatgcaaaaaacaaaagggggagatgtaggagatcagtcagggtggtgggaaaagttataaggagagacgcaaaccttcttggaagtccaggaggttttgcaaagcttcgggagagaataaaggctgaaggcagctaaattctcttaccctgacgctaagggcaagaagtaggtaacaaaggagtgtaaaggaatttatctagacgagttttatttacttttgcagacctttgatcatcctattgcgcgcaggactgctcccaaggcggtgggggtgacaattacctacagattgtgttggctccaggcctttgtcattaaatctgtactgaataaat

SEQ ID NO: 203299 - DNA, 871 bp, Homo sapiens
  Payload ID: 20089
  Gene Name: zinc finger protein 638
  ENST ID: ENST00000494621
  CDS Start-End: 411-871
ggagtcctgcgccttgaggctcaagcggcggcgtgcaaggcgtgtgaggcgcgtagagagccgcgcgcgccgtctgcgatgccccgggacggcgttcctgccgggaataccaccccggcggcagcccaggctgccgcgcagagcccggattccgcgactgccggggcaccgcaggttttggactcgctgaagcggattggattcagcatcaaaatacatctactcatattgagagctgtcgacagttacgtcaacagtatcctgattggaatcctgagatcctcccatcgagaagaaatgagggcaatagaaaagaaaatgaaactccacgaagacgttctcattcccccagtcctaggcgttctagaagatcaagctcaagtcacagattccgtcggtctcgaagcccaatgcattacatgtataggccgagaagtcgaagtccaagaatttgccatcgtttcatttctagatacagatccagatccagatcccgttcaccatatcgaattagaaatccatttagaggtagtccaaaatgctttcgatcagttagccctgagaggatgtcaaggagatcagtgagatcatcagatagaaaaaaagcattagaagatgtagtacaacgatctgggcatgggacagaatttaataaacagaagcatcttgaagctgctgataagggacattcaccagcacaaaagcctaaaactagcagtggaacaaaaccatcagttaaacctacaagcgctacaaagagtgattcaaatctaggaggacattctattcgttgtaaatcaaagaatcttgaagatgacactttgtcagaatgtaaacaggtgtctgataaagctgtttctctccagcgaaa

SEQ ID NO: 203300 - DNA, 1107 bp, Homo sapiens
  Payload ID: 20089
  Gene Name: zinc finger protein 638
  ENST ID: ENST00000493576
  CDS Start-End: 1-856
acctaaagatgttactgttctgtcagtggctgaagaacaagatctcctcaaacaggaacgcttggtaactgtggatgaaattggagaagtggaagagctacctttgaatgagtcagcagacataacttttgccactttaaatactaaaggaaatgaaggagatactgtaagggattccattggcttcatttcttctcaggtgcccgaagacccttctactttagttactgtagatgaaatacaagatgacagcagtgatttgcatttagtgactttggatgaagtaactgaagaggatgaagactctctggcggattttaacaaccttaaagaagagcttaattttgttactgttgatgaagttggagaggaggaagatggagataatgatttaaaagttgagttagcacaaagcaaaaatgaccatcccacagataaaaaagggaatagaaagaagagagctgtggacacaaaaaagacaaaacttgaatccttgtcccaagtgggtccagtaaatgagaatgttatggaagaagatctaaaaaccatgattgaaagacacttaacagttgatgaggaatctggattaaaggattcagaaccagagcgaaaacgcaagaagactgaagactcttcttcaggcaaatcagtggcgtctgatgtccctgaggaattagactttcttgtacctaaggctggattcttctgtccaatttgttccctcttctactcaggtgaaaaagcaatgacaaatcactgcaagagtacacgtcataagcaaaatactgagaaattcatggccaagcaaagaaaggaaaaggagcagaatgaggctgaagaaagaagctctaggtgattgggggaaaggaaagaattcactagaaatttgtttagggtccagttgatttgtgtatttttgttatcatttaatttgtaattttcgtttcagaagcaaatattcgtgttgtacaaatttctgattgccctaaatgtagagagactgatggggaaagtatgatgggtttgatttttatatcaaatcatcaggcatggagaaatatcttttagaagtgttaaaataaatgttcctactgtatatttaaaata

SEQ ID NO: 203301 - DNA, 6064 bp, Homo sapiens
  Payload ID: 20090
  Gene Name: zinc finger protein 639
  Uniprot ID: Q9UID6
  ENST ID: ENST00000326361
  CDS Start-End: 446-1903
caacgagttgtagccgcggagagcaggcgtcgatgctggcgcccaaagcctccagcctgagagtcgcctcactcgtgtgacgacagagtttcactcctgttacccaggctggaggacaatgatgtgatctcgggtcaccacaacctccgcctcccggattcaagcgattctcatgcctcagcctcccgagtagctcagattacaggcatgtgccaccacgcccggctaattttgtattttcagtcgagacggggtttccccatgttggtcaggctagtcttgaattcccgacctcaggtgatctgttcgcctcggcctcccaaagtgctgggattacaggcgtgaaccactgcacccggcgaggcattttttactgtctacagaaacttattgtaattcatttttcctcactccagtagtaagaattataccaaattgaaaagatatgaatgagtatcctaaaaaaagaaaaaggaagactctacacccttctcgttattcagattcctctggaataagcagaattgcagatggattcaatggaattttctctgatcattgttacagtgtctgttctatgagacagccagatttaaaatattttgacaacaaagatgatgattctgataccgagacgtcaaatgacttgccaaaatttgcagatggaatcaaggccagaaacagaaatcagaactacctggttcccagtcctgtacttagaattctagaccacactgccttttctacagaaaaatctgctgatattgtaatttgtgatgaagagtgtgactcacctgaatcagtcaaccagcaaacccaagaggagagtcctatagaagttcacactgctgaagatgttccaattgctgtagaagtgcatgcgatttctgaggattatgatatagagacagaaaacaattcctctgagagtctccaagaccaaactgatgaagaaccgccagctaaactttgtaaaattcttgacaagagccaagctttgaatgtgactgcccagcagaaatggcctttactgagagctaatagcagtggcctctataaatgtgaactttgtgagtttaacagcaaatatttttctgacttaaagcagcatatgatcctgaagcataaacgtactgattcaaatgtgtgtcgagtatgcaaggaaagtttctctaccaatatgcttctgatagaacatgccaaactgcatgaagaggatccctacatttgtaaatactgtgattataagacagtaatttttgagaacctcagccagcacattgcagacacccattttagtgatcacctctattggtgtgaacagtgtgatgtacagttctcctcaagcagtgaactctacctacatttccaggagcacagctgtgatgaacagtacttgtgtcagttctgtgaacatgaaactaatgatccagaagacttgcatagccatgtggtaaatgagcatgcatgtaaattaatagagttaagtgataagtataacaatggtgaacatggacagtatagcctcttaagcaaaattacctttgacaaatgtaaaaacttctttgtatgtcaagtatgtggttttcggagtagacttcacacaaatgttaacaggcatgttgctattgaacatacaaaaatttttcctcatgtttgtgatgactgtgggaaaggcttttcaagtatgctagaatattgcaagcatttaaattcacatttatctgaagggatttatttatgtcaatattgtgaatattcaacaggacaaattgaagatcttaaaattcatctagatttcaagcattcagctgacttgcctcataaatgtagtgactgcttgatgaggtttggaaatgaaagggaattaataagtcaccttccagtccatgagacaacttgattattctctttaacttacagaatgttagtttaaaataataaattcatcctttttttggagatgattaaatggatgattgtaaacacaacttatgaaatctgcctttaacaagtaacttttttaaattataaaattttattggcattgctccattttctgtatataaatatatctttaatgtggtattttcaattgcgtgatagtttgtagtttcaaccactcttggtgactgtcatcctgtttcttccatattctctgatttcatgaattgaaaagaaacaaatgtattgaagaagtgagctacagttttccttccttaaccatgggtgctagtaactttttaaaactcaagacaagattagttttttatgtgtgaagtcattaaattattacacgaccagaactaaaatgcaatatacagttaagtccacggatactcccattaatgagaaataacactaggaagccactattacaggaagaaaagatttggttttcatggcagtctgtttttttaaaaaaaaatttttgagccactatctattgttgaatattttaagatgggatgagggaggaactaataagggcttacacaataaaaaataactatatcataactcattcataacttgatgtttcattttctgttgaggaaccataaattcattcacagacttaatatttttttcttagagatggtctcgttctgttgtccaggatggagtgcagtggttgatcatagctcccgggctgtagtctcccaggctcgagcaatcctcccacttcaccctcctgcatagctaggactacaggcatgtggcaccatgcccgctaagtttttaaatttcttgtagagatgagatctcgctatgttgcccaggccagtctcaaactcctggactcaagcaatcctcccaccttggccttccaaatcactgggattataggcatgagccattatgcctgactcttgcccaaatttctgatgtcaaattgttcattgacagaaaacccactgaagtatttaaagttaggaagatctgggagataggggttgctggcatgaaaatgtataacttacaacatttattaataaaatgataaattagcatcaatattagttcgtatggctgccataacaaattactacaaactgagttgcctacctagcagaaatttatggtctcacagttgtgaaggccagacattcaaaatggagttattggcagttggttccttctgagggttgtgggggaaggatctgtttcaggtctgtccttggcttgtagatggatagcctcatgttcacatggtgttctccctgtgtgcaagtctgtcccccaaatttcctctttttttttttttttttgcttttttaattttttgagacagaatttcactcttgtcgcccaggctggagtacagtggcgcgatctcagctcattgcaacctccgcctcccaggttcaagtgattctgctgcctcagcttcccaagtagctggggttaacaggcgtcagccaccatgccaggctaattttgtatttttagtagaaacggggtttcaccacgttggccaggctggtctcaaattcctgacctcaggtgatccacctgcctcagtctcccaaagtgctgggattacaggcatgaggcaccgccccaggccaaatttcttgtttttataaagactccagtcatattgattggattagggcccctcccaatgtcctccttttaacttaaagacctgatctccaaataaggtcatattctaaggtgctgaggtttaggacttcaacatatgaatttgggagggaacacaattgagtagcagagtctgaaacagcactataaagaagatagaattatatgtatcattgccctcaaatttaacaagcactgctaacattattttttaggtttattgatataagtggaagatcaatttatgaccaatgattttcccacttcaagaatttagtctgtttggacaatggtggctgcaagtattcttagaaggtattatttttatccccactattttgttgtatgtgcatacctgtgttcctagcaactcacattccatctaattataacattcctgttacggctgataacaaatgtttctcagaagacttaaaattgtaacagtttaaattgtaagataaccttagaaagcatctggtctaaaccctccagttttctaagttccttgcagaaatagaaatgtagatagctatgaggccaagtacatataaccagttatgtctcatgggagtgggatccaggttatctggtttactgtctagtgatgtttccattacatcatgttacataaacctaacctttctccctgggatgttttttgtgactacttcacctaacaattaacctagttgttgataattttgtttttatgctttttatacatctagctccaggaattggatttttggaaaaacaccttaagtaatgccttggtttgtttgttttcttttaatctatttgctgctttacatttggatcaagtgttagtaattgaaaagattgcaggctgggcgtggtggcccacgcctctaatcccagcactttgtgggtggctgagatgggcagatcacgaggtcaggagatccagaccatcctggctaacagtgaaaccccgtctctactaaaaatacaaaaaaaaattagctgggcgtggtggtgggcacctgtagtcccagctactcgggaggctgaggcaggagaatggcgtgaacccgggaggtggagcttgcagtgagccgagatcgcgccaccacattccagcctgggtgacagagtgagactgtctcaaaaaaaaaaaagaaaagaagaaaagattgcaatgcagctactcaagagacatatatccaagtttcagaaccatataattttgtacttttttttttttcagacagtcttgctctgttgcccaggctggagtgtagtggcgtgatcttggctcaaggcaacctccacctctcaggtgtaagcaattctcctgccttagcctcccaagtagctgggattataggcgtgtgccaccacacccggctaatttttgtgtttttaatagagacggggtttcaccatgttgaccaggctggtcttgaactcctgacctcttgtgatctgcccacctcgacctcccaaagtgctaggattacaggcgtgagccactgcacccggcataattttggactttttgatgaatctgcagcttcaggacctatcccaatgacagtttgtcccacaaaaccttttcgccttggcccagttttcaaatcaatgattgaccataaattgcttgaagtagttggtctttatttatttattttttgagatggagccttgctctgtcgcccagactggaatgcagtggcgtgatcttggctcgctgcaacctctgcctcccgggtttaagcaattctcctgcctcagcctcccgagtagctgggatacaggtgcccaccaccacacccagctaatttttctatttttagtagagatggggtttcaccatcttggccaggctggtcttgaactcctgaccttgtgatccacccacttcggcctcccaaagtgctgggattacaggcctgagccaccacgcccggccagtctttatttttaacttaaagaacttcagaaaaacaaacctacctaaaaaaattaacactcctggttttgttttgttttttgttttgttttacttcagagacagacattttcactgtatacttgtgacttgcaccacaattcaagtctgagattacctaactgatgatgtttattaacacttcagtagaattcttcgcagcagtgaacagtagtgacaggtcattatgtttttcttgctgttttaaatcttcatcttacaatgagttattttgaaattccaaaacatttccctgtattccagaaattgaaaatggttgttcactaaaaagcctcttcttttcctgcttataaatttgccaattttgccattttaaatcacctttcttacgtttctctgaattgtatattatttgtcaatttcacagtttctataatctattgtttgctgaattgttacagtcttttgtttttaatagactagcactattcctaattattaaatctgatttacaaagca

SEQ ID NO: 203302 - DNA, 564 bp, Homo sapiens
  Payload ID: 20090
  Gene Name: zinc finger protein 639
  ENST ID: ENST00000494234
  CDS Start-End: 175-564
aaataggaaaatgatttttttcttgaaaattatttatattctgatctgtgtgatgagtacttttttctggaagccaggaggccgatacatatttgtgacaatatttttttaaaggaaatgtctccgcctttagcttgaaaactacctaaaaatacttccaatgattgaaaagatatgaatgagtatcctaaaaaaagaaaaaggaagactctacacccttctcgttattcagattcctctggaataagcagaattgcagatggattcaatggaattttctctgatcattgttacagtgtctgttctatgagacagccagatttaaaatattttgacaacaaagatgatgattctgataccgagacgtcaaatgacttgccaaaatttgcagatggaatcaaggccagaaacagaaatcagaactacctggttcccagtcctgtacttagaattctagaccacactgccttttctacagaaaaatctgctgatattgtaatttgtgatgaagagtgtgactcacctgaatcagtcaaccagcaaacccaagaggagagtcctata

SEQ ID NO: 203303 - DNA, 2033 bp, Homo sapiens
  Payload ID: 20090
  Gene Name: zinc finger protein 639
  Uniprot ID: Q9UID6
  ENST ID: ENST00000496856
  CDS Start-End: 384-1841
acctcacctcgtcacctccccgccctctcggcgggcccctgaggtgcgcggcgcaggcgcggagcgtggcggccagggcagtgcggccgcggagcctaggccaggggcctggcgctcagggcgtggggcgcgcggggagggagaggggtcggcccagcacagcgtccgggagcgctagggccggagcagcgctgcccgccgccgtgcgtccgcgggaaggaccgcgcggcccctccgcctgcgctctcggccgccgccgcctctgcgtgggccggccgggagggcctcgggggactgactggcattttttactgtctacagaaacttattgtaattcatttttcctcactccagtagtaagaattataccaaattgaaaagatatgaatgagtatcctaaaaaaagaaaaaggaagactctacacccttctcgttattcagattcctctggaataagcagaattgcagatggattcaatggaattttctctgatcattgttacagtgtctgttctatgagacagccagatttaaaatattttgacaacaaagatgatgattctgataccgagacgtcaaatgacttgccaaaatttgcagatggaatcaaggccagaaacagaaatcagaactacctggttcccagtcctgtacttagaattctagaccacactgccttttctacagaaaaatctgctgatattgtaatttgtgatgaagagtgtgactcacctgaatcagtcaaccagcaaacccaagaggagagtcctatagaagttcacactgctgaagatgttccaattgctgtagaagtgcatgcgatttctgaggattatgatatagagacagaaaacaattcctctgagagtctccaagaccaaactgatgaagaaccgccagctaaactttgtaaaattcttgacaagagccaagctttgaatgtgactgcccagcagaaatggcctttactgagagctaatagcagtggcctctataaatgtgaactttgtgagtttaacagcaaatatttttctgacttaaagcagcatatgatcctgaagcataaacgtactgattcaaatgtgtgtcgagtatgcaaggaaagtttctctaccaatatgcttctgatagaacatgccaaactgcatgaagaggatccctacatttgtaaatactgtgattataagacagtaatttttgagaacctcagccagcacattgcagacacccattttagtgatcacctctattggtgtgaacagtgtgatgtacagttctcctcaagcagtgaactctacctacatttccaggagcacagctgtgatgaacagtacttgtgtcagttctgtgaacatgaaactaatgatccagaagacttgcatagccatgtggtaaatgagcatgcatgtaaattaatagagttaagtgataagtataacaatggtgaacatggacagtatagcctcttaagcaaaattacctttgacaaatgtaaaaacttctttgtatgtcaagtatgtggttttcggagtagacttcacacaaatgttaacaggcatgttgctattgaacatacaaaaatttttcctcatgtttgtgatgactgtgggaaaggcttttcaagtatgctagaatattgcaagcatttaaattcacatttatctgaagggatttatttatgtcaatattgtgaatattcaacaggacaaattgaagatcttaaaattcatctagatttcaagcattcagctgacttgcctcataaatgtagtgactgcttgatgaggtttggaaatgaaagggaattaataagtcaccttccagtccatgagacaacttgattattctctttaacttacagaatgttagtttaaaataataaattcatcctttttttggagatgattaaatggatgattgtaaacacaacttatgaaatctgcctttaacaagtaacttttttaaattataaaattttattggcattgctccattttctgtatataaatatatctttaatgtggtattttcaa

SEQ ID NO: 203304 - DNA, 584 bp, Homo sapiens
  Payload ID: 20090
  Gene Name: zinc finger protein 639
  ENST ID: ENST00000481587
  CDS Start-End: 173-584
gccgcctctgcgtgggccggccgggagggcctcgggggactgactgtgaattgagatggttactcaaggaatgattgtttacattgttaggcattttttactgtctacagaaacttattgtaattcatttttcctcactccagtagtaagaattataccaaattgaaaagatatgaatgagtatcctaaaaaaagaaaaaggaagactctacacccttctcgttattcagattcctctggaataagcagaattgcagatggattcaatggaattttctctgatcattgttacagtgtctgttctatgagacagccagatttaaaatattttgacaacaaagatgatgattctgataccgagacgtcaaatgacttgccaaaatttgcagatggaatcaaggccagaaacagaaatcagaactacctggttcccagtcctgtacttagaattctagaccacactgccttttctacagaaaaatctgctgatattgtaatttgtgatgaagagtgtgactcacctgaatcagtcaaccagcaaacccaagaggagagtcctatagaagttcacactgctgaagatg

SEQ ID NO: 203305 - DNA, 1730 bp, Homo sapiens
  Payload ID: 20090
  Gene Name: zinc finger protein 639
  Uniprot ID: Q9UID6
  ENST ID: ENST00000484866
  CDS Start-End: 83-1540
gcattttttactgtctacagaaacttattgtaattcatttttcctcactccagtagtaagaattataccaaattgaaaagatatgaatgagtatcctaaaaaaagaaaaaggaagactctacacccttctcgttattcagattcctctggaataagcagaattgcagatggattcaatggaattttctctgatcattgttacagtgtctgttctatgagacagccagatttaaaatattttgacaacaaagatgatgattctgataccgagacgtcaaatgacttgccaaaatttgcagatggaatcaaggccagaaacagaaatcagaactacctggttcccagtcctgtacttagaattctagaccacactgccttttctacagaaaaatctgctgatattgtaatttgtgatgaagagtgtgactcacctgaatcagtcaaccagcaaacccaagaggagagtcctatagaagttcacactgctgaagatgttccaattgctgtagaagtgcatgcgatttctgaggattatgatatagagacagaaaacaattcctctgagagtctccaagaccaaactgatgaagaaccgccagctaaactttgtaaaattcttgacaagagccaagctttgaatgtgactgcccagcagaaatggcctttactgagagctaatagcagtggcctctataaatgtgaactttgtgagtttaacagcaaatatttttctgacttaaagcagcatatgatcctgaagcataaacgtactgattcaaatgtgtgtcgagtatgcaaggaaagtttctctaccaatatgcttctgatagaacatgccaaactgcatgaagaggatccctacatttgtaaatactgtgattataagacagtaatttttgagaacctcagccagcacattgcagacacccattttagtgatcacctctattggtgtgaacagtgtgatgtacagttctcctcaagcagtgaactctacctacatttccaggagcacagctgtgatgaacagtacttgtgtcagttctgtgaacatgaaactaatgatccagaagacttgcatagccatgtggtaaatgagcatgcatgtaaattaatagagttaagtgataagtataacaatggtgaacatggacagtatagcctcttaagcaaaattacctttgacaaatgtaaaaacttctttgtatgtcaagtatgtggttttcggagtagacttcacacaaatgttaacaggcatgttgctattgaacatacaaaaatttttcctcatgtttgtgatgactgtgggaaaggcttttcaagtatgctagaatattgcaagcatttaaattcacatttatctgaagggatttatttatgtcaatattgtgaatattcaacaggacaaattgaagatcttaaaattcatctagatttcaagcattcagctgacttgcctcataaatgtagtgactgcttgatgaggtttggaaatgaaagggaattaataagtcaccttccagtccatgagacaacttgattattctctttaacttacagaatgttagtttaaaataataaattcatcctttttttggagatgattaaatggatgattgtaaacacaacttatgaaatctgcctttaacaagtaacttttttaaattataaaattttattggcattgctccattttctgtatataaatatatctttaatgtggtattttc

SEQ ID NO: 203306 - DNA, 1228 bp, Homo sapiens
  Payload ID: 20090
  Gene Name: zinc finger protein 639
  ENST ID: ENST00000491818
  CDS Start-End: 580-1228
gccgcggagcctaggccaggggcctggcgctcagggcgtggggcgcgcggggagggagaggggtcggcccagcacagcgtccgggagcgctagggccggagcagcgctgcccgccgccgtgcgtccgcgggaaggaccgcgcggcccctccgcctgcgctctcggccgccgccgcctctgcgtgggccggccgggagggcctcgggggactgactgacagagtttcactcctgttacccaggctggaggacaatgatgtgatctcgggtcaccacaacctccgcctcccggattcaagcgattctcatgcctcagcctcccgagtagctcagattacaggcatgtgccaccacgcccggctaattttgtattttcagtcgagacggggtttccccatgttggtcaggctagtcttgaattcccgacctcaggtgatctgttcgcctcggcctcccaaagtgctgggattacaggcgtgaaccactgcacccggcgaggcattttttactgtctacagaaacttattgtaattcatttttcctcactccagtagtaagaattataccaaattgaaaagatatgaatgagtatcctaaaaaaagaaaaaggaagactctacacccttctcgttattcagattcctctggaataagcagaattgcagatggattcaatggaattttctctgatcattgttacagtgtctgttctatgagacagccagatttaaaatattttgacaacaaagatgatgattctgataccgagacgtcaaatgacttgccaaaatttgcagatggaatcaaggccagaaacagaaatcagaactacctggttcccagtcctgtacttagaattctagaccacactgccttttctacagaaaaatctgctgatattgtaatttgtgatgaagagtgtgactcacctgaatcagtcaaccagcaaacccaagaggagagtcctatagaagttcacactgctgaagatgttccaattgctgtagaagtgcatgcgatttctgaggattatgatatagagacagaaaacaattcctctgagagtctccaagaccaaactgatgaagaaccgccagctaaactttgtaaaattcttgacaagagccaagctttgaatgtgactgcccagcagaaatggcctttactgagagctaatagcagtggcctctataaatgtgaactttgtgagtttaacagcaaatattttt

SEQ ID NO: 203307 - DNA, 1117 bp, Homo sapiens
  Payload ID: 20090
  Gene Name: zinc finger protein 639
  ENST ID: ENST00000466264
  CDS Start-End: 253-1117
ctcagattacaggcatgtgccaccacgcccggctaattttgtattttcagtcgagacggggtttccccatgttggtcaggctagtcttgaattcccgacctcaggtgatctgttcgcctcggcctcccaaagtgctgggattacaggcgtgaaccactgcacccggcgaggcattttttactgtctacagaaacttattgtaattcatttttcctcactccagtagtaagaattataccaaattgaaaagatatgaatgagtatcctaaaaaaagaaaaaggaagactctacacccttctcgttattcagattcctctggaataagcagaattgcagatggattcaatggaattttctctgatcattgttacagtgtctgttctatgagacagccagatttaaaatattttgacaacaaagatgatgattctgataccgagacgtcaaatgacttgccaaaatttgcagatggaatcaaggccagaaacagaaatcagaactacctggttcccagtcctgtacttagaattctagaccacactgccttttctacagaaaaatctgctgatattgtaatttgtgatgaagagtgtgactcacctgaatcagtcaaccagcaaacccaagaggagagtcctatagaagttcacactgctgaagatgttccaattgctgtagaagtgcatgcgatttctgaggattatgatatagagacagaaaacaattcctctgagagtctccaagaccaaactgatgaagaaccgccagctaaactttgtaaaattcttgacaagagccaagctttgaatgtgactgcccagcagaaatggcctttactgagagctaatagcagtggcctctataaatgtgaactttgtgagtttaacagcaaatatttttctgacttaaagcagcatatgatcctgaagcataaacgtactgattcaaatgtgtgtcgagtatgcaaggaaagtttctctaccaatatgcttctgatagaacatgccaaactgcatgaagaggatccctacatttgtaaatactgtgattataagacagtaatttttgagaacctcagccagcacattgcagacacccattttagtgatcacctct

SEQ ID NO: 203308 - DNA, 1458 bp, Homo sapiens
  Payload ID: 20090
  Gene Name: zinc finger protein 639
  Uniprot ID: Q9UID6
  ENST ID: ENST00000621687
  CDS Start-End: 1-1458
atgaatgagtatcctaaaaaaagaaaaaggaagactctacacccttctcgttattcagattcctctggaataagcagaattgcagatggattcaatggaattttctctgatcattgttacagtgtctgttctatgagacagccagatttaaaatattttgacaacaaagatgatgattctgataccgagacgtcaaatgacttgccaaaatttgcagatggaatcaaggccagaaacagaaatcagaactacctggttcccagtcctgtacttagaattctagaccacactgccttttctacagaaaaatctgctgatattgtaatttgtgatgaagagtgtgactcacctgaatcagtcaaccagcaaacccaagaggagagtcctatagaagttcacactgctgaagatgttccaattgctgtagaagtgcatgcgatttctgaggattatgatatagagacagaaaacaattcctctgagagtctccaagaccaaactgatgaagaaccgccagctaaactttgtaaaattcttgacaagagccaagctttgaatgtgactgcccagcagaaatggcctttactgagagctaatagcagtggcctctataaatgtgaactttgtgagtttaacagcaaatatttttctgacttaaagcagcatatgatcctgaagcataaacgtactgattcaaatgtgtgtcgagtatgcaaggaaagtttctctaccaatatgcttctgatagaacatgccaaactgcatgaagaggatccctacatttgtaaatactgtgattataagacagtaatttttgagaacctcagccagcacattgcagacacccattttagtgatcacctctattggtgtgaacagtgtgatgtacagttctcctcaagcagtgaactctacctacatttccaggagcacagctgtgatgaacagtacttgtgtcagttctgtgaacatgaaactaatgatccagaagacttgcatagccatgtggtaaatgagcatgcatgtaaattaatagagttaagtgataagtataacaatggtgaacatggacagtatagcctcttaagcaaaattacctttgacaaatgtaaaaacttctttgtatgtcaagtatgtggttttcggagtagacttcacacaaatgttaacaggcatgttgctattgaacatacaaaaatttttcctcatgtttgtgatgactgtgggaaaggcttttcaagtatgctagaatattgcaagcatttaaattcacatttatctgaagggatttatttatgtcaatattgtgaatattcaacaggacaaattgaagatcttaaaattcatctagatttcaagcattcagctgacttgcctcataaatgtagtgactgcttgatgaggtttggaaatgaaagggaattaataagtcaccttccagtccatgagacaacttga

SEQ ID NO: 203309 - DNA, 4544 bp, Homo sapiens
  Payload ID: 20091
  Gene Name: zinc finger protein 641
  Uniprot ID: Q96N77
  ENST ID: ENST00000301042
  CDS Start-End: 263-1579
gctggctccgccggccgccggctcccagacgcaagcggagggcggaggggaggggcaggcggcgcccgggagggaggcaccgggccgcgggccaagcctaccgggggtcccttgctacccatatgtgtgaagaaaagggggaaatgaaagccctagaacccacactgcagtgggcatgggatcatcctggaaccaggagaaacgaggttagggctaccaccttaaccgcccaggtgctggctctgcgtgaatatcttaggaaatgcaagctgaggacaggtcacaatttgggtctgcagcagaaatgctttcagaacagacagcagcgctggggacaggatgggaatcaatgaatgtacagctggatggagcagagccccaggtggaaaggggaagccaggaagagcggccatggagaacagtaccaggacctctggagcacctgtgctgtgaccttgaagaggagccacagtcccttcaggagaaggctcagtctgctccctgggttcctgcaattccccaggaggggaacactggagactgggagatggcagctgcacttcttgcggctggatcacagggcctggtaaccatcaaggatgtgtcactgtgcttctctcaggaggagtggcggagcctggacccctctcagacagacttttatggagaatatgtcatgcaggaaaactgtgggatagtagtctctctgagatttccaattcccaaactggacatgctttctcaactagaaggaggagaagaacaatgggtccctgacccccaggacttagaggagagggacattctgagggtcacatatacaggagatggaagtgaacatgagggggatacccctgaactagaagcagaacctcccagaatgttatccagcgtgtctgaagatactgttctctggaacccggagcatgatgagagctgggattccatgcccagcagctccagaggaatgctcctggggcccccttttcttcaggaagatagtttctcaaacctgctgtgtagcacagagatggattccctgttaagaccccacacatgcccccagtgtgggaaacagtttgtatggggttcccaccttgccaggcatcaacaaacacacactggggagagaccctacagctgcctcaagtgtgagaagacctttgggcgaagacatcacctcatcaggcaccagaaaacccacctacatgacaagaccagcaggtgctctgagtgtggtaagaatttccgatgcaactcccatctggccagccaccagagagtgcatgcagaaggcaaatcctgcaaaggccaagaggttggagagagccctggcacaaggaaacggcagcgtgccccaccagtgccaaagtgtcacgtgtgcactgaatgtgggaagagctttggccgaaggcaccaccttgtgagacactggctgacccacactggggagaagcccttccagtgccctcgctgtgagaagagctttggccgaaaacatcacctggacaggcacctgctcacccaccagggacaaagtccccggaacagctgggacagaggaacatctgtcttttgaaatctgtttccactacagctatggtcaagtctatcagccggtgctaccaggagtcactgccagggctgccgttctcctgaaccccagtggccagaatcataagccctgaccccatccctagaaagatgaggtcccagcaatggccagagcatttctcaccagttctgtgagatagcacataaaaatagagttctttgggcaaaacttttgggaagcaatgcatcctacatgggctgatattcagcctgagctgttctcaagaggagagtggtactggcagtttatggctgaaatccattctgattggttggagtctatgctataccagttgttaaacattttgagtatcactcttgcatactgttactattatattttctctatatatagacagaaaggccattttagaatattaaaggctctgaaaatttctgcagtagacccaactgaaggttctattaaggcagtgtttcctaaatgtatttgacctcagtatcctttctatttacatcccacagaactggtgactatgaaacactctggtgaacactgggttagagagtaacaaggaaacaagagatagtgatcaggcatccagagcccccttttttatccatatgaaagccaggggggccagaccttgttcatgtgtgggtctgtcttccttatgccaatcagcagtatatacatcacctctcaccctcacctgctgaaaaaataacctttttacccattattcctactcccttcatcctgcacatacatatatccagctgagagatcacactacaaggctaagagatgatctaatacccccaaatagccctggcccacacagaaaaacagaaaaacaaaaaaaactttatccccttgaacagtcccctctctcctcttgactgtctttatgtgtctgtgtatttgtgtgcagggtctttgaagacagcatgctatgtgcaaactgtacaagctaggttttctaggggctgtgttctggggatgagggtagtggggattatatggggttttttctttgtttcaagacaggaagcagtctggttaagggagaactagtggaaagggttaaatgacaggttaagttgagtacaaagctttcccagtactgctgagattaagacaattgtggatgtgtatgtctaggtttgaatctctgggctgcagattgcttttgccctggcagagaaagaggagtctttggggaggtgagctgtttcttgttgatttcaggcaagaggcacatagaaactttgtattgagtggggattttgttttaagtgctggaaaattagggcaggaattacgtgtttgcaagttgttgccatcactggtttgaatttgactgcctcatcaaggggcaagagttattcttgaagatctcattctcccagaaacagaactttagggaaaatggctgtggcttagcttttcagctgctgcagggtaataagctttctggttggttttccttccaattctggaaaggtgtccacactaagacccttaactctagggcttgcataagtattctagcatcgttagctaatgagttggtcattgtttctctttatcaataattgtgttaataccaatcttataatttaaaaattatcttgtatgtaagagcagttcggggttagggaggaagaggagcaaagtgggatattttctctttaatgcttagatactgtttcttccctaagatgtgtttctcaaccacaattggtggaatgaaccagagaggcaagaggaagtgaattgcaccaatttagtttagcgactgtgccttttgcaggaaaaactgggtgaatcacagctcctcagagtcctggactcaactagaattgaagatagacttattttgctgactgggcttcttagagtttatgtgacttgaacagcttggcccctgcctcccttctgctactgtgagcagccttccttcttccttcattcttcctggaatgcagttctcttgcttatgatcctatgaataaggcaaaatggctggtctttgtaaggcaggtcttgccctagcttctcagaaacaggagcattttaggatcagtattaggagatgccccagggagtaagaaagtattgggttcagtgataaatctggactctgacatttcttttactctccctctttaatactaaaagctctgcataagcaatggttcagaacctgtcttgggtacagacctgttgaatctgacagaaaccagaaacgcacttttgagaaaaagacatttgtaattcactcagttttccatacacatttagcaggttcaaagcccatctgtggaatccctaaactgccttcaaagaaagggagttccccgatctaaaatggtcattatatatttgtgtcaagaattagaaggcaagggtcactaaatattttaaggattaaggtaccagaggcatcagtggtataaggatggagtctggtctttaattacgacaagggtattgcttacattctactctctggttttcaaaaagatctgacatgctgacaaatccagctcctcacaaatcttgtttgaaggacttgtgggaagtgatattccttactattagatcacgccccttataactacatgttaacatccagccttttatctgtttgagtaattgtagggatagaaagtgaagcccccagagttaggtgcaagtatagcacccagctgaaaggcatcatggagtctaagggccttctacagaaggggcaatcctttgggttatttctggtgtaccactgtcttctctacctcggtccaacaccacctctcttggacaaaaaataaaacaagcaacagccatcagatgagtgaatagatttgaatgatttttcccacagggaatcagcctcaaatgttcatgtttcaccccgtcccctttaaataaaaagaatctctgtgttctctttgggcaaaatgtaaaa

SEQ ID NO: 203310 - DNA, 1856 bp, Homo sapiens
  Payload ID: 20091
  Gene Name: zinc finger protein 641
  Uniprot ID: Q96N77
  ENST ID: ENST00000448928
  CDS Start-End: 57-1304
gtgggaggcccagtagccagagcggaaaatggtcacaatttgggtctgcagcagaaatgctttcagaacagacagcagcgctggggacaggatgggaatcaatgaatgtacagctggatggagcagagccccaggtggaaaggggaagccaggaagagcggccatggagaacagtaccaggacctctggagcacctgtgctgtgaccttgaagaggagccacagtcccttcaggagaaggctcagtctgctccctgggttcctgcaattccccaggaggggaacactggagactgggagatggcagctgcacttcttgcggctggatcacaggtgagctctgcttcccttggcgtctcctgtggtcccatcactgctgcctttgtattgctttcgcatcagcccattgatgagttggctcacatgatcatcaatggatttccaattcccaaactggacatgctttctcaactagaaggaggagaagaacaatgggtccctgacccccaggacttagaggagagggacattctgagggtcacatatacaggagatggaagtgaacatgagggggatacccctgaactagaagcagaacctcccagaatgttatccagcgtgtctgaagatactgttctctggaacccggagcatgatgagagctgggattccatgcccagcagctccagaggaatgctcctggggcccccttttcttcaggaagatagtttctcaaacctgctgtgtagcacagagatggattccctgttaagaccccacacatgcccccagtgtgggaaacagtttgtatggggttcccaccttgccaggcatcaacaaacacacactggggagagaccctacagctgcctcaagtgtgagaagacctttgggcgaagacatcacctcatcaggcaccagaaaacccacctacatgacaagaccagcaggtgctctgagtgtggtaagaatttccgatgcaactcccatctggccagccaccagagagtgcatgcagaaggcaaatcctgcaaaggccaagaggttggagagagccctggcacaaggaaacggcagcgtgccccaccagtgccaaagtgtcacgtgtgcactgaatgtgggaagagctttggccgaaggcaccaccttgtgagacactggctgacccacactggggagaagcccttccagtgccctcgctgtgagaagagctttggccgaaaacatcacctggacaggcacctgctcacccaccagggacaaagtccccggaacagctgggacagaggaacatctgtcttttgaaatctgtttccactacagctatggtcaagtctatcagccggtgctaccaggagtcactgccagggctgccgttctcctgaaccccagtggccagaatcataagccctgaccccatccctagaaagatgaggtcccagcaatggccagagcatttctcaccagttctgtgagatagcacataaaaatagagttctttgggcaaaacttttgggaagcaatgcatcctacatgggctgatattcagcctgagctgttctcaagaggagagtggtactggcagtttatggctgaaatccattctgattggttggagtctatgctataccagttgttaaacattttgagtatcactcttgcatactgttactattatattttctctatatatagacagaaaggccattttagaatattaaaggctctgaaaatttctgcagtagacccaactgaaggttctattaaggcagtgtttcctaaatgtatttgacctcagtatcctttctatttacatcccacagaactggtgactatgaaacactctggtgaacactg

SEQ ID NO: 203311 - DNA, 7819 bp, Homo sapiens
  Payload ID: 20091
  Gene Name: zinc finger protein 641
  Uniprot ID: Q96N77
  ENST ID: ENST00000544117
  CDS Start-End: 710-2026
gccggagggagctgcggctggagggagggacgcctggcttcccggggcggctggtgggggctcggtcacccataggggctgggaggaggatcggcgcgtcttccgggttgctgcctttcccgggggtctgccccgctgacattctgtgcccgcctctcgccctgtctccccgtgcccatcgcaactgtcaggccctgcgggctcccgccgctgtcactcgcgcacaggttaccccgtggctccctttctcttcacttgctcatgccccagctcatgggaaacctgttttctgacctcacttcccctgctccagttctgccttgctcggattctctgaaatctgaccctttccaggggcactgtgacaagaagaagggaagaagcaaccttacccctgagcaggctcccgtcccgcccatgccctacccgtggcaggggccagggttctctgatggacggagccaactcgtccgtgtgcccttgggctactcatttttataacatggccccttttctgttcatcagcactggctgcagaaacttccttttgcaggtcccttgctacccatatgtgtgaagaaaagggggaaatgaaagccctagaacccacactgcagtgggcatgggatcatcctggaaccaggagaaacgaggttagggctaccaccttaaccgcccaggtgctggctctgcgtgaatatcttaggaaatgcaagctgaggacaggtcacaatttgggtctgcagcagaaatgctttcagaacagacagcagcgctggggacaggatgggaatcaatgaatgtacagctggatggagcagagccccaggtggaaaggggaagccaggaagagcggccatggagaacagtaccaggacctctggagcacctgtgctgtgaccttgaagaggagccacagtcccttcaggagaaggctcagtctgctccctgggttcctgcaattccccaggaggggaacactggagactgggagatggcagctgcacttcttgcggctggatcacagggcctggtaaccatcaaggatgtgtcactgtgcttctctcaggaggagtggcggagcctggacccctctcagacagacttttatggagaatatgtcatgcaggaaaactgtgggatagtagtctctctgagatttccaattcccaaactggacatgctttctcaactagaaggaggagaagaacaatgggtccctgacccccaggacttagaggagagggacattctgagggtcacatatacaggagatggaagtgaacatgagggggatacccctgaactagaagcagaacctcccagaatgttatccagcgtgtctgaagatactgttctctggaacccggagcatgatgagagctgggattccatgcccagcagctccagaggaatgctcctggggcccccttttcttcaggaagatagtttctcaaacctgctgtgtagcacagagatggattccctgttaagaccccacacatgcccccagtgtgggaaacagtttgtatggggttcccaccttgccaggcatcaacaaacacacactggggagagaccctacagctgcctcaagtgtgagaagacctttgggcgaagacatcacctcatcaggcaccagaaaacccacctacatgacaagaccagcaggtgctctgagtgtggtaagaatttccgatgcaactcccatctggccagccaccagagagtgcatgcagaaggcaaatcctgcaaaggccaagaggttggagagagccctggcacaaggaaacggcagcgtgccccaccagtgccaaagtgtcacgtgtgcactgaatgtgggaagagctttggccgaaggcaccaccttgtgagacactggctgacccacactggggagaagcccttccagtgccctcgctgtgagaagagctttggccgaaaacatcacctggacaggcacctgctcacccaccagggacaaagtccccggaacagctgggacagaggaacatctgtcttttgaaatctgtttccactacagctatggtcaagtctatcagccggtgctaccaggagtcactgccagggctgccgttctcctgaaccccagtggccagaatcataagccctgaccccatccctagaaagatgaggtcccagcaatggccagagcatttctcaccagttctgtgagatagcacataaaaatagagttctttgggcaaaacttttgggaagcaatgcatcctacatgggctgatattcagcctgagctgttctcaagaggagagtggtactggcagtttatggctgaaatccattctgattggttggagtctatgctataccagttgttaaacattttgagtatcactcttgcatactgttactattatattttctctatatatagacagaaaggccattttagaatattaaaggctctgaaaatttctgcagtagacccaactgaaggttctattaaggcagtgtttcctaaatgtatttgacctcagtatcctttctatttacatcccacagaactggtgactatgaaacactctggtgaacactgggttagagagtaacaaggaaacaagagatagtgatcaggcatccagagcccccttttttatccatatgaaagccaggggggccagaccttgttcatgtgtgggtctgtcttccttatgccaatcagcagtatatacatcacctctcaccctcacctgctgaaaaaataacctttttacccattattcctactcccttcatcctgcacatacatatatccagctgagagatcacactacaaggctaagagatgatctaatacccccaaatagccctggcccacacagaaaaacagaaaaacaaaaaaaactttatccccttgaacagtcccctctctcctcttgactgtctttatgtgtctgtgtatttgtgtgcagggtctttgaagacagcatgctatgtgcaaactgtacaagctaggttttctaggggctgtgttctggggatgagggtagtggggattatatggggttttttctttgtttcaagacaggaagcagtctggttaagggagaactagtggaaagggttaaatgacaggttaagttgagtacaaagctttcccagtactgctgagattaagacaattgtggatgtgtatgtctaggtttgaatctctgggctgcagattgcttttgccctggcagagaaagaggagtctttggggaggtgagctgtttcttgttgatttcaggcaagaggcacatagaaactttgtattgagtggggattttgttttaagtgctggaaaattagggcaggaattacgtgtttgcaagttgttgccatcactggtttgaatttgactgcctcatcaaggggcaagagttattcttgaagatctcattctcccagaaacagaactttagggaaaatggctgtggcttagcttttcagctgctgcagggtaataagctttctggttggttttccttccaattctggaaaggtgtccacactaagacccttaactctagggcttgcataagtattctagcatcgttagctaatgagttggtcattgtttctctttatcaataattgtgttaataccaatcttataatttaaaaattatcttgtatgtaagagcagttcggggttagggaggaagaggagcaaagtgggatattttctctttaatgcttagatactgtttcttccctaagatgtgtttctcaaccacaattggtggaatgaaccagagaggcaagaggaagtgaattgcaccaatttagtttagcgactgtgccttttgcaggaaaaactgggtgaatcacagctcctcagagtcctggactcaactagaattgaagatagacttattttgctgactgggcttcttagagtttatgtgacttgaacagcttggcccctgcctcccttctgctactgtgagcagccttccttcttccttcattcttcctggaatgcagttctcttgcttatgatcctatgaataaggcaaaatggctggtctttgtaaggcaggtcttgccctagcttctcagaaacaggagcattttaggatcagtattaggagatgccccagggagtaagaaagtattgggttcagtgataaatctggactctgacatttcttttactctccctctttaatactaaaagctctgcataagcaatggttcagaacctgtcttgggtacagacctgttgaatctgacagaaaccagaaacgcacttttgagaaaaagacatttgtaattcactcagttttccatacacatttagcaggttcaaagcccatctgtggaatccctaaactgccttcaaagaaagggagttccccgatctaaaatggtcattatatatttgtgtcaagaattagaaggcaagggtcactaaatattttaaggattaaggtaccagaggcatcagtggtataaggatggagtctggtctttaattacgacaagggtattgcttacattctactctctggttttcaaaaagatctgacatgctgacaaatccagctcctcacaaatcttgtttgaaggacttgtgggaagtgatattccttactattagatcacgccccttataactacatgttaacatccagccttttatctgtttgagtaattgtagggatagaaagtgaagcccccagagttaggtgcaagtatagcacccagctgaaaggcatcatggagtctaagggccttctacagaaggggcaatcctttgggttatttctggtgtaccactgtcttctctacctcggtccaacaccacctctcttggacaaaaaataaaacaagcaacagccatcagatgagtgaatagatttgaatgatttttcccacagggaatcagcctcaaatgttcatgtttcaccccgtcccctttaaataaaaagaatctctgtgttctctttgggcaaaatgtaaaacagggatatcatcttcaggaacctgtcacatttttccatctggtacctccaccctattctgagtatcctcccctttccaccccaacatagtatctttcaaagaatcccttgcataggagactgtaaccgaaagtgttagcttttcaccaggctatttacactttacgccttagttctaattgtggaaggaaaaacttttcccttgtcaaagtaatgttatggcttcagagaaccaaagaggtgataatttgggacaaaattcctccctttccaacattcctgcaatcaaatcactgtttcctatttccatcaagggcaggtcctgactcagacctacaaaggccagaaggccagttctttccatctctgaattaggatgcatgcactgaatgggagtgggtggggctgggcaatatcagaaaagtgaaatccattcctttagatccttagagagcctgagctagcaaaattttcctcttttcccttgtgagccataccaaactgtggctctcaaaatttggtctttgggccagcagcataaatatcacctggaaacttgtttgaaatgcaaattcttagcccccgccccaggagaactactgaatcagaaactcgggaaggagctcaacgttcagtcttttaactaaatgccctcctggatgtgtgatacaagctaaagtttgagaaccactggctaggggattcatatttcaagcagtggtacctcacccttttcggatggatcttcacactcctgttgtcaggtttattctctgtagcctcactaggctagacctcagttccattccccttagttgcaaggtcttcttccactcttaactcagtaaaagaactggggctagtcaccaatatcagaaactatggtggggcaactaccaagctcctgtgattcattggggctggggcttccaatatgggcactgaggatacttgggtccagaaatctgaaaggacagaaaggaataaacaactcaaaggtggaaaatccaatgtaaaactgaaaaactgacatccgaggaaatgattctcctttgccttgtccttttcactggctcttctaataagaggcaggtggagtgggcatctagcacaaaggtagagtaaggcctaccatgccaagcccttaagaacccaagttttccaacataaaaattggattagagaccaacgaggggccatggaagggatttctaaccatgatttggcataccctatgggcaagggcagcaggaacatcagagtccccagggcataagagagaactaggtttttctagtaagatttgacacaagcaagatttaaatccagactctgcttactaggtagaggttgtaaccaatgaagccatggtgcccaaaatgcattctgctgcttagaagattctgacagattcaggctgtggggaggaatctgccttgcagtctctgaccctgctacctcctccagttcctctcccaggcgcacctatgaggacagactgaactgacagttataaatctgcccacaggtcttctccaaggtcaaaagattagaccccaaggctgagactttcttcaactccaggcctcatgctgtctccctctttcctgccaccacctcctttttcccaacaggcagcattcttcctctacaatttgttcatactctttttcagatttttttgtttgtttgagttttgctttgttctgactgagcaataacatgcccttccaagggcatttgttctctccaacccccattccttcttccattctagtttatctcttcaagcttctggccaattctattccatcatgagtccacttactacctattcctctgcctactgtccagtttcttttctatcagctttaagcctactaagcaggggtcaattcatacttaccactctcatcctccaaattcttggcttggctatagcagttcatcagccacctcaccactctgcccctttctcatacacactcccacaggacaccaccactactccaccccctgcctagtactgccaaatctggcccctctactccattccctagaggttcttcttccaatcaggtaacttccaaagttgttttccacttttcaccatttttaatttacttccttccagtctcctgtgactcctgagaatcaaactctctctttttttttttttgagatggagtcttgctctgtcacccaggctggagtgcagtgacgcgatctcggctcactgcaagctccgcctcccaggtttacgccattttcttgcctcagcctcccgagtagctgggactacaagcgcccaccaccacgcctatttttttttttttttttgtattttttttagtagagacggggtttcacggtgttagccaggatggtctcaatctcttgacctcgtgatccacccaccttggcctcccaaagtgctgggattacaggcctgagccaccgcgcccagcccaaactctcaattctacaagcaattttttgtgtccttattatgtgccaggcactggcaatttcaggcctgggagatcaaatgtgacccttgctcctgctctcagtgtgttcttcagccaagccctcccccaccaccactttcctgccttgtctcttgccaccaggcacctgggcatcctcttccaggaaactttggggatgaatgcccacttgccatgcagcccaactgctccgtgcctatcagatttctagctattatctgaattggttccttctgatgaactgtgaacttccttgggttacccaacaggggacttatggtccctgtcagttgaataaaagatgtattggctgtgtca

SEQ ID NO: 203312 - DNA, 556 bp, Homo sapiens
  Payload ID: 20091
  Gene Name: zinc finger protein 641
  ENST ID: ENST00000550342
  CDS Start-End: 326-556
ggggcactgtgacaagaagaagggaagaagcaaccttacccctgagcaggctcccgtcccgcccatgccctacccgtggcaggggccagggttctctgatggacggagccaactcgtccgtgtgcccttgggctactcatttttataacatggccccttttctgttcatcagcactggctgcagaaacttccttttgcaggtcccttgctacccatatgtgtgaagaaaagggggaaatgaaagccctagaacccacactgcagtgggcatgggatcatcctggaaccaggagaaacgaggtcacaatttgggtctgcagcagaaatgctttcagaacagacagcagcgctggggacaggatgggaatcaatgaatgtacagctggatggagcagagccccaggtggaaaggggaagccaggaagagcggccatggagaacagtaccaggacctctggagcacctgtgctgtgaccttgaagaggagccacagtcccttcaggagaaggctcagtctgctccctgggttcctgcaattccccaggaggggaacact

SEQ ID NO: 203313 - DNA, 555 bp, Homo sapiens
  Payload ID: 20091
  Gene Name: zinc finger protein 641
  ENST ID: ENST00000550181
  CDS Start-End: 233-555
aagtgactcctcctcagtgctctctcaagccctttatcctatcgtgaaaactagagggtacgctccttgaggaattccagactgttgtctggagaaatcgctctcggcctcggtctggcctgtaacgggcggttacgcaattccaggtaattgacgaaccctgaggacagaactccgtgggaggcccagtagccagagcggaaaatggtcacaatttgggtctgcagcagaaatgctttcagaacagacagcagcgctggggacaggatgggaatcaatgaatgtacagctggatggagcagagccccaggtggaaaggggaagccaggaagagcggccatggagaacagtaccaggacctctggagcacctgtgctgtgaccttgaagaggagccacagtcccttcaggagaaggctcagtctgctccctgggttcctgcaattccccaggaggggaacactggagactgggagatggcagctgcacttcttgcggctggatcacagggcctggtaaccatcaaggatgtgtcactgtgcttctctcaggagga

SEQ ID NO: 203314 - DNA, 315 bp, Homo sapiens
  Payload ID: 20091
  Gene Name: zinc finger protein 641
  ENST ID: ENST00000546874
  CDS Start-End: 1-154
ctgtgggatagtagtctctctgagatttccaattcccaaactggacatgctttctcaactagaaggaggagaagaacaatgggtccctgacccccaggacttagaggagagggacattctgagggtcacatatacaggtaagaacctagaataggctttcagccacttccttcacagttcgggacatcatcattccatgttcgtttaatccctcctctgcctcagagagttccagagacaaaaggtttagagatttttttcttcaaaagcaagggagtgtaatagaatgatgtagcaggcactttgtggatttga

SEQ ID NO: 203315 - DNA, 290 bp, Homo sapiens
  Payload ID: 20091
  Gene Name: zinc finger protein 641
  ENST ID: ENST00000549125
  CDS Start-End: 45-290
cgggccaagcctaccgggggtcacaatttgggtctgcagcagaaatgctttcagaacagacagcagcgctggggacaggatgggaatcaatgaatgtacagctggatggagcagagccccaggtggaaaggggaagccaggaagagcggccatggagaacagtaccaggacctctggagcacctgtgctgtgaccttgaagaggagccacagtcccttcaggagaagggatttccaattcccaaactggacatgctttctcaactagaaggaggagaagaacaatgggtc

SEQ ID NO: 203316 - DNA, 575 bp, Homo sapiens
  Payload ID: 20091
  Gene Name: zinc finger protein 641
  ENST ID: ENST00000548932
  CDS Start-End: 166-575
ctaccgggggtcccttgctacccatatgtgtgaagaaaagggggaaatgaaagccctagaacccacactgcagtgggcatgggatcatcctggaaccaggagaaacgaggttagggctaccaccttaaccgcccaggtgctggctctgcgtgaatatcttaggaaatgcaagctgaggacaggtcacaatttgggtctgcagcagaaatgctttcagaacagacagcagcgctggggacaggatgggaatcaatgaatgtacagctggatggagcagagccccaggtggaaaggggaagccaggaagagcggccatggagaacagtaccaggacctctggagcacctgtgctgtgaccttgaagaggagccacagtcccttcaggagaaggctcagtctgctccctgggttcctgcaattccccaggaggggaacactggagactgggagatggcagctgcacttcttgcggctggatcacagggcctggtaaccatcaaggatgtgtcactgtgcttctctcaggaggagtggcggagcctggacccctctcagacagacttttatggagaata

SEQ ID NO: 203317 - DNA, 1823 bp, Homo sapiens
  Payload ID: 20091
  Gene Name: zinc finger protein 641
  Uniprot ID: Q96N77
  ENST ID: ENST00000547026
  CDS Start-End: 132-1406
gctggctccgccggccgccggctcccagacgcaagcggagggcggaggggaggggcaggcggcgcccgggagggaggcaccgggccgcgggccaagcctaccgggggtcacaatttgggtctgcagcagaaatgctttcagaacagacagcagcgctggggacaggatgggaatcaatgaatgtacagctggatggagcagagccccaggtggaaaggggaagccaggaagagcggccatggagaacagtaccaggacctctggagcacctgtgctgtgaccttgaagaggagccacagtcccttcaggagaaggctcagtctgctccctgggttcctgcaattccccaggaggggaacactggagactgggagatggcagctgcacttcttgcggctggatcacagggcctggtaaccatcaaggatgtgtcactgtgcttctctcaggaggagtggcggagcctggacccctctcagacagacttttatggagaatatgtcatgcaggaaaactgtgggatagtagtctctctgagatttccaattcccaaactggacatgctttctcaactagaaggaggagaagaacaatgggtccctgacccccaggacttagaggagagggacattctgagggtcacatatacaggagatggaagtgaacatgagggggatacccctgaactagaagcagaacctcccagaatgttatccagcgtgtctgaagatactgttctctggaacccggagcatgatgagagctgggattccatgcccagcagctccagaggaatgctcctggggcccccttttcttcaggaagatagtttctcaaacctgctgtgtagcacagagatggattccctgttaagaccccacacatgcccccagtgtgggaaacagtttgtatggggttcccaccttgccaggcatcaacaaacacacactggggagagaccctacagctgcctcaagtgtgagaagacctttgggcgaagacatcacctcatcaggcaccagaaaacccacctacatgacaagaccagcaggtgctctgagtgtggtaagaatttccgatgcaactcccatctggccagccaccagagagtgcatgcagaaggcaaatcctgcaaaggccaagaggttggagagagccctggcacaaggaaacggcagcgtgccccaccagtgccaaagtgtcacgtgtgcactgaatgtgggaagagctttggccgaaggcaccaccttgtgagacactggctgacccacactggggagaagcccttccagtgccctcgctgtgagaagagctttggccgaaaacatcacctggacaggcacctgctcacccaccagggacaaagtccccggaacagctgggacagaggaacatctgtcttttgaaatctgtttccactacagctatggtcaagtctatcagccggtgctaccaggagtcactgccagggctgccgttctcctgaaccccagtggccagaatcataagccctgaccccatccctagaaagatgaggtcccagcaatggccagagcatttctcaccagttctgtgagatagcacataaaaatagagttctttgggcaaaacttttgggaagcaatgcatcctacatgggctgatattcagcctgagctgttctcaagaggagagtggtactggcagtttatggctgaaatccattctgattggttggagtctatgctataccagttgttaaacattttgagtatcactcttgcatactgttactattatattttctctatatatagacagaaaggccattttagaatattaaa

SEQ ID NO: 203318 - DNA, 5763 bp, Homo sapiens
  Payload ID: 20092
  Gene Name: zinc finger protein 644
  Uniprot ID: Q9H582
  ENST ID: ENST00000337393
  CDS Start-End: 284-4267
gtttccgctgccctcgtttgtctaattggcccagacgctccaccagcgcgaagcttcccgggagctcctcgctggccacccccgcggcccgcagcccggcagaggcgggaaagcagcgcgcctgcgccgtgggaaccggggctggaggcgaaaagcggggagcggaggggggccgctggagccgagtagcgtacagagcggcgtgtgacgcggggacgccgcgtgctcccaacgtcgccccggtttgacgcacacggcaccaaactgtttgatttaattttggatgagatcgttcttgcagcaagatgttaataagacaaaatctagactaaatgtgttaaatgggcttgccaacaatatggatgatttgaagataaacaccgatattactggtgctaaagaagaactcctagatgacaacaattttatctcagacaaagagagcggagttcataagccaaaagattgtcaaacatcatttcagaaaaataatacgttgactctgcctgaagaactgtcaaaggacaaatctgaaaacgccttaagtggaggccagtctagtctatttatacatgctggtgctcctactgtttctagtgaaaactttatcttgcctaaaggagctgctgttaatggaccagtttcacactcctccttaactaagacttccaatatgaataaaggcagtgtttcattaaccactggacagcctgtggatcagccaacaacagaatcttgttcaactttgaaggtagcagctgatcttcagctgtctacaccacagaaagcaagtcaacaccaagttttatttttgttatcagatgtagcacatgctaagaatcccacccattccaataaaaaactacctacctctgcttcagttggttgtgacattcagaattcagtagggagtaatataaagtcagatggcactttaataaatcaagtagaggtgggtgaggatggtgaagatttattggtgaaagatgattgtgtcaatacagtaacgggaatttcctcaggtacagatggatttaggtcagaaaatgatacaaactgggatccccaaaaagagttcattcaatttcttatgactaatgaggaaacagtagataaagctccacctcattctaaaataggtctagaaaaaaaaagaaagcgaaaaatggatgtaagcaagataactcgttataccgaggattgctttagtgattctaattgtgtacccaataaatcaaaaatgcaagaagtagactttctagaacaaaatgaagagctacaagcagtagactcacagaaatatgcattatcaaaagtgaagcctgaatcaactgatgaagacttagaatctgtggatgccttccaacatctaatttataacccagataagtgtggagaagagagttcacctgttcatactagcacttttctttcaaataccttaaaaaagaaatgtgaagagagtgattctgagtcacctgctactttcagtaccgaagagccatcattctacccctgtacaaagtgcaatgtgaattttagggagaagaagcacctccacaggcatatgatgtatcatttagatgggaatagtcactttcgccatcttaatgtcccaaggccatatgcttgtagagaatgtggacggacatttcgagatcgcaattcacttctaaaacatatgattattcaccaggagagaagacagaagttgatggaggaaattcgtgaattgaaagaacttcaggatgaaggaagaagtgcacgattacagtgtcctcagtgtgtgtttggtaccaattgccctaaaacatttgtgcaacatgctaaaacccatgaaaaagataaaaggtactactgctgtgaagagtgtaacttcatggcagtgacagaaaatgaattggaatgccatcgaggcattgcacatggggcagtggtaaaatgccctatggtcacttctgatattgcccagagaaaaacacaaaaaaagactttcatgaaagactctgtagtaggatcatccaaaaaatcagctacctacatatgtaagatgtgtccttttactacttcagccaaaagtgttttaaaaaagcacacggagtacttgcattcatcatcatgtgttgattcatttggtagtcctcttggacttgataaaagaaaaaatgacatccttgaagaacctgtagatagtgatagcactaaaacattaactaaacaacagtcaaccacatttccaaagaactctgctttaaaacaagatgtgaagcgaacatttggatcaacctcacaatcaagtagtttttcaaaaattcataagcggccacacagaatacagaaagctcggaaaagcattgcccaatcaggtgtaaacatgtgcaatcaaaacagctctcctcataagaatgttacaattaaaagcagcgttgaccaaaaacctaagtatttccatcaagcagcaaaagaaaagtctaatgccaaggcaaatagccactatttgtatagacacaaatatgaaaactataggatgatcaaaaaatcaggtgaatcatatcctgtgcatttcaaaaaagaagaagctagttcattaaattctttacacctgttttcatcatcaagtaattctcacaacaattttatttcagaccctcataagcctgacgccaaaaggcctgaaagcttcaaagatcacagacgtgtagctgtaaagagagtaattaaggaatctaagaaggaaagttctgttggaggggaagacttggatagctatccagattttttgcataaaatgactgttgtcgttttgcaaaaacttaattctgctgaaaagaaagatagttatgaaacagaagatgaaagttcctgggataatgttgagttaggagactacactacacaggccatagaagatgaaacctatagtgatattaatcaagagcatgtaaatttattccctttatttaagagcaaagtggaaggtcaggagcctggagaaaatgctactcttagttatgaccaaaacgatggcttttattttgaatactatgaagatactggaagtaacaactttttgcatgagatacatgatcctcagcatttagaaactgcagatgcttcattgtcaaagcatagttctgtttttcattggactgatttgtctcttgagaagaaatcgtgtccttactgcccagcaacatttgaaacaggtgttgggttatcaaatcatgtcagggggcatcttcacagagcaggattaagctatgaagcccgtcatgttgtatcaccagaacaaatagccacaagtgacaaaatgcagcatttcaaaagaactggcacaggaacacctgttaaacgagttagaaaagctatagagaagtctgaaaccacttctgaacacacttgtcagctctgtggtggttggtttgatactaaaattggattatcaaatcatgttagaggccacttgaaaagacttggaaagacgaaatgggatgctcacaaatctccaatctgtgttctgaatgagatgatgcaaaatgaagaaaaatatgaaaaaatcttaaaggcattgaacagtcgtcgtattattcccagaccatttgtagctcaaaaacttgcatcaagtgatgactttatatctcaaaatgttatacctcttgaagcataccgtaatggcctaaagactgaagctctgtcagtgtctgcatcagaagaagaagggctgaatttcttaaatgaatatgatgaaacaaaaccagaactgcccagtgggaaaaagaatcagtctcttacactcatagaacttcttaaaaataaaaggatgggagaagaaaggaattctgctatttctcctcaaaagatccataatcagacagcaagaaagagattcgttcagaaatgcgttcttccattaaatgaggatagtccgttgatgtatcagccacaaaaaatggacttgactatgcactcagccttagattgtaagcaaaagaaatcaaggtcaagatctggaagcaagaagaaaatgctaacattacctcatggtgctgacgaggtttacattctccgatgcaggttttgtggcctagtctttcgaggacccttgtctgttcaggaagactggattaagcacttacaacgacatattgtaaacgctaatcttccacggactggagctggcatggtggaagtcacgtcactacttaaaaagcctgcctccattacagaaacttcattttctctactaatggccgaagcagcttcatagaaccaggaaaccttttaaatagccagtttgaattggatgtaaatttgaaattctttttttttaagccacattaaattatctgtttataaatactaaagcaggaaaatggggggaaagtgaattacagtgacatcagagcaaattgaatacttaaaacagtaagtagtctatatattttatatagggtggaagatgtgtttttaaggtttatgaagttttgttggttaactgtgttcactcagtaaaagagcagtacatgtaagcagccattaataaactgttgcacatggatacttatagacagacttattggacaattatgttttttgcagtgttaccagaatcaaggctctgtttattccccacaagacttgcatagaaaaataagatattatattttgtttgtatgtatttagtgttttgtataataccaagaaccgctgactaaatttactcaaattagggcattaaatatcatgtacttcatagtttgagactgttcactcaaatagggcagagtactattctatctagatgtgtaagtgttttttttaaaatcacatggaacggttttttttatactaaaaagtggagggagatttgtttaaacaagtatttctaaaagaaatatgtacatagttctggaaattatttgtggtaaggaaatattctttactccagttgcatttctcagacaataaagtggtgcatccatgctacctcctactttgtcaacaaagatgctatttaccctttacatttttgtatcataatagattttaaaaatctaatgttctttattgcaagacattcttttgttaacaggtttgtttctttttaatgttttacctaaaatttgacatgcttacaggacaggtttgcctcttactttatttaacattgtagaaatgtaattaataaacaatgctcactacacagtttagaatagacgttctcatttatattatcttccaaatttgatcagttagcaaaacttaatacaccaattaaaatatttctacatatgagaatgtttacaatttaaattttagaacttgttttggatgtgattatatgtacgaaaatcgtgtaacactatgctcatgctaagaaccgacataacagaattactgaaataaatgtgctgtgaggaatggaaaatatggtgcaggtgtcttggtcatgataaattgtgattctttttaaaaattttttccaaaaacaattaggtattttaatctgaaatcagattcctttacaaacaacaagtttttgtatgcaagcaccattttatttcatgtagtatggctaatactatagttgaaccaaggatatgcattgattctttgcttcgtatgtaaataaagttaaaaacagttaaaataaggagtattttggtagagtatatacatacctcactgccagtgaaattgctttcctatggtatatctccttaccagaaaaatctctaaataaaaaaaggtttaaagaaaatt

SEQ ID NO: 203319 - DNA, 2036 bp, Homo sapiens
  Payload ID: 20092
  Gene Name: zinc finger protein 644
  Uniprot ID: Q9H582
  ENST ID: ENST00000347275
  CDS Start-End: 225-542
cggggcgggccgagagcagtcaccaacccctctcgttgaggctgctcggttgtggccagaaacgctggctctggcattaactgtctacacccctccccttacttgggacaggaccgcatagccctcccctccccccgtcctgcaagatcttatgcggctaggtgcctgggaagtaacagcaagaggtttgatttaattttggatgagatcgttcttgcagcaagatgttaataagacaaaatctagccttagattgtaagcaaaagaaatcaaggtcaagatctggaagcaagaagaaaatgctaacattacctcatggtgctgacgaggtttacattctccgatgcaggttttgtggcctagtctttcgaggacccttgtctgttcaggaagactggattaagcacttacaacgacatattgtaaacgctaatcttccacggactggagctggcatggtggaagtcacgtcactacttaaaaagcctgcctccattacagaaacttcattttctctactaatggccgaagcagcttcatagaaccaggaaaccttttaaatagccagtttgaattggatgtaaatttgaaattctttttttttaagccacattaaattatctgtttataaatactaaagcaggaaaatggggggaaagtgaattacagtgacatcagagcaaattgaatacttaaaacagtaagtagtctatatattttatatagggtggaagatgtgtttttaaggtttatgaagttttgttggttaactgtgttcactcagtaaaagagcagtacatgtaagcagccattaataaactgttgcacatggatacttatagacagacttattggacaattatgttttttgcagtgttaccagaatcaaggctctgtttattccccacaagacttgcatagaaaaataagatattatattttgtttgtatgtatttagtgttttgtataataccaagaaccgctgactaaatttactcaaattagggcattaaatatcatgtacttcatagtttgagactgttcactcaaatagggcagagtactattctatctagatgtgtaagtgttttttttaaaatcacatggaacggttttttttatactaaaaagtggagggagatttgtttaaacaagtatttctaaaagaaatatgtacatagttctggaaattatttgtggtaaggaaatattctttactccagttgcatttctcagacaataaagtggtgcatccatgctacctcctactttgtcaacaaagatgctatttaccctttacatttttgtatcataatagattttaaaaatctaatgttctttattgcaagacattcttttgttaacaggtttgtttctttttaatgttttacctaaaatttgacatgcttacaggacaggtttgcctcttactttatttaacattgtagaaatgtaattaataaacaatgctcactacacagtttagaatagacgttctcatttatattatcttccaaatttgatcagttagcaaaacttaatacaccaattaaaatatttctacatatgagaatgtttacaatttaaattttagaacttgttttggatgtgattatatgtacgaaaatcgtgtaacactatgctcatgctaagaaccgacataacagaattactgaaataaatgtgctgtgaggaatggaaaatatggtgcaggtgtcttggtcatgataaattgtgattctttttaaaaattttttccaaaaacaattaggtattttaatctgaaatcagattcctttacaaacaacaagtttttgtatgcaagcaccattttatttcatgtagtatggctaatactatagttgaaccaaggatatgcattgattctttgcttcgtatgtaaataaagttaaaaacagttaaaataaggagtattttggtagagtatatacatacctcactgccagtgaaattgctttcctatggtatatctccttaccagaaaaatctctaaataaaaaaaggtttaaagaaaa

SEQ ID NO: 203320 - DNA, 1253 bp, Homo sapiens
  Payload ID: 20092
  Gene Name: zinc finger protein 644
  Uniprot ID: Q9H582
  ENST ID: ENST00000361321
  CDS Start-End: 323-640
gagaacagtggtgcactgtttccgctgccctcgtttgtctaattggcccagacgctccaccagcgcgaagcttcccgggagctcctcgctggccacccccgcggcccgcagcccggcagaggcgggaaagcagcgcgcctgcgccgtgggaaccggggctggaggcgaaaagcggggagcggaggggggccgctggagccgagtagcgtacagagcggcgtgtgacgcggggacgccgcgtgctcccaacgtcgccccggtttgacgcacacggcaccaaactgtttgatttaattttggatgagatcgttcttgcagcaagatgttaataagacaaaatctagccttagattgtaagcaaaagaaatcaaggtcaagatctggaagcaagaagaaaatgctaacattacctcatggtgctgacgaggtttacattctccgatgcaggttttgtggcctagtctttcgaggacccttgtctgttcaggaagactggattaagcacttacaacgacatattgtaaacgctaatcttccacggactggagctggcatggtggaagtcacgtcactacttaaaaagcctgcctccattacagaaacttcattttctctactaatggccgaagcagcttcatagaaccaggaaaccttttaaatagccagtttgaattggatgtaaatttgaaattctttttttttaagccacattaaattatctgtttataaatactaaagcaggaaaatggggggaaagtgaattacagtgacatcagagcaaattgaatacttaaaacagtaagtagtctatatattttatatagggtggaagatgtgtttttaaggtttatgaagttttgttggttaactgtgttcactcagtaaaagagcagtacatgtaagcagccattaataaactgttgcacatggatacttatagacagacttattggacaattatgttttttgcagtgttaccagaatcaaggctctgtttattccccacaagacttgcatagaaaaataagatattatattttgtttgtatgtatttagtgttttgtataataccaagaaccgctgactaaatttactcaaattagggcattaaatatcatgtacttcatagtttgagactgttcactcaaatagggcagagtactattctatctagatgtgtaagtgttttttttaaaatcacatggaacggttttttttatactaaaaagtggagggagatttgtttaaacaag

SEQ ID NO: 203321 - DNA, 5702 bp, Homo sapiens
  Payload ID: 20092
  Gene Name: zinc finger protein 644
  Uniprot ID: Q9H582
  ENST ID: ENST00000370440
  CDS Start-End: 219-4202
gcaatgcactgagtaacggggcgggccgagagcagtcaccaacccctctcgttgaggctgctcggttgtggccagaaacgctggctctggcattaactgtctacacccctccccttacttgggacaggaccgcatagccctcccctccccccgtcctgcaagatcttatgcggctaggtgcctgggaagtaacagcaagaggtttgatttaattttggatgagatcgttcttgcagcaagatgttaataagacaaaatctagactaaatgtgttaaatgggcttgccaacaatatggatgatttgaagataaacaccgatattactggtgctaaagaagaactcctagatgacaacaattttatctcagacaaagagagcggagttcataagccaaaagattgtcaaacatcatttcagaaaaataatacgttgactctgcctgaagaactgtcaaaggacaaatctgaaaacgccttaagtggaggccagtctagtctatttatacatgctggtgctcctactgtttctagtgaaaactttatcttgcctaaaggagctgctgttaatggaccagtttcacactcctccttaactaagacttccaatatgaataaaggcagtgtttcattaaccactggacagcctgtggatcagccaacaacagaatcttgttcaactttgaaggtagcagctgatcttcagctgtctacaccacagaaagcaagtcaacaccaagttttatttttgttatcagatgtagcacatgctaagaatcccacccattccaataaaaaactacctacctctgcttcagttggttgtgacattcagaattcagtagggagtaatataaagtcagatggcactttaataaatcaagtagaggtgggtgaggatggtgaagatttattggtgaaagatgattgtgtcaatacagtaacgggaatttcctcaggtacagatggatttaggtcagaaaatgatacaaactgggatccccaaaaagagttcattcaatttcttatgactaatgaggaaacagtagataaagctccacctcattctaaaataggtctagaaaaaaaaagaaagcgaaaaatggatgtaagcaagataactcgttataccgaggattgctttagtgattctaattgtgtacccaataaatcaaaaatgcaagaagtagactttctagaacaaaatgaagagctacaagcagtagactcacagaaatatgcattatcaaaagtgaagcctgaatcaactgatgaagacttagaatctgtggatgccttccaacatctaatttataacccagataagtgtggagaagagagttcacctgttcatactagcacttttctttcaaataccttaaaaaagaaatgtgaagagagtgattctgagtcacctgctactttcagtaccgaagagccatcattctacccctgtacaaagtgcaatgtgaattttagggagaagaagcacctccacaggcatatgatgtatcatttagatgggaatagtcactttcgccatcttaatgtcccaaggccatatgcttgtagagaatgtggacggacatttcgagatcgcaattcacttctaaaacatatgattattcaccaggagagaagacagaagttgatggaggaaattcgtgaattgaaagaacttcaggatgaaggaagaagtgcacgattacagtgtcctcagtgtgtgtttggtaccaattgccctaaaacatttgtgcaacatgctaaaacccatgaaaaagataaaaggtactactgctgtgaagagtgtaacttcatggcagtgacagaaaatgaattggaatgccatcgaggcattgcacatggggcagtggtaaaatgccctatggtcacttctgatattgcccagagaaaaacacaaaaaaagactttcatgaaagactctgtagtaggatcatccaaaaaatcagctacctacatatgtaagatgtgtccttttactacttcagccaaaagtgttttaaaaaagcacacggagtacttgcattcatcatcatgtgttgattcatttggtagtcctcttggacttgataaaagaaaaaatgacatccttgaagaacctgtagatagtgatagcactaaaacattaactaaacaacagtcaaccacatttccaaagaactctgctttaaaacaagatgtgaagcgaacatttggatcaacctcacaatcaagtagtttttcaaaaattcataagcggccacacagaatacagaaagctcggaaaagcattgcccaatcaggtgtaaacatgtgcaatcaaaacagctctcctcataagaatgttacaattaaaagcagcgttgaccaaaaacctaagtatttccatcaagcagcaaaagaaaagtctaatgccaaggcaaatagccactatttgtatagacacaaatatgaaaactataggatgatcaaaaaatcaggtgaatcatatcctgtgcatttcaaaaaagaagaagctagttcattaaattctttacacctgttttcatcatcaagtaattctcacaacaattttatttcagaccctcataagcctgacgccaaaaggcctgaaagcttcaaagatcacagacgtgtagctgtaaagagagtaattaaggaatctaagaaggaaagttctgttggaggggaagacttggatagctatccagattttttgcataaaatgactgttgtcgttttgcaaaaacttaattctgctgaaaagaaagatagttatgaaacagaagatgaaagttcctgggataatgttgagttaggagactacactacacaggccatagaagatgaaacctatagtgatattaatcaagagcatgtaaatttattccctttatttaagagcaaagtggaaggtcaggagcctggagaaaatgctactcttagttatgaccaaaacgatggcttttattttgaatactatgaagatactggaagtaacaactttttgcatgagatacatgatcctcagcatttagaaactgcagatgcttcattgtcaaagcatagttctgtttttcattggactgatttgtctcttgagaagaaatcgtgtccttactgcccagcaacatttgaaacaggtgttgggttatcaaatcatgtcagggggcatcttcacagagcaggattaagctatgaagcccgtcatgttgtatcaccagaacaaatagccacaagtgacaaaatgcagcatttcaaaagaactggcacaggaacacctgttaaacgagttagaaaagctatagagaagtctgaaaccacttctgaacacacttgtcagctctgtggtggttggtttgatactaaaattggattatcaaatcatgttagaggccacttgaaaagacttggaaagacgaaatgggatgctcacaaatctccaatctgtgttctgaatgagatgatgcaaaatgaagaaaaatatgaaaaaatcttaaaggcattgaacagtcgtcgtattattcccagaccatttgtagctcaaaaacttgcatcaagtgatgactttatatctcaaaatgttatacctcttgaagcataccgtaatggcctaaagactgaagctctgtcagtgtctgcatcagaagaagaagggctgaatttcttaaatgaatatgatgaaacaaaaccagaactgcccagtgggaaaaagaatcagtctcttacactcatagaacttcttaaaaataaaaggatgggagaagaaaggaattctgctatttctcctcaaaagatccataatcagacagcaagaaagagattcgttcagaaatgcgttcttccattaaatgaggatagtccgttgatgtatcagccacaaaaaatggacttgactatgcactcagccttagattgtaagcaaaagaaatcaaggtcaagatctggaagcaagaagaaaatgctaacattacctcatggtgctgacgaggtttacattctccgatgcaggttttgtggcctagtctttcgaggacccttgtctgttcaggaagactggattaagcacttacaacgacatattgtaaacgctaatcttccacggactggagctggcatggtggaagtcacgtcactacttaaaaagcctgcctccattacagaaacttcattttctctactaatggccgaagcagcttcatagaaccaggaaaccttttaaatagccagtttgaattggatgtaaatttgaaattctttttttttaagccacattaaattatctgtttataaatactaaagcaggaaaatggggggaaagtgaattacagtgacatcagagcaaattgaatacttaaaacagtaagtagtctatatattttatatagggtggaagatgtgtttttaaggtttatgaagttttgttggttaactgtgttcactcagtaaaagagcagtacatgtaagcagccattaataaactgttgcacatggatacttatagacagacttattggacaattatgttttttgcagtgttaccagaatcaaggctctgtttattccccacaagacttgcatagaaaaataagatattatattttgtttgtatgtatttagtgttttgtataataccaagaaccgctgactaaatttactcaaattagggcattaaatatcatgtacttcatagtttgagactgttcactcaaatagggcagagtactattctatctagatgtgtaagtgttttttttaaaatcacatggaacggttttttttatactaaaaagtggagggagatttgtttaaacaagtatttctaaaagaaatatgtacatagttctggaaattatttgtggtaaggaaatattctttactccagttgcatttctcagacaataaagtggtgcatccatgctacctcctactttgtcaacaaagatgctatttaccctttacatttttgtatcataatagattttaaaaatctaatgttctttattgcaagacattcttttgttaacaggtttgtttctttttaatgttttacctaaaatttgacatgcttacaggacaggtttgcctcttactttatttaacattgtagaaatgtaattaataaacaatgctcactacacagtttagaatagacgttctcatttatattatcttccaaatttgatcagttagcaaaacttaatacaccaattaaaatatttctacatatgagaatgtttacaatttaaattttagaacttgttttggatgtgattatatgtacgaaaatcgtgtaacactatgctcatgctaagaaccgacataacagaattactgaaataaatgtgctgtgaggaatggaaaatatggtgcaggtgtcttggtcatgataaattgtgattctttttaaaaattttttccaaaaacaattaggtattttaatctgaaatcagattcctttacaaacaacaagtttttgtatgcaagcaccattttatttcatgtagtatggctaatactatagttgaaccaaggatatgcattgattctttgcttcgtatgtaaataaagttaaaaacagttaaaataaggagtattttggtagagtatatacatacctcactgccagtgaaattgctttcctatggtatatctccttaccagaaaaatctctaaataaaaaaaggtttaaagaaaattaaaa

SEQ ID NO: 203322 - DNA, 2056 bp, Homo sapiens
  Payload ID: 20092
  Gene Name: zinc finger protein 644
  ENST ID: ENST00000621077
  CDS Start-End: 52-2004
tgtacaaagtgcaatgtgaattttagggagaagaagcacctccacaggcatatgatgtatcatttagatgggaatagtcactttcgccatcttaatgtcccaaggccatatgcttgtagagaatgtggacggacatttcgagatcgcaattcacttctaaaacatatgattattcaccaggagagaagacagaagttgatggaggaaattcgtgaattgaaagaacttcaggatgaaggaagaagtgcacgattacagtgtcctcagtgtgtgtttggtaccaattgccctaaaacatttgtgcaacatgctaaaacccatgaaaaagataaaaggtactactgctgtgaagagtgtaacttcatggcagtgacagaaaatgaattggaatgccatcgaggcattgcacatggggcagtggtaaaatgccctatggtcacttctgatattgcccagagaaaaacacaaaaaaagactttcatgaaagactctgtagtaggatcatccaaaaaatcagctacctacatatgtaagatgtgtccttttactacttcagccaaaagtgttttaaaaaagcacacggagtacttgcattcatcatcatgtgttgattcatttggtagtcctcttggacttgataaaagaaaaaatgacatccttgaagaacctgtagatagtgatagcactaaaacattaactaaacaacagtcaaccacatttccaaagaactctgctttaaaacaagatgtgaagcgaacatttggatcaacctcacaatcaagtagtttttcaaaaattcataagcggccacacagaatacagaaagctcggaaaagcattgcccaatcaggtgtaaacatgtgcaatcaaaacagctctcctcataagaatgttacaattaaaagcagcgttgaccaaaaacctaagtatttccatcaagcagcaaaagaaaagtctaatgccaaggcaaatagccactatttgtatagacacaaatatgaaaactataggatgatcaaaaaatcaggtgaatcatatcctgtgcatttcaaaaaagaagaagctagttcattaaattctttacacctgttttcatcatcaagtaattctcacaacaattttatttcagaccctcataagcctgacgccaaaaggcctgaaagcttcaaagatcacagacgtgtagctgtaaagagagtaattaaggaatctaagaaggaaagttctgttggaggggaagacttggatagctatccagattttttgcataaaatgactgttgtcgttttgcaaaaacttaattctgctgaaaagaaagatagttatgaaacagaagatgaaagttcctgggataatgttgagttaggagactacactacacaggccatagaagatgaaacctatagtgatattaatcaagagcatgtaaatttattccctttatttaagagcaaagtggaaggtcaggagcctggagaaaatgctactcttagttatgaccaaaacgatggcttttattttgaatactatgaagatactggaagtaacaactttttgcatgagatacatgatcctcagcatttagaaactgcagatgcttcattgtcaaagcatagttctgtttttcattggactgatttgtctcttgagaagaaatcgtgtccttactgcccagcaacatttgaaacaggtgttgggttatcaaatcatgtcagggggcatcttcacagagcaggattaagctatgaagcccgtcatgttgtatcaccagaacaaatagccacaagtgacaaaatgcagcatttcaaaagaactggcacaggaacacctgttaaacgagttagaaaagctatagagaagtctgaaaccacttctgaacacacttgtcagctctgtggtggttggtttgatactaaaattggattatcaaatcatgttagaggccacttgaaaagacttggaaagacgaaatgggatgctcacaaatctccaatctgtgtttgaatgagatgatgcaaaatgaagaaaaatatgaaaaaatcttaaaggcattgaa

SEQ ID NO: 203323 - DNA, 1519 bp, Homo sapiens
  Payload ID: 20093
  Gene Name: zinc finger protein 645
  Uniprot ID: Q8N7E2
  ENST ID: ENST00000323684
  CDS Start-End: 50-1327
tttttgaggaagtagacaaacctaaatatgtgtctgaactccaaggaatatgaacaagatgcctgctggtgaacaagaatgtgaatataacaaagaagggaagtactactctaaaggagttaaactggtgagaaaaaagaaaaaaattcctggttaccgttggggggacattaagataaacatcataggtgaaaaggatgatttaccaattcatttctgtgacaaatgtgatttgcctattaaaatctatgggcgaataattccgtgcaagcatgctttttgctatcactgtgctaatttatatgacaaagtcggatataaagtatgtccgcgctgtcgttatcctgtgctgagaattgaggcgcataaacgaggttctgtcttcatgtgtagtattgttcagcagtgcaagagaacatacttgtctcagaaaagcttacaggctcatatcaaacgccgccataagagagctcgaaaacaagttaccagcgcttcgcttgaaaaagttcgtcctcatattgctccgccacaaactgaaatctctgacatccctaaaagactgcaagacagggaccatctaagctatattccaccagaacagcacaccatggtgtcactaccgtctgtgcaacatatgctacaagagcaacataatcagccacataaggatatccaggctcctcccccagaactatctctaagtctgccttttcccatccagtgggaaaccgttagtatttttacgagaaaacatggcaatttaacagttgatcatattcagaataactcagattctggtgctaagaagccaacacctcccgactattatcctgagtgtcaaagtcaaccagcggtatcgtcccctcatcatattatacctcagaaacagcattatgcgccacctccatctccatcatcaccagtaaaccatcaaatgccatatcctcctcaggatgtagttactcctaactcggttcgtagccaagtgccagctctaaccacgacctacgatccatcatctggatatattattgtaaaggtgccacctgatatgaattctcctccactacgtgctccccagtctcaaaatggtaatccatctgcaagtgaatttgcttctcaccattataaccttaacattttacctcagttcaccgaaaatcaagaaaccttgagccctcagtttacacaaacagatgcaatggatcatagaaggtggcctgcatggaaacgactgtcaccttgtccaccaacgcggagtccacctccttcaaccctacatggtcgatcacatcattcacaccagagaagacatagacggtattaaggatgataacagtatttggaactgaagacctgatgggaaaaaaaccttcaagttctatactgtactgtggataagcggctcagttcagcagagctggagttgaacaactttgttcctctggtgtggtaaattgacctaaaggtgacctctgacgatttcctgaaataaatatgcaatgttacattttcaaaa

SEQ ID NO: 203324 - DNA, 6892 bp, Homo sapiens
  Payload ID: 20094
  Gene Name: zinc finger protein 646
  Uniprot ID: O15015
  ENST ID: ENST00000300850
  CDS Start-End: 290-5788
agtaacaataggaagtgtccgtagagctgggagtagactcctggctcatgccagctgcgccctcttttctctacctccttcctcttccccccttctcctttccctctttcccttccctcccacctcccgggaaccctggctgagtgtgcgtgtgtgggagcgcgagagccccccgacagccaccccttggggcgcgcggctgcagttagggccttggcccctccaccagaggaaggtgctgccacgtgtctgctccttctgaacctccaggtttctgctacgttgccccatggaggacacacccccctcactcagctgctccgactgtcagcgccactttcccagcctcccagagctctctcggcaccgagaactgctccatccatctcccaaccaggacagtgaggaggctgacagcatccctcggccctaccgttgtcagcagtgtgggcggggctaccgtcaccccgggagcctggttaaccatcgtcggacccacgagactggccttttcccctgtaccacctgtggcaaggacttctccaatcccatggctctcaagagccatatgaggacacatgctcctgagggccgccgcaggcacaggcccccacgccccaaggaagccactccacacctccagggtgagacggtgtccactgactcctggggccaaaggcttggctctagtgaaggctgggaaaaccagacaaaacatacagaagagacacctgactgtgaatctgtacctgaccccagggcagcttcgggtacgtgggaagatctgcccaccagacaaagagaaggcttggcaagccacccaggtcctgaggatggtgcagacggctggggaccctccactaactctgccagagcccctcctctccccatcccagccagcagccttcttagcaacttggaacagtatctggctgaatcagtagtgaacttcacagggggccaggagcccacccagtcccctcctgctgaggaggagcggcggtacaaatgtagtcagtgtggcaagacctacaagcacgccgggagcctcaccaaccaccgccagagccacacgctgggcatctacccctgtgccatctgtttcaaggagttctctaacctcatggctctgaagaaccactctcgactgcatgcccagtatcggccttaccactgtccccactgcccccgtgtcttccggctcccccgggagctgctggaacaccagcagtcccatgagggtgaaaggcaggagccacgctgggaggagaaagggatgcccaccaccaatgggcacacagatgagagcagccaggaccagctccccagtgcacagatgctgaatggctctgcggagctcagcacctctggggagctggaggacagtggcctggaggaataccggcctttccgctgtggggactgtggccgtacttaccgccatgctgggagcctcatcaaccatcgaaagagccaccagacaggtgtctacccctgctcactctgttctaagcagctgttcaatgcggctgccctcaaaaaccatgtgcgggctcatcacaggcccaggcaaggagttggggaaaatgggcagccatcagtcccaccagctcccctgctgctggctgagaccacccacaaagaggaagaggaccccaccaccaccctggaccatcggccctataagtgcagtgagtgtggtcgtgcttaccgccaccgggggagcctggtgaaccatcgccacagccatcggactggagagtaccagtgctcactctgtccccgcaagtaccccaatctcatggccctgcgcaaccacgtgcgggtacattgcaaggctgctcgccgaagtgcagacatcggggctgagggtgcccccagccacctcaaggtagaactcccgcctgacccagtggaggcagaggcagccccgcacacagatcaggaccatgtgtgcaaacatgaagaagaggccacggacatcaccccagcagcagacaagacagcagcacatatctgtagcatctgtgggctgctctttgaagacgctgagagccttgaacgtcatggcctgactcatggggcaggggaaaaggaaaatagcagaacagagaccacaatgtcacctcctagggcctttgcctgccgagactgtggaaagagctatcgccactcaggcagccttatcaaccacaggcagacccaccagacaggagacttcagttgtggggcctgtgccaagcacttccacaccatggctgccatgaagaaccacttgcgccggcacagtcggcggcggagcaggcggcatcggaagcgggctggcggtgccagcggtgggagagaagccaaactcctggcagcggagagctggacccgggagctagaagacaatgaaggcctggagtctccccaagacccttcaggggaaagtcctcatggggctgaaggcaacctggaaagtgatggggactgtttgcaggctgaatctgaaggggacaaatgtgggcttgagagggatgagacccatttccagggtgataaagagagcggaggcactggggaaggactggaaaggaaggatgccagtttacttgacaacttggacatcccaggtgaggaaggtggtggcactcacttctgcgatagcctcactggggtggatgaagaccagaagccagccactggccaacccaactcctcttcccactctgccaatgctgtcactggctggcaggctggggccgctcacacatgctctgactgtgggcattctttcccccatgccactggcctgctgagccacaggccctgccacccaccaggcatctatcagtgctccctctgcccgaaggagtttgactctctgcctgccctccgcagccacttccagaaccataggcctggggaggcgacctcagcacagcctttcctctgctgcctctgtggcatgatcttccctgggcgggctggctacaggcttcaccggcgccaggcccacagctcctctggcatgactgagggctcagaggaggagggggaagaggaaggagtggcagaggcagcccctgcacgcagtccaccactgcagctctcggaagcagagctgctgaatcagctgcagcgggaggtggaagcgctggacagtgcagggtatgggcacatctgtggctgctgtggtcagacctacgatgacctggggagcctggagcgtcaccaccaaagtcagagttctgggactactgcagacaaggctcccagccccttgggagtggcaggtgatgccatggagatggtcgtggacagtgtcttggaggacatagtgaattctgtctctggagagggtggagatgccaagtctcaagagggagcaggcacccccttgggagacagcctctgcatccagggtggggaaagtttgttggaggctcagccccgccccttccgctgcaaccagtgtggcaagacctatcgccatgggggcagcctggtgaaccaccgcaagatccaccagactggagactttctctgccctgtctgctcccgctgctaccccaacctggctgcctaccgtaatcatctgcggaaccaccctcgctgcaaaggctctgagccccaggttgggcccatcccagaggcagcaggtagcagtgagctgcaggttgggcccatcccagaaggaggcagcaacaagccccagcacatggcagaggaggggccggggcaagcagaagtcgagaagctccaggaagaacttaaagtggagcccctggaggaagtggccagggtgaaagaagaggtgtgggaggagaccactgtgaagggggaggagatagagcccaggctggagactgccgagaagggctgccagactgaagccagctctgagcggcccttcagctgcgaggtgtgtggccgatcctacaagcacgccggcagcctcatcaaccaccggcagagccaccagaccggccactttggctgtcaggcctgctccaagggcttctcaaacctcatgtccctcaagaaccaccggcgcatccatgcagatccccgacgtttccgctgcagcgagtgtgggaaggccttccgcctgcggaaacagctggccagccaccagcgggtccacatggaacggcgtgggggtgggggcacccgaaaggcgactcgggaagatcggcccttccgctgtgggcagtgcgggcggacctatcgccacgccggcagcctcctgaaccaccggcgcagccacgagacgggccagtacagctgccccacctgccccaagacctactccaaccgcatggccctgaaggaccaccagaggctgcactcagagaatcggcggcgacgggctggacggtccaggcgcacagctgtgcgttgcgccctctgtggccgcagcttccctggccggggatctttggagcggcacctgcgggagcatgaggagacagaaagggagccagccaatggccagggaggcctggatggcacagcggccagtgaggcgaacctgactggcagccagggactagagacccaattgggtggtgctgagccagtaccccacttggaggatggagtcccaaggccaggggagcgcagtcagagccccatcagggcagcaagctcagaagccccagagccactgtcctggggtgcagggaaggcaggtgggtggccggtaggtgggggactggggaatcatagtggaggctgggttcctcagttcctaactaggtcagaggagccagaggacagtgtccacaggagtccttgccacgctggtgactgccagctcaatggacctactctgagtcacatggatagctgggacaacagagacaacagctctcagctgcagccagggagccactcctcttgcagccagtgtggcaagacttactgccagtcaggcagcctcttgaaccacaacaccaacaagacagaccgacactattgcctgctctgctccaaggagttcttaaatcctgtggccacaaagagccacagccacaaccacatagacgcccagacctttgcctgtcctgactgtggcaaagcctttgagtcccaccaggaactggccagccacctgcaggctcatgcccggggccacagccaggtgccagcccagatggaggaggccagagatcccaaagccgggactggggaggaccaggtggttctccctggtcaagggaaagcccaggaggccccatcagaaacccccagaggcccaggagagagtgtggagagagccaggggaggacaagcggtgacgtccatggcggctgaggacaaggagcggcccttccgctgcacccagtgcgggcgctcctaccgccatgctggcagcctgctgaaccaccagaaggcccacaccacagggttgtacccgtgctccctctgtcccaaacttctccctaacctgctgtctcttaagaaccacagcaggacccacacggaccccaagcgccactgctgcagcatctgtggcaaggcctttcggacagctgcccggctggagggccacgggcgggtccatgcaccccgggaggggcctttcacctgcccccattgtccccgccacttccgccgccgaatcagcttcgtgcagcaccagcagcagcaccaggaggagtggacggtggccggctccggagccccagtggcaccagtgacgggcagaggggacttgccattgccccctccacccacccccacgaccccactcctggatccttcaccccagtggcctgcagacctcagcttctccctctgaacttcaagtctccaaagatcagaatctgggggagggagcgcgtgcagggaggggcttgatctccacattttctcaggagtagttcgggcatccccatatcttctcctctccccttgtgaagaggacccagatctggcttctttcccaaggagggggtggggtgttcctcgcgtccctgtccttgaaggacctccttcccccagcctcatcaccgtgctcttctcagcgccaccctcagcagccagattgcaacaccagggagaggcggatgcagagccccaccggtgggaaagttgcctgtggaagggagccttttgctacaatttgtaacttattttctaaagtctattttgtaacaatttatttaagtttaaaaaaaggaaaactgctgccccccaaaaaaagaaattttcaaaacaacgtggctggcgtgattgtatctgaaagggtaaaggaggaggaaagctgagacgcctgcttggtagcagagttgggtgtgggagtgtccacagacacccctgtcctgcagggtggggagtgggcacctgtggccccaggcaggttccttcccacagctgctgggcttctgggcctgccctggtgcctggaatcacacatgacagggtggggaggacaggggcagtaatgccatttgcctgcctgcattctcttgtcctgagaatggccaggtcccctgtcagcagctggttggttggcctgtggggaaggaaggagggtggagttgtcctcatcctcacggctttggtccctccctccctccccattcctcgaaggaacagggtctgtcttggccgccatgacagatgagaatactgaggctcaaagcggttgagcagcctgctccaagtcacacgatgacaaagaaccagaatctgaatcaaatgggtctgcctgttgctccaccctacccaaggcagctggagtgggttagaacggcacgttctcactggagagagaagggtcctggagaggcagggtttggcaggaggccccggggccacatacttatgttggccaggcagcttccaggctcagcctcgggctctggttcctcggcgaagtagacctgccagtccaaactgc

SEQ ID NO: 203325 - DNA, 8118 bp, Homo sapiens
  Payload ID: 20094
  Gene Name: zinc finger protein 646
  Uniprot ID: O15015
  ENST ID: ENST00000394979
  CDS Start-End: 424-5913
gagcagattcctactgttcttaaaggacagtaatgccttttgagtctggtctgaagaacataacaggtctgtgatcagaagtaggttgcatctctctcaactttaatttccttagctatacctgtagggatgacttaagcctaggggagctcctatatttgggaagcttgtgcacagggaagccttaaatgatggtgcctgcagattggatctagtagaaattaggtccttgggcatggatgcttggggaacctctcagtgacctcaggtgaacttgttgctcgtagagccaagaggcgaagttaattcaggccttccttttgaccactgccccctcttcctaggccttggcccctccaccagaggaaggtgctgccacgtgtctgctccttctgaacctccaggtttctgctacgttgccccatggaggacacacccccctcactcagctgctccgactgtcagcgccactttcccagcctcccagagctctctcggcaccgagaactgctccatccatctcccaaccaggacagtgaggaggctgacagcatccctcggccctaccgttgtcagcagtgtgggcggggctaccgtcaccccgggagcctggttaaccatcgtcggacccacgagactggccttttcccctgtaccacctgtggcaaggacttctccaatcccatggctctcaagagccatatgaggacacatgctcctgagggccgccgcaggcacaggcccccacgccccaaggaagccactccacacctccagggtgagacggtgtccactgactcctggggccaaaggcttggctctagtgaaggctgggaaaaccagacaaaacatacagaagagacacctgactgtgaatctgtacctgaccccagggcagcttcgggtacgtgggaagatctgcccaccagacaaagagaaggcttggcaagccacccaggtcctgaggatggtgcagacggctggggaccctccactaactctgccagagcccctcctctccccatcccagccagcagccttcttagcaacttggaacagtatctggctgaatcagtagtgaacttcacagggggccaggagcccacccagtcccctcctgctgaggaggagcggcggtacaaatgtagtcagtgtggcaagacctacaagcacgccgggagcctcaccaaccaccgccagagccacacgctgggcatctacccctgtgccatctgtttcaaggagttctctaacctcatggctctgaagaaccactctcgactgcatgcccagtatcggccttaccactgtccccactgcccccgtgtcttccggctcccccgggagctgctggaacaccagcagtcccatgagggtgaaaggcaggagccacgctgggaggagaaagggatgcccaccaccaatgggcacacagatgagagcagccaggaccagctccccagtgcacagatgctgaatggctctgcggagctcagcacctctggggagctggaggacagtggcctggaggaataccggcctttccgctgtggggactgtggccgtacttaccgccatgctgggagcctcatcaaccatcgaaagagccaccagacaggtgtctacccctgctcactctgttctaagcagctgttcaatgcggctgccctcaaaaaccatgtgcgggctcatcacaggcccaggcaaggagttggggaaaatgggcagccatcagtcccaccagctcccctgctgctggctgagaccacccacaaagaggaagaggaccccaccaccaccctggaccatcggccctataagtgcagtgagtgtggtcgtgcttaccgccaccgggggagcctggtgaaccatcgccacagccatcggactggagagtaccagtgctcactctgtccccgcaagtaccccaatctcatggccctgcgcaaccacgtgcgggtacattgcaaggctgctcgccgaagtgcagacatcggggctgagggtgcccccagccacctcaaggtagaactcccgcctgacccagtggaggcagaggcagccccgcacacagatcaggaccatgtgtgcaaacatgaagaagaggccacggacatcaccccagcagcagacaagacagcagcacatatctgtagcatctgtgggctgctctttgaagacgctgagagccttgaacgtcatggcctgactcatggggcaggggaaaaggaaaatagcagaacagagaccacaatgtcacctcctagggcctttgcctgccgagactgtggaaagagctatcgccactcaggcagccttatcaaccacaggcagacccaccagacaggagacttcagttgtggggcctgtgccaagcacttccacaccatggctgccatgaagaaccacttgcgccggcacagtcggcggcggagcaggcggcatcggaagcgggctggcggtgccagcggtgggagagaagccaaactcctggcagcggagagctggacccgggagctagaagacaatgaaggcctggagtctccccaagacccttcaggggaaagtcctcatggggctgaaggcaacctggaaagtgatggggactgtttgcaggctgaatctgaaggggacaaatgtgggcttgagagggatgagacccatttccagggtgataaagagagcggaggcactggggaaggactggaaaggaaggatgccagtttacttgacaacttggacatcccaggtgaggaaggtggtggcactcacttctgcgatagcctcactggggtggatgaagaccagaagccagccactggccaacccaactcctcttcccactctgccaatgctgtcactggctggcaggctggggccgctcacacatgctctgactgtgggcattctttcccccatgccactggcctgctgagccacaggccctgccacccaccaggcatctatcagtgctccctctgcccgaaggagtttgactctctgcctgccctccgcagccacttccagaaccataggcctggggaggcgacctcagcacagcctttcctctgctgcctctgtggcatgatcttccctgggcgggctggctacaggcttcaccggcgccaggcccacagctcctctggcatgactgagggctcagaggaggagggggaagaggaaggagtggcagaggcagcccctgcacgcagtccaccactgcagctctcggaagcagagctgctgaatcagctgcagcgggaggtggaagcgctggacagtgcagggtatgggcacatctgtggctgctgtggtcagacctacgatgacctggggagcctggagcgtcaccaccaaagtcagagttctgggactactgcagacaaggctcccagccccttgggagtggcaggtgatgccatggagatggtcgtggacagtgtcttggaggacatagtgaattctgtctctggagagggtggagatgccaagtctcaagagggagcaggcacccccttgggagacagcctctgcatccagggtggggaaagtttgttggaggctcagccccgccccttccgctgcaaccagtgtggcaagacctatcgccatgggggcagcctggtgaaccaccgcaagatccaccagactggagactttctctgccctgtctgctcccgctgctaccccaacctggctgcctaccgtaatcatctgcggaaccaccctcgctgcaaaggctctgagccccaggttgggcccatcccagaggcagcaggtagcagtgagctgcaggttgggcccatcccagaaggaggcagcaacaagccccagcacatggcagaggaggggccggggcaagcagaagtcgagaagctccaggaagaacttaaagtggagcccctggaggaagtggccagggtgaaagaagaggtgtgggaggagaccactgtgaagggggaggagatagagcccaggctggagactgccgagaagggctgccagactgaagccagctctgagcggcccttcagctgcgaggtgtgtggccgatcctacaagcacgccggcagcctcatcaaccaccggcagagccaccagaccggccactttggctgtcaggcctgctccaagggcttctcaaacctcatgtccctcaagaaccaccggcgcatccatgcagatccccgacgtttccgctgcagcgagtgtgggaaggccttccgcctgcggaaacagctggccagccaccagcgggtccacatggaacggcgtgggggtgggggcacccgaaaggcgactcgggaagatcggcccttccgctgtgggcagtgcgggcggacctatcgccacgccggcagcctcctgaaccaccggcgcagccacgagacgggccagtacagctgccccacctgccccaagacctactccaaccgcatggccctgaaggaccaccagaggctgcactcagagaatcggcggcgacgggctggacggtccaggcgcacagctgtgcgttgcgccctctgtggccgcagcttccctggccggggatctttggagcggcacctgcgggagcatgaggagacagaaagggagccagccaatggccagggaggcctggatggcacagcggccagtgaggcgaacctgactggcagccagggactagagacccaattgggtggtgctgagccagtaccccacttggaggatggagtcccaaggccaggggagcgcagtcagagccccatcagggcagcaagctcagaagccccagagccactgtcctggggtgcagggaaggcaggtgggtggccggtaggtgggggactggggaatcatagtggaggctgggttcctcagttcctaactaggtcagaggagccagaggacagtgtccacaggagtccttgccacgctggtgactgccagctcaatggacctactctgagtcacatggatagctgggacaacagagacaacagctctcagctgcagccagggagccactcctcttgcagccagtgtggcaagacttactgccagtcaggcagcctcttgaaccacaacaccaacaagacagaccgacactattgcctgctctgctccaaggagttcttaaatcctgtggccacaaagagccacagccacaaccacatagacgcccagacctttgcctgtcctgactgtggcaaagcctttgagtcccaccaggaactggccagccacctgcaggctcatgcccggggccacagccaggtgccagcccagatggaggaggccagagatcccaaagccgggactggggaggaccaggtggttctccctggtcaagggaaagcccaggaggccccatcagaaacccccagaggcccaggagagagtgtggagagagccaggggaggacaagcggtgacgtccatggcggctgaggacaaggagcggcccttccgctgcacccagtgcgggcgctcctaccgccatgctggcagcctgctgaaccaccagaaggcccacaccacagggttgtacccgtgctccctctgtcccaaacttctccctaacctgctgtctcttaagaaccacagcaggacccacacggaccccaagcgccactgctgcagcatctgtggcaaggcctttcggacagctgcccggctggagggccacgggcgggtccatgcaccccgggaggggcctttcacctgcccccattgtccccgccacttccgccgccgaatcagcttcgtgcagcaccagcagcagcaccaggaggagtggacggtggccggctccggtagggggcatgaagggtcccaggaggaggtgggcacacagtggagggggaagtccagccccaaagtcggtgggggagcaaggagtgagaggagagagccccggggattctaagaggtgggtgggggcttggctatggggtgagagaagtagcttgaggatgtgctgagctgagcacccgcaagtcaggtataacaaatagcagggtgggttgggcagcacgtgggggcgtggtcaggccgaggctgctacctgggctcctccattacactgtagccagaatggaatggtctttctgttcaggggaaggtcactgggtaccccctggctgctgtgtctggaaaccctcctgagtcagccagtaaagtaatgacttccagagaaaaagaggaagccattggtttggtctaggttccattctttcctggagcaggccgggtgccagggaacaagggatggggcatgggctccacggcttccctgctgacttggccacggaaactggttcactggttggcaccctactccctgtccctctttccctgcgccttgtctctgctgctcctctccttggaaactagacctctggtccttccctgtcagtgttgctcccatctcttctctaacctttattcagccccttttccctctgctgccaacggcctttttaggatccaaccaaaccaccctttctacctgcgcaccctgccaccctctgcacacctttaactggaggactgagtcacagataattgtttccttgaagtccaggcccagctgcagcaacaacagtcattagcccgtgtcacatccctgatcagagggcatctccgtggggaatcgcctccacccagcactgctggaagccgcagctgccagggagtggggcggccggttccctcagcaggacctgggctggcctctccacctcccctagtagaggcggacccattccatctagtggccaccgagggtgggtggccctgagatggtgggcccttgacaggccttgtcagagcagagggcaggtgggagtcacctgaaagctgaaggaatggctttaaggatagaagatttctcatgacctcaagggatatgagggaggagccagtttgccagggctgggaaaataattaggaggcctagaatccctgttctcatctgggcctccggggccaggggcaggggaatggcctgcagggctgggagggggtacacgctgtgcggggtctgcccctcagttggtgacctcctctctctctccccccaggagccccagtggcaccagtgacgggcagaggggacttgccattgccccctccacccacccccacgaccccactcctggatccttcaccccagtggcctgcagacctcagcttctccctctgaacttcaagtctccaaagatcagaatctgggggagggagcgcgtgcagggaggggcttgatctccacattttctcaggagtagttcgggcatccccatatcttctcctctccccttgtgaagaggacccagatctggcttctttcccaaggagggggtggggtgttcctcgcgtccctgtccttgaaggacctccttcccccagcctcatcaccgtgctcttctcagcgccaccctcagcagccagattgcaacaccagggagaggcggatgcagagccccaccggtgggaaagttgcctgtggaagggagccttttgctacaatttgtaacttattttctaaagtctattttgtaacaatttatttaagtttaaaaaaaggaaaactgctgccccccaaaaaaagaaattttcaaaacaacgtggctggcgtgattgtatctgaaagggtaaaggaggaggaaagctgagacgcctgcttggtagcagagttgggtgtgggagtgtccacagacacccctgtcctgcagggtggggagtgggcacctgtggccccaggcaggttccttcccacagctgctgggcttctgggcctgccctggtgcctggaatcacacatgacagggtggggaggacaggggcagtaatgccatttgcctgcctgcattctcttgtcctgagaatggccaggtcccctgtcagcagctggttggttggcctgtggggaaggaaggagggtggagttgtcctcatcctcacggctttggtccctccctccctccccattcctcgaaggaacagggtctgtcttggccgccatgacagatgagaatactgaggctcaaagcggttgagcagcctgctccaagtcacacgatgacaaagaaccagaatctgaatcaaatgggtctgcctgttgctccaccct

SEQ ID NO: 203326 - DNA, 1077 bp, Homo sapiens
  Payload ID: 20094
  Gene Name: zinc finger protein 646
  ENST ID: ENST00000428260
  CDS Start-End: 358-1077
tagagctgggagtagactcctggctcatgccagctgcgccctcttttctctacctccttcctcttccccccttctcctttccctctttcccttccctcccacctcccgggaaccctggctgagtgtgcgtgtgtgggagcgcgagagccccccgacagccaccccttggggcgcgcggctgcagttagggtaagggtcccagtgcgcaggcgcgctcttgttcgcggtccccaactgacgcgcccgcggcgggaaggagagggggccgccggtgcgaggccttggcccctccaccagaggaaggtgctgccacgtgtctgctccttctgaacctccaggtttctgctacgttgccccatggaggacacacccccctcactcagctgctccgactgtcagcgccactttcccagcctcccagagctctctcggcaccgagaactgctccatccatctcccaaccaggacagtgaggaggctgacagcatccctcggccctaccgttgtcagcagtgtgggcggggctaccgtcaccccgggagcctggttaaccatcgtcggacccacgagactggccttttcccctgtaccacctgtggcaaggacttctccaatcccatggctctcaagagccatatgaggacacatgctcctgagggccgccgcaggcacaggcccccacgccccaaggaagccactccacacctccagggtgagacggtgtccactgactcctggggccaaaggcttggctctagtgaaggctgggaaaaccagacaaaacatacagaagagacacctgactgtgaatctgtacctgaccccagggcagcttcgggtacgtgggaagatctgcccaccagacaaagagaaggcttggcaagccacccaggtcctgaggatggtgcagacggctggggaccctccactaactctgccagagcccctcctctccccatcccagccagcagccttcttagcaacttggaacagtatctggctgaatcagtagtgaacttcacagggggccaggagcccacccagtcccctcctgctgaggaggagcggcggtacaaa

SEQ ID NO: 203327 - DNA, 582 bp, Homo sapiens
  Payload ID: 20094
  Gene Name: zinc finger protein 646
  ENST ID: ENST00000564189
  CDS Start-End: 419-582
gtaacaataggaagtgtccgtagagctgggagtagactcctggctcatgccagctgcgccctcttttctctacctccttcctcttccccccttctcctttccctctttcccttccctcccacctcccgggaaccctggctgagtgtgcgtgtgtgggagcgcgagagccccccgacagccaccccttggggcgcgcggctgcagttagggtaagggtcccagtgcgcaggcgcgctcttgttcgcggtccccaactgacgcgcccgcggcgggaaggagagggggccgccggtgcgaggtaggcgtcctgagaggaaattggcagacgagatgagtgaggccttggcccctccaccagaggaaggtgctgccacgtgtctgctccttctgaacctccaggtttctgctacgttgccccatggaggacacacccccctcactcagctgctccgactgtcagcgccactttcccagcctcccagagctctctcggcaccgagaactgctccatccatctcccaaccaggacagtgaggaggctgacagcatccctcggccctaccgttgtcagcagtgtgggcg

SEQ ID NO: 203328 - DNA, 3649 bp, Homo sapiens
  Payload ID: 20095
  Gene Name: zinc finger protein 648
  Uniprot ID: Q5T619
  ENST ID: ENST00000339948
  CDS Start-End: 209-1915
ctctgcagccgctggactggacacaaagcgtgagagacagagacaccatctctgctgatttgtacctaactggttcctgttgctgagagcccacgtgtcacagaagccagggcagaggccccacactgctgtctgcatttcccaggtatcctgagccaagcaggatactcctcctcagaggagtaggcaatagaagcgcctgaacatcatggcacaagtggactcccaggacaggtggggagaggcgtctcctctcagcagcttgactgaggaagctcatgacacccagatgctgagcatgaacttagagagtgacgatgaagatggtggggaggccgaaaaagagggcaccgctgacccggtggcctgtccaaggggcagctccccagtaacacacgaaaatcctgacttgccatggccccatccactgggcaaagaggaagagaaattctctgactcctccagtgctgggggcatggggcagaaaccagtggaaatgtctgggaaagccagttggagcagagatgtgacaaagatcaacgagacccagggttccccgggagcaagcagagctctgggttcccttcccagtggtctcgcacacaaattgttaggtcagatgcaacctcttggggaccgactacctgcgggtgatgatggatactcgggggcaaaccaggacgcagtcttggatgtcccacccagcttccccagcaatggaaagtatctctgtgcgcacaaaagtgtagacacgtccgcagggaactcttctctgttgtgtttccccaggccggggagcaactgggaccttcccacgcaagagacacatacaccagcccaggcgtcggccaccccagccagcctggctgccgcggtcctggcaaaagcgcggaacagcaggaaagtacagaaccaggcgggccggcgcgagggcggagaggctgaggcgcgtccctacaggtgcctgcggggcgggcgggcctttcagaagcccagcaagccgctgagccccgcggagacgcgcggcggcgccgccaagcgctacgcgtgcgagctatgcgggaaggcctactcccaccgcggcacactccagcagcacaggcgcctgcacacgggcgagcggccctaccagtgctccttctgcgacaaggcctacacctggtcctccgaccaccggaagcacatccgcacccacacaggcgagaaaccctacccgtgtccagactgcgggaaggccttcgtgcgctcttcggacctgcgcaaacaccagcgcaacatgcacagcaacaataagcccttcccgtgctccgagtgcggcctgaccttcaacaagccgctgtcgctgctgcgccaccagcgcacgcacctgggcgccaagcccttccgctgccccgcctgcgaccgggagttcgctgtggccagccgcatggtggagcaccagcgcgtgcactcgggcgagcggcccttcccctgccccacctgcggcaagtgcttcaccaagtcctccaatctgtccgagcaccagacgctgcacaccggccagaggcctttcaagtgcgctgactgcggcgtggccttcgcgcagccctcgcgcctcgtgcgccaccagcgcatccacactggcgagaggccctttccttgcacgcagtgtggccaggcctttgcccgctcttcgaccctgaagcggcaccaacagatccactccggggagaagggattcctctgtgccgagtgcggcagggccttccgcattgcctctgagttggcccagcacatacgaatgcacaacggagagaggccctaccagtgtgaggactgcggccaggccttcaccaggtccaatcacctccaacgacaccgagccaagcacggcacctgcaagaaggagcccatcccttcctcctctgacgagtgaagatagcatcgtcgacctcactacttggaaccttcccaggtgggcccactcacatggtattgccagcctcactggtcagcctcgcctcccagcaggtcgcgggtcatcagtggtccatttgattatttatttgatcccttgaacagaaagtcaccaccgagagagcacccaggtgggtggtttcacatcagtggttctgagtgtccgaggtcataagcaattggaaaagggaaagacaaagtagtgggagctgatcaaacgttgagttccttgggttggggaacctgaatcaatcagaaactgcttctagaattacatgctgggcactgggccgggctccagggataaggtggggaaaaagactaacctgtcctaccctcaaagccatatgcaaatactgaaaagaaggcctgaggggctggtcctctttagagaaagatgctttttggtttttatataaataaaggaatccccagaagtggtccctatgatgaactcccccaaagcaacgccgtttttggaggaactcaaacccagtccaacatcccatcatttcacttgactgcagaaatggctttacccttaggatatatctttatgagtcttggctttgaagtggagaagggctttatcttagagaaggtggtttatgtcatattccagttattctagaagttcaggacagccttagcatctgaaaaagaagcccattcctctttatagtggaatttagtaagtagatctaacccgagtctcacccacagaattcatataaattcatatatgccttctctctggctgcctcttttcctgtttgcactctgagggcttaagtcatatgtgatatttacaaagcaattggcccatttacagagagacatatataatttctccacaaagccttgaccatggttcatgaaaccgtttgggttcatttaaatttgtctgaatcattagtcttgacttgaagtgaacaaaacaccctttgcccaagtgccattggcttgtctgcatttcaaaatcattaaaaccaggtatggaagcctacgtgctcacagttatctaatgaggttatttcaaagtttgcattactaacagccattctgcaaagtgtattgatgtgtatagtgatctgtataaagtcagtagttcttagctgaacctcaactgtgaggaatctatgactccacagatgtccttggtgcacataggcaaacggcacttctcatcttactgaagttaaataagatattccataagaaggtatagtgccctttttgggggagtacctttagtatattcctaaaattgccaccaaagaatgccaaatctgaatttctcttggtttccacctgatttggaactagggtgtgacctctaaatagcattctcatgacacatgggggcgccaaagagaagtaagagagatagctagatagctagatagctagatagtcttgtgtcttgtttgaccaaggtaaccgtaataaaagagtccatccccatcctttactgttgatgtgaccttgggcttcagtttctgcatctgcattggcaaaatagaagtgatagtagtaggtaaaagttagagtgatcctactatatgacggaaactttggctggatgcaagagctttaaattggtagaaaagtcacaagatgagcttgtgactatgaagagagcaaaagctaacttttttttcctagataatcaataaaatatttgaagactgaa

SEQ ID NO: 203329 - DNA, 3197 bp, Homo sapiens
  Payload ID: 20096
  Gene Name: zinc finger protein 649
  Uniprot ID: Q9BS31
  ENST ID: ENST00000354957
  CDS Start-End: 286-1803
gactcgcgccctcgtccgccgccataggccagtgccggggtttaagggccaggaaaggaagcattcagggaatttaggtgtagccagaagaaaatcaggtcctggctccccagaagcaagagagttcaaatgaaggaaggaggaggttcctggatgtggatgtcatcatttctgggaacactcttaaatggagactcagatttcttagccaaaatttagggaggatccagaagaaaccaaagacgaagcatcccagttcttgggtatttcctgaaacagaagaaaatgacaaaggcccaggaatcactgaccctggaggatgtggctgtggacttcacctgggaggagtggcagttcctgagccctgctcagaaggacctgtaccgggatgtgatgttggagaactacagcaaccttgtgtcagtggggtatcaagccggcaaacctgatgccctcaccaagttggaacaaggagaaccactatggacactagaagatgaaatccacagtccagcccacccagaaattgagaaagctgatgatcatctgcagcagcccttgcaaaaccaaaaaatactgaagaggacgggacaacgctatgaacacggaagaactttgaaatcatatttaggtttaaccaaccagagcagaagatacaacagaaaggagcctgctgagtttaatggagatggagcttttctccatgataatcatgaacaaatgcctacggaaattgaattccctgaaagtagaaaacccatcagcaccaagtcacaattccttaaacatcagcaaacacacaacatagagaaagcccatgaatgcactgactgtgggaaagctttcctcaagaagtctcagctcactgagcataagagaattcatacaggaaagaaaccccacgtgtgtagcttgtgtgggaaagccttctacaagaagtacaggctcactgaacacgagagagctcacagaggagagaaaccccacgggtgtagcttgtgtgggaaagccttctacaagaggtacaggctcactgaacacgagagagctcacaaaggagagaaaccatacgggtgcagtgaatgtgggaaagccttccccaggaaatctgagcttactgaacatcaaaggattcacacgggaattaagccccatcaatgcagcgaatgtgggagagctttctccagaaaatcactactcgttgtacatcagcgaactcatacaggagagaagcctcatacatgcagtgaatgtggaaaaggcttcattcagaagggcaatctcaacatacatcaacgaactcacactggagagaaaccttatggatgcattgactgtggcaaggccttcagccagaagtcttgccttgtagcacatcagagatatcatacaggaaagactccctttgtatgtcctgaatgtgggcaaccctgttcacagaagtcaggactcattagacatcagaaaattcactcaggagagaaaccctataaatgcagtgactgtgggaaagccttccttacaaagacaatgctcattgtacatcacagaactcacacgggagagagaccctatggctgtgatgagtgtgagaaagcttacttctatatgtcttgccttgttaaacataagagaatacactcaagggagaaacggggggattcagtgaaggtggaaaatccttccacagcaagtcacagcttaagtcctagtgaacatgtgcaggggaaaagccctgttaatatggtaactgtggcaatggtggcagggcagtgtgagtttgcccacatcctgcattcatgataaacagtttgctgtttgatcatatagcctccagcggaatgctgagtttgtcatgtcccatgggcctttggctccctgcactaatatgtatagtagggtttacaagatatgaaatatattttacttttttatatcttataaacctcactacccctcccacaatattgtttttcatttactatcttgatcatagagtttggctggggaggggggcagttttagaggcttccacttggtgttcctcagaatgatatctcttactccgggggccaaggtaggggttagcttttgttctctttgtagtttagattgtatctcttgccttgttcaagttcacaaatctttttgtgtatacacatatgtacatgaaaatgatgttcatgctttttattattttacccttcattatttcattttttatagttctcatagctatgtctttcagttcactaatcttttttccacagtgtttaatctgtcattaatcccatccaaagtatgttttctctcagaaattgtaatttttaacctctaataatttgacatgggtttttccctgttatatctttcatatctttatttatcatggttttacttttaacctatttatgctttcatatttaaagtgggtgtttagtgggcaacatacagttgggccttccttttttatccagttaacaatctctgtctttttactggggtatttagatcatttacgttcaatgtattgatgtttttaggtttaaattactaacttactatttgttgtttattctatgtcttctttgttctccttttcttctttttctgctttcccttagagtagctgagtgtgtttatattacatattgtctcctttgttggcttattaactgtaaatccttgtcatttgattccttgagattttatagcatacatcattgtgagggattgcatatttatgtcctctccaaatttacatgttgaagtcctaatccctaagggatggcattaggaagtgtgacctttggaaggtaattacatcttgaaagtggaaccctcatgatgagattatgtgtcttatgagacaacacagaagagagtttgttttctctttctctgctctttgccatgtgaagacagaatgagatgaccatgcataaaccaggaaatggactctcactggacactagacctgccaacaccttgattgtgttttagagtccagttctagagactcctcagcctctggaacgtgagaaatgaatgtttgttaaggcagtcagtcagtctatggtgtattttttctagtagcctgaactgactgaaagaaaatcatgaacttatcattctaacttcaaggacattatatcacttactgtataataaaataatcttacagtagtatatctcta

SEQ ID NO: 203330 - DNA, 2283 bp, Homo sapiens
  Payload ID: 20096
  Gene Name: zinc finger protein 649
  ENST ID: ENST00000600738
  CDS Start-End: 286-1719
gactcgcgccctcgtccgccgccataggccagtgccggggtttaagggccaggaaaggaagcattcagggaatttaggtgtagccagaagaaaatcaggtcctggctccccagaagcaagagagttcaaatgaaggaaggaggaggttcctggatgtggatgtcatcatttctgggaacactcttaaatggagactcagatttcttagccaaaatttagggaggatccagaagaaaccaaagacgaagcatcccagttcttgggtatttcctgaaacagaagaaaatgacaaaggcccaggaatcactgaccctggaggatgtggctgtggacttcacctgggaggagtggcagttcctgagccctgctcagaaggacctgtaccgggatgtgatgttggagaactacagcaaccttgtgtcagtggggtatcaagccggcaaacctgatgccctcaccaagttggaacaaggagaaccactatggacactagaagatgaaatccacagtccagcccacccagaaattgagaaagctgatgatcatctgcagcagcccttgcaaaaccaaaaaatactgaagaggacgggacaacgctatgaacacggaagaactttgaaatcatatttaggtttaaccaaccagagcagaagatacaacagaaaggagcctgctgagtttaatggagatggagcttttctccatgataatcatgaacaaatgcctacggaaattgaattccctgaaagtagaaaacccatcagcaccaagtcacaattccttaaacatcagcaaacacacaacatagagaaagcccatgaatgcactgactgtgggaaagctttcctcaagaagtctcagctcactgagcataagagaattcatacaggaaagaaaccccacgtgtgtagcttgtgtgggaaagccttctacaagaagtacaggctcactgaacacgagagagctcacaaaggagagaaaccatacgggtgcagtgaatgtgggaaagccttccccaggaaatctgagcttactgaacatcaaaggattcacacgggaattaagccccatcaatgcagcgaatgtgggagagctttctccagaaaatcactactcgttgtacatcagcgaactcatacaggagagaagcctcatacatgcagtgaatgtggaaaaggcttcattcagaagggcaatctcaacatacatcaacgaactcacactggagagaaaccttatggatgcattgactgtggcaaggccttcagccagaagtcttgccttgtagcacatcagagatatcatacaggaaagactccctttgtatgtcctgaatgtgggcaaccctgttcacagaagtcaggactcattagacatcagaaaattcactcaggagagaaaccctataaatgcagtgactgtgggaaagccttccttacaaagacaatgctcattgtacatcacagaactcacacgggagagagaccctatggctgtgatgagtgtgagaaagcttacttctatatgtcttgccttgttaaacataagagaatacactcaagggagaaacggggggattcagtgaaggtggaaaatccttccacagcaagtcacagcttaagtcctagtgaacatgtgcaggggaaaagccctgttaatatggtaactgtggcaatggtggcagggcagtgtgagtttgcccacatcctgcattcatgataaacagtttgctgtttgatcatatagcctccagcggaatgctgagtttgtcatgtcccatgggcctttggctccctgcactaatatgtatagtagggtttacaagatatgaaatatattttacttttttatatcttataaacctcactacccctcccacaatattgtttttcatttactatcttgatcatagagtttggctggggaggggggcagttttagaggcttccacttggtgttcctcagaatgatatctcttactccgggggccaaggtaggggttagcttttgttctctttgtagtttagattgtatctcttgccttgttcaagttcacaaatctttttgtgtatacacatatgtacatgaaaatgatgttcatgctttttattattttacccttcattatttcattttttatagttctcatagctatgtctttcagttcactaatcttttttccacagtgtttaatctgtcattaatcccatccaaagtatgttttctctcagaaattgtaatttttaacctctaataatttgacatgggtttttccctgttata

SEQ ID NO: 203331 - DNA, 564 bp, Homo sapiens
  Payload ID: 20096
  Gene Name: zinc finger protein 649
  ENST ID: ENST00000596690
  CDS Start-End: 442-564
atgtcccatcgtcctagcgcggcagaattgactcgcgccctcgtccgccgccataggccagtgccggggtttaagggccaggaaaggaagcattcagggaatttaggtgtagccagaagaaaatcaggtcctggctccccagaagcaagagagttcaaatgaaggaaggaggaggttcctggatgtggatgtcatcatttctgggaacactcttaaatggagactcagatttcttagccaaaatttagggaggatccagaagaaaccaaagacgaagcatcccagttcttgggtatttcctgaaacagaagaaaatgacaaaggcccagttcacatgtgaccagtgttggaatataatgtgcgactctgccagaccctgttggctacattaagtgtcagcttgtgtccaaaatctttggccaccatcacacccagagaatcatggaatcactgaccctggaggatgtggctgtggacttcacctgggaggagtggcagttcctgagccctgctcagaaggacctgtaccgggatgtgatgttggagaactacagcaaccttgtg

SEQ ID NO: 203332 - DNA, 546 bp, Homo sapiens
  Payload ID: 20096
  Gene Name: zinc finger protein 649
  ENST ID: ENST00000595418
  CDS Start-End: 405-546
agaattgactcgcgccctcgtccgccgccataggccagtgccggggtttaagggccaggaaaggaagcattcagggaatttaggtgtagccagaagaaaatcaggagtttccttgagcaatgaacgattcgcgaattgggcagcccccagaatcacagcagattaacagagactccaggggtgcctcgtggtcagaacaaatttatagacaaaaaaggtcctggctccccagaagcaagagagttcaaatgaaggaaggaggaggttcctggatgtggatgtcatcatttctgggaacactcttaaatggagactcagatttcttagccaaaatttagggaggatccagaagaaaccaaagacgaagcatcccagttcttgggtatttcctgaaacagaagaaaatgacaaaggcccaggaatcactgaccctggaggatgtggctgtggacttcacctgggaggagtggcagttcctgagccctgctcagaaggacctgtaccgggatgtgatgttggagaactacagcaaccttgtgtcagtgg

SEQ ID NO: 203333 - DNA, 730 bp, Homo sapiens
  Payload ID: 20096
  Gene Name: zinc finger protein 649
  ENST ID: ENST00000599530
  CDS Start-End: 601-730
gcagaattgactcgcgccctcgtccgccgccataggccagtgccggggtttaagggccaggaaaggaagcattcagggaatttaggtgtagccagaagaaaatcaggtcctggctccccagaagcaagagagttcaaatgaaggaaggaggaggttcctggatgtggatgtcatcatttctgggaacactcttaaatggagactcagatttcttagccaaaatttagggaggatccagaagaaaccaaagacgaagcatcccagttcttgggtatttcctgaaacagaagaaaatgacaaaggcccaggtaacttttggtttgttttattcttaactcgattccctgatggatttgtggaagtctgaagaaatcagttcatttacattaaaagtataaattggaaaaaatgagctctggggagaaacagacttagactgtacctttaatccaggacaaagtgggatcacaaatactttgttcacatagttcacatgtgaccagtgttggaatataatgtgcgactctgccagaccctgttggctacattaagtgtcagcttgtgtccaaaatctttggccaccatcacacccagagaatcatggaatcactgaccctggaggatgtggctgtggacttcacctgggaggagtggcagttcctgagccctgctcagaaggacctgtaccgggatgtgatgttggagaactacagcaaccttgtgtcagtgg

SEQ ID NO: 203334 - DNA, 5988 bp, Homo sapiens
  Payload ID: 20097
  Gene Name: zinc finger protein 652
  Uniprot ID: Q9Y2D9
  ENST ID: ENST00000362063
  CDS Start-End: 320-2140
gcggggagccggcggttatctgggcggcggagcgctcacaatgtggcaggagacagaaaagataagatgctcccaagtcccttgcagctctcttcagaagaaaaatcactagtgctctgctcttgccataataccaaacctttttgactcatgctttggtgctgcaacactggaagaattgcacacagtttccaggaatatctttttttcatttgagtgattctttgtggatgagaaaagatttgagtcttaataattaccttgttttaaagctatttctttatagtctgaactgtttaataaattgggccacttaccaatgagccacacagccagttcttgtcaggagctggttgaaaactgtgctgtgcatgtagcaggaatggcacaagaagatagccgtcgtggtcaagtgccatcttccttttatcatggtgccaaccaagaacttgacctgtccaccaaagtgtacaaaagggaatcaggaagtccttattctgtgttagtggacaccaagatgagcaaaccgcatctccatgaaacagaagaacagccatatttcagggagacaagagcagtgtctgacgtgcatgctgttaaggaagaccgggagaattctgatgacacagaggaggaagaggaagaagtctcttacaaaagggagcagatcatagtggaggtaaaccttaataatcaaacattaaatgtatctaaaggggaaaagggtgtctcttctcagtccaaagagactcctgttcttaagacaagcagtgaggaggaagaggaagagagtgaggaagaggccacagatgacagcaatgactatggagagaatgaaaagcagaagaaaaaggagaagatagtagagaaagtcagcgttacacaaaggagaaccaggagagctgcctctgttgccgcagctaccacttcccctactcccagaactacaagaggtcgtaggaagagtgtagagccacctaagcgtaagaagcgggccacaaaggagcccaaagcaccagtccagaaagctaagtgtgaagagaaagagactctgacctgtgagaagtgccccagggtatttaacactcgctggtacctggagaagcacatgaacgttactcataggcgcatgcagatttgtgataaatgtggcaagaagtttgtcctggaaagtgagctgtcccttcaccagcaaacagactgtgaaaaaaacattcagtgtgtttcctgtaacaaatcgttcaagaaactctggtcccttcatgaacatatcaagatcgtccatggatatgcagaaaagaaattttcctgtgaaatttgtgagaagaaattctataccatggctcatgtgcggaaacacatggttgcacacacaaaagacatgccatttacatgcgaaacctgtggaaaatcattcaaacgcagtatgtcactcaaggtgcactccttgcagcattctggagagaagccctttagatgcgagaactgtgacgaaaggtttcagtacaagtaccagctacgctcccacatgagcattcatattgggcacaaacagttcatgtgccagtggtgtggcaaggatttcaacatgaagcagtacttcgacgaacacatgaaaacacacactggagagaaaccctttatctgtgaaatctgtggcaaaagcttcaccagccgccccaacatgaagagacaccgcagaactcacacaggcgagaagccctatccatgtgatgtgtgtggccagcggttccgcttctcgaacatgcttaaggcccacaaggagaagtgctttcgggtgaccagccccgtgaatgtgccacctgctgtccagatcccacttacaacttccccagccaccccagttccttctgtggtgaacacagccacaaccccaacccctccaatcaatatgaatcctgtaagcactcttccccctcggcccatcccccaccccttctcacacctgcacatccacccacaccctcaccacccacaccaccttcccatccctccagtccctcacctcccgccacctccagctctctttaagagtgagcctttaaatcatagaggccagagtgaggacaactttctgcggcacctggcagagaagaacagttcagcacagcatcattaacatccgtctccttagtgtgttctccaggagacacgtccccatgtgtgagcgtgcacagagggagtcggtgagcatttccttagttctcagactctcctccgcctctaccaagagcttcgccagtgtcactgaatcaacagatccaagggaatgaacaagaagactaccttgagctcacagagggactgtcatctaaaccaggggaaccactgaactaaagcccaatttgcttgcattttctgatgacttttataagtttcaaatactcagacttgtggaattttataatttcatatcagctgatgaggtatgcttgcttttatatcccagacttctcctcaaagaggggataggcctggtttcctttgtactaatcgggaaggctgtgagattaatccagagcattaattgtatcactgtgtatggtaaggaattcttttcagcttttggtgccagctacagagttgagctggccatgtttcacagtatatcaagcattatagagaaagacagaaattttcttctttgtgtagctctcctaacgcactctttattttactacagaaattattttagagtttttgtatagacttctttggtagtctgtttctaaaatgaaatgtatttcaataagcagtgtaattttttcagtgtagctgaacctatgttgtaaaatagaaaaaaatttttataatcatcaaaatgtgattcttaaagatgcatataacttctataattcaaagctattcttacatccgtacaactcaaaaggtgcttcagagactagatgtatctgagagggtctccagaccaggttactgcaaaaatgaggttttgctttcaggatttggcgtaaatacttggtagttttgacatctctgcttaacactcaagagaggctccctaatgtgctcctgtcctccatgttctgcttggcttcgttagtgcattacatgaaatgatttgcaggggatggggccttttccagggaagtcacctaaagcttgcatgttttgaaaatttgaataaggctgtttgctgacaggaggaggaagtagtggagatcatttcatctcagtcacgtctgtttctcacttcccttaggaattgtgttgatgtttaacttttatgggatgacaaattgaaatcgctcattttgaggttgctttatttttctagaattgttataagaagctaaaatagtaaacttaaaatcacaaacatgacattgctgatagtggctgagaaattcagatgagaagacaaattggttatgaattttgaaatatctattatatgtaaaatgtggatatgttcacaaccttgagctattttaacacagtttaaatatagtgagggaaaactcctaagttttactgccctgtcctctgcaaattatgtaataccagcattcttaggcgataaagagagcagcacctctagtacctttaggcagattactttttcaagtttggggaacttcaaaagaccataatcaaccaggagcttattataggaaaggctgaacagaagggctagtgtattgattacacttaacagatcatatttatccagactcagtatagcttaaaattttgtatttctttatctgagagaactgagttcccaggctaaatcacttacctcccaccccctctccaattttttttttaagagacaaggtcttgctatgttgcccaggctagagtgcagtggctattcacaggtgcagttatagcacactacagcctccaactcttgggttcaagcaaccctgcctcagctaaccaagtagctgggactacaggtgcatgctaccatgcccagtccattttttaatcttgaaatttcttcatttttctttcttcggtttcttaaaatctttgcctgaatcagaacgctggcttttatttatttttttatttttaatattaaatgtgcagatatgcttcgagcacttttctaactaatgagctctgtggtaagaaaaaatgaactctttcaattgagattaagtccatatttttcaaacatcacgttctctattggctttttggtttagtgtttctaaattttctccttctgattttgcctgtcttatataatgagcataggaaaattttggaatgaggcagaaaagtatatcaagacatacttcctggttttggatgtaagttttaaagaatggtatttttaatatttgtacacattctttgagcacccaggtacccaagccaataaggaaagttaattccttgcatatgactgttatatctttagtggttgtctccctctccctccacagtctccttggcattccatgacaagtttgtcaacctacacttttatatagacatatcattatttcatggtcaagcctgtagtattaaaatgatttttttaaaagatgtaaactgtgcttagttaattggttatattttgttctgttttttttttttttttttttttttttttgaggcagagtcttgttctgttgcctgggctggagtgcagtggcgtgatcttggctcactgcaacccccgccccccgggttcaagtgattctcctgcctcagcctcccgagtagctggaattacaggcatgcgccagcacgcccggctaagttttgtatttttggcagagatggggtttcaccatattggccaggctggtctcaaactcctgaccttgtgatccgcccacctcagcctccgaaagtgctgggattacaggcgtgagccaccacgtccaactgccttattttgttctgaataaatttacagtattgggcagcaattctggattctagacttgagaccacagaatcaaccatttcatgaggttgtactgtaattatacactggaatattcaggtagtcatctttgatttttcattcaagtaaatatagccataagaaaatatctgctatacaggaaaaccagtattaagcaaataccaccatccttaacagaaacaaaaatatatatatatattatttttaaaaattagcattgtcatacagtacaattcttagtgaagtgtattgtggaacaatttagaaacttcctttttttcccctagattaaggatactttccttgacttgagacttgtggtcttcaggaaaactactcagaatataatgactcctcatcagtatcatattgtatataaataatgaaatgcattaagaatattcacaacattgaacccaggaggcggagcttgcagtgagccgagattgcgccactgcgctccagcctgggcaacagagcgagactccatctcaaaaaaaaaaaaaaaaagaatattcacaacattaatgcttctgaatagaagaactgcaggattaagccttaaacatatatgtgcaacacgtttaacatgcttaagactcaaactcagggttgaaaatttggttggggtcctctttgtaagataaaagttgcattatgtggtatgttctcttccatatatgctacagcaccccatgaattcttcaaaactttttacctacttgttatctgtttatgaaaaaaagaattatggagaagtttgagttctcagcccttatctgtacatgtctgttaaagacaacaaaggctgcatttaagcattatatagataacaaattgaggctgtctctcgttacttagttttactgtcttcaaaggcttgtatcattgctagggttaagacttatttgaggatgagttggcattgtattttttgtgtgtgtgggttggtttgtatttgtttcgtttttatttttctattttctctcatagatttatcagtaaaatataaactcttccttagccttaataaaggctgctgctttctcaaa

SEQ ID NO: 203335 - DNA, 4701 bp, Homo sapiens
  Payload ID: 20097
  Gene Name: zinc finger protein 652
  Uniprot ID: Q9Y2D9
  ENST ID: ENST00000430262
  CDS Start-End: 467-2287
ggagcggcggccacgtagcgctgcggcggcagcggcagcggccgaggccgggtctgaggagcggccctgaggacagacgttgggcagggggggaggggctggcccagccggcggttgtgactcgagcgccgcggctgcaggcccccgccgcagggatggaccgccgaggcggcggccggggcggcggaggcggaggcggccggcccggataagatgctcccaagtcccttgcagctctcttcagaagaaaaatcactagtgctctgctcttgccataataccaaacctttttgactcatgctttggtgctgcaacactggaagaattgcacacagtttccaggaatatctttttttcatttgagtgattctttgtggatgagaaaagatttgagtcttaataattaccttgttttaaagctatttctttatagtctgaactgtttaataaattgggccacttaccaatgagccacacagccagttcttgtcaggagctggttgaaaactgtgctgtgcatgtagcaggaatggcacaagaagatagccgtcgtggtcaagtgccatcttccttttatcatggtgccaaccaagaacttgacctgtccaccaaagtgtacaaaagggaatcaggaagtccttattctgtgttagtggacaccaagatgagcaaaccgcatctccatgaaacagaagaacagccatatttcagggagacaagagcagtgtctgacgtgcatgctgttaaggaagaccgggagaattctgatgacacagaggaggaagaggaagaagtctcttacaaaagggagcagatcatagtggaggtaaaccttaataatcaaacattaaatgtatctaaaggggaaaagggtgtctcttctcagtccaaagagactcctgttcttaagacaagcagtgaggaggaagaggaagagagtgaggaagaggccacagatgacagcaatgactatggagagaatgaaaagcagaagaaaaaggagaagatagtagagaaagtcagcgttacacaaaggagaaccaggagagctgcctctgttgccgcagctaccacttcccctactcccagaactacaagaggtcgtaggaagagtgtagagccacctaagcgtaagaagcgggccacaaaggagcccaaagcaccagtccagaaagctaagtgtgaagagaaagagactctgacctgtgagaagtgccccagggtatttaacactcgctggtacctggagaagcacatgaacgttactcataggcgcatgcagatttgtgataaatgtggcaagaagtttgtcctggaaagtgagctgtcccttcaccagcaaacagactgtgaaaaaaacattcagtgtgtttcctgtaacaaatcgttcaagaaactctggtcccttcatgaacatatcaagatcgtccatggatatgcagaaaagaaattttcctgtgaaatttgtgagaagaaattctataccatggctcatgtgcggaaacacatggttgcacacacaaaagacatgccatttacatgcgaaacctgtggaaaatcattcaaacgcagtatgtcactcaaggtgcactccttgcagcattctggagagaagccctttagatgcgagaactgtgacgaaaggtttcagtacaagtaccagctacgctcccacatgagcattcatattgggcacaaacagttcatgtgccagtggtgtggcaaggatttcaacatgaagcagtacttcgacgaacacatgaaaacacacactggagagaaaccctttatctgtgaaatctgtggcaaaagcttcaccagccgccccaacatgaagagacaccgcagaactcacacaggcgagaagccctatccatgtgatgtgtgtggccagcggttccgcttctcgaacatgcttaaggcccacaaggagaagtgctttcgggtgaccagccccgtgaatgtgccacctgctgtccagatcccacttacaacttccccagccaccccagttccttctgtggtgaacacagccacaaccccaacccctccaatcaatatgaatcctgtaagcactcttccccctcggcccatcccccaccccttctcacacctgcacatccacccacaccctcaccacccacaccaccttcccatccctccagtccctcacctcccgccacctccagctctctttaagagtgagcctttaaatcatagaggccagagtgaggacaactttctgcggcacctggcagagaagaacagttcagcacagcatcattaacatccgtctccttagtgtgttctccaggagacacgtccccatgtgtgagcgtgcacagagggagtcggtgagcatttccttagttctcagactctcctccgcctctaccaagagcttcgccagtgtcactgaatcaacagatccaagggaatgaacaagaagactaccttgagctcacagagggactgtcatctaaaccaggggaaccactgaactaaagcccaatttgcttgcattttctgatgacttttataagtttcaaatactcagacttgtggaattttataatttcatatcagctgatgaggtatgcttgcttttatatcccagacttctcctcaaagaggggataggcctggtttcctttgtactaatcgggaaggctgtgagattaatccagagcattaattgtatcactgtgtatggtaaggaattcttttcagcttttggtgccagctacagagttgagctggccatgtttcacagtatatcaagcattatagagaaagacagaaattttcttctttgtgtagctctcctaacgcactctttattttactacagaaattattttagagtttttgtatagacttctttggtagtctgtttctaaaatgaaatgtatttcaataagcagtgtaattttttcagtgtagctgaacctatgttgtaaaatagaaaaaaatttttataatcatcaaaatgtgattcttaaagatgcatataacttctataattcaaagctattcttacatccgtacaactcaaaaggtgcttcagagactagatgtatctgagagggtctccagaccaggttactgcaaaaatgaggttttgctttcaggatttggcgtaaatacttggtagttttgacatctctgcttaacactcaagagaggctccctaatgtgctcctgtcctccatgttctgcttggcttcgttagtgcattacatgaaatgatttgcaggggatggggccttttccagggaagtcacctaaagcttgcatgttttgaaaatttgaataaggctgtttgctgacaggaggaggaagtagtggagatcatttcatctcagtcacgtctgtttctcacttcccttaggaattgtgttgatgtttaacttttatgggatgacaaattgaaatcgctcattttgaggttgctttatttttctagaattgttataagaagctaaaatagtaaacttaaaatcacaaacatgacattgctgatagtggctgagaaattcagatgagaagacaaattggttatgaattttgaaatatctattatatgtaaaatgtggatatgttcacaaccttgagctattttaacacagtttaaatatagtgagggaaaactcctaagttttactgccctgtcctctgcaaattatgtaataccagcattcttaggcgataaagagagcagcacctctagtacctttaggcagattactttttcaagtttggggaacttcaaaagaccataatcaaccaggagcttattataggaaaggctgaacagaagggctagtgtattgattacacttaacagatcatatttatccagactcagtatagcttaaaattttgtatttctttatctgagagaactgagttcccaggctaaatcacttacctcccaccccctctccaattttttttttaagagacaaggtcttgctatgttgcccaggctagagtgcagtggctattcacaggtgcagttatagcacactacagcctccaactcttgggttcaagcaaccctgcctcagctaaccaagtagctgggactacaggtgcatgctaccatgcccagtccattttttaatcttgaaatttcttcatttttctttcttcggtttcttaaaatctttgcctgaatcagaacgctggcttttatttatttttttatttttaatattaaatgtgcagatatgcttcgagcacttttctaactaatgagctctgtggtaagaaaaaatgaactctttcaattgagattaagtccatatttttcaaacatcacgttctctattggctttttggtttagtgtttctaaattttctccttctgattttgcctgtcttatataatgagcataggaaaattttggaatgaggcagaaaagtatatcaagacatacttcctggttttggatgtaagttttaaagaatggtatttttaatatttgtacacattctttgagcacccaggtacccaagccaataaggaaagttaattccttgcatatgactgttatatctttagtggttgtctccctctccctccacagtctccttggcattccatgacaagtttgtcaacctacacttttatatagacatatcattatttcatggtcaagcctgtagtattaaaatgatttttttaaaagatgtaaa

SEQ ID NO: 203336 - DNA, 4543 bp, Homo sapiens
  Payload ID: 20097
  Gene Name: zinc finger protein 652
  ENST ID: ENST00000508237
  CDS Start-End: 468-1748
gagcgccgcggctgcaggcccccgccgcagggatggaccgccgaggcggcggccggggcggcggaggcggaggcggccggcccggtggtctggagccgaaccggcaatatctctgaggtgtgactgttctctcagcttcatcaaatataaagtggaaagagttttgttcatgaagccactgaatgaaccattgcttgccttaaaggaagataagatgctcccaagtcccttgcagctctcttcagaagaaaaatcactagtgctctgctcttgccataataccaaacctttttgactcatgctttggtgctgcaacactggaagaattgcacacagtttccaggaatatctttttttcatttgagtgattctttgtggatgagaaaagatttgagtcttaataattaccttgttttaaagctatttctttatagtctgaactgtttaataaattgggccacttaccaatgagccacacagccagttcttgtcaggagctggttgaaaactgtgctgtgcatgtagcaggaatggcacaagaagatagccgtcgtggtcaagtgccatcttccttttatcatggtgccaaccaagaacttgacctgtccaccaaagtgtacaaaagggaatcaggaagtccttattctgtgttagtggacaccaagatgagcaaaccgcatctccatgaaacagaagaacagccatatttcagggagacaagagcagtgtctgacgtgcatgctgttaaggaagaccgggagaattctgatgacacagaggaggaagaggaagaagtctcttacaaaagggagcagatcatagtggagtgtgtttcctgtaacaaatcgttcaagaaactctggtcccttcatgaacatatcaagatcgtccatggatatgcagaaaagaaattttcctgtgaaatttgtgagaagaaattctataccatggctcatgtgcggaaacacatggttgcacacacaaaagacatgccatttacatgcgaaacctgtggaaaatcattcaaacgcagtatgtcactcaaggtgcactccttgcagcattctggagagaagccctttagatgcgagaactgtgacgaaaggtttcagtacaagtaccagctacgctcccacatgagcattcatattgggcacaaacagttcatgtgccagtggtgtggcaaggatttcaacatgaagcagtacttcgacgaacacatgaaaacacacactggagagaaaccctttatctgtgaaatctgtggcaaaagcttcaccagccgccccaacatgaagagacaccgcagaactcacacaggcgagaagccctatccatgtgatgtgtgtggccagcggttccgcttctcgaacatgcttaaggcccacaaggagaagtgctttcgggtgaccagccccgtgaatgtgccacctgctgtccagatcccacttacaacttccccagccaccccagttccttctgtggtgaacacagccacaaccccaacccctccaatcaatatgaatcctgtaagcactcttccccctcggcccatcccccaccccttctcacacctgcacatccacccacaccctcaccacccacaccaccttcccatccctccagtccctcacctcccgccacctccagctctctttaagagtgagcctttaaatcatagaggccagagtgaggacaactttctgcggcacctggcagagaagaacagttcagcacagcatcattaacatccgtctccttagtgtgttctccaggagacacgtccccatgtgtgagcgtgcacagagggagtcggtgagcatttccttagttctcagactctcctccgcctctaccaagagcttcgccagtgtcactgaatcaacagatccaagggaatgaacaagaagactaccttgagctcacagagggactgtcatctaaaccaggggaaccactgaactaaagcccaatttgcttgcattttctgatgacttttataagtttcaaatactcagacttgtggaattttataatttcatatcagctgatgagggtcccaggccataaaacaacggagagctgtacttgcttgtcacttggaggaaccacatccttgagacagcctgctgtcttgtatgtcttcagtaggaaacttctgacacacacattcaagggagttcctgcccctgagaagtgttcccatagctttccagtcgcaggttactttcacactacgtcagcttctctggtgagatcagggatgttacatattacttgaaaatgatttcataggaagtgaggatggggcaagaaaggaggtagaagctgaattttgcttaacttcagaaggaaatctgatacttgccttggctagttctgatcaactaaagagcctgtgtctgtactggatgtgccaaagagtcaagttgtttctggaatatccagctcctctgaatgaacacagcttcctccctacctgtcttttatgggtgaaaagggaccgtctgatgagcatgatagacatcctgtacaggactcaagactgtttcattgcatttgaaagttggtgggaagtattttattctgctagagctcctaaccctcctagaaatatcttttcatgctctattaattcaattcattagtttaaaaagaaacagtgtgacataattttggtgtttacttcttaagttgtctccccaagggcatatatgtagcctctgaaaatgggatgatttcttctcaatcttccataaatttgaatatgcattttattcatttcttgacatgggctgtgtgactgttttccatcagcagttctggctttgtccacaagggagcaataaagtacgttagctttattctcaaccttctaaagaaagatcccacttttaaatctcttctggaatagcctcttagctcaaagcttattcatgtattttgattatttaagaaattttcccttattacaaagtccagtcgtcgttcatccctcatgatgccaagcaatgattgatgtgtgggtgtggagtccttgtgggtcaggcatcttaattaattagactttttacatattgatgatccccagattgaaagccaggaccttcccataggggcgcctttgtgtgctaaaggcagagcaggcaggcttctccactcctatctcctccgcaggccaccaccatcacatctataggaggaacaagagcactgggggaactctggagtatgagtaaggaaatgcttctcaccttctctgctccaaagagatatctgttacatcagggaacaagtcctctaggtcaggcacttcctcctgaccagtgcaacgggcactccaggttagaaactgtgtgtgctccctctctgtcagttacttgtctaagggctcctatccgtggtcatcagctctctggccatgagttctgtttgtgcttattgcagcagcatcttcacaacaaacaggtcagtaatcaacctgggaagggaaaagacgacagtaaatattaccccctgtagagccgggaggcatttacacctggaatggccttcttaactgatttctgcctggccacctcacccccagccaagtctgaacctgagcaataccaggcacagagaggtgtctacttgtaactccaacacttgacaaaaaacaaaactgaagctgtgattggtttaggcagcaagtggccaggtgcaacttgtttgtttttatttttgttttccccaacagtactgagatcacttgcacttttcctcatttcttaagaaaatccagtttgcttgccatgacttgtttagcgttaggtttacaaagcttgttgttgaatgttgaatatttgtccaaaggagtttgacaaaatagaagctgcttggtccctgttctgcctgctaggtcataaggatgaaggccatgtggctggggtacttatgtcaagtccagaatggggcagtgtccctctcctacctctctgcggagacgcaattgaaggtcaagtagactcagtgtagggcaggcagctgtcatgctgcaaagaagtttagaggagtctttgggttggggaggtgacaggtaggtaggacaggatctcttaagatgggaaagatactggggagaggagggctgcttggccccagggaactgcagtgaggtggaactgagctccgctcctgaatctccaaaggagcccatgctgcccggcttccctgagtcattttttccagcatcctgtcagatccctcaatgtactgatttcccccttgtgttaactataccgatattatttttttagcaattgaaatgcacttttttatttcaactcaatcatgattttaagtataaaaaatttatagattgttaaaactacttttttgtgtatttttaaccactcaatgtagcattgtatattttattcttgtgagactctggtacaggtgtgccgcctaatgatttttctgagatgctgggcctttggatgtgtacggtaaccaacttaatgctaatgttcaaagtaaaaaaaaaaaaaaaaagcagcca

SEQ ID NO: 203337 - DNA, 2240 bp, Homo sapiens
  Payload ID: 20098
  Gene Name: zinc finger protein 653
  Uniprot ID: Q96CK0
  ENST ID: ENST00000293771
  CDS Start-End: 138-1985
agtttccattcttggtctccttttggcgccctggggcagcgagagaccgtgagaaatttctcggcggcgccgaagatgcgcgccacttccggtctggctcctaacaacgggggaggctggtaaccagggtgggggggatggcggagcgggcgctagagcccgaggcggaggcggaggctgaggcgggcgcgggcggggaggcagcagccgaggagggcgcagcgggccgaaaggcgcggggccggccgcgactcacggagtcggaccgggcccggcgacggctcgagtcccggaagaagtacgacgtgcggcgcgtgtacctgggcgaggcgcacgggccctgggtggacctgcggcgccgcagcggctggagcgacgccaagctcgccgcctacctcatctctctggagcgcggccagcggagcggccgccacgggaagccttgggagcaggtccccaaaaagccaaagcggaagaaaaggcggcgacgcaacgtgaactgcctgaagaacgtggtgatctggtacgaggaccacaagcaccgctgcccgtacgagccgcacctggcggagctagaccccacttttggcctgtacaccacggccgtgtggcagtgcgaagctggccaccgctacttccaggacctgcattcgcccctgaagcccctcagcgactcagaccctgacagtgacaaagtgggcaatgggctggtggctggcagctctgactcatccagctctggctctgcctctgactctgaggagtctcctgagggccagccggtcaaggctgcggcagcggcagcggcagcgacgcccaccagcccggtgggcagcagcgggctcatcactcaggagggcgtgcacattccctttgacgtccaccacgtggaaagcctggccgagcagggtaccccgctgtgctccaacccagcaggcaatgggcctgaagccctggagacagtggtgtgcgtgccggtgcctgtgcaagtgggtgcgggccccagcgccctctttgagaacgtgccccaggaggccctgggtgaggtggtggccagctgccccatgccaggcatggtgcccggctcacaggtgatcatcattgcgggccctggttacgacgctctcacggccgagggcattcacctcaacatggcagcaggcagcggtgtccccggcagtggactgggcgaggaggtgccctgtgccatgatggagggtgtggcagcctacacccagacagagcccgagggtagccagcctagcaccatggacgccaccgcagtagcaggcatcgagaccaagaaagagaaggaggacctgtgcttgctaaagaaggaggagaaggaggagccagtagccccggagctggcaacaacggtgcctgagagcgcagagcctgaggcagaggcggacggggaggagctggacggcagcgacatgtcagccatcatctatgaaatccccaaggagcctgagaagaggcggcggagcaagcggtcgcgggtgatggatgctgacggcctgctcgagatgttccactgcccatacgagggctgcagccaagtctacgtggccctcagcagcttccagaaccacgtcaatcttgtgcatcggaaaggaaagaccaaagtgtgccctcatcctggctgtggcaagaagttctatttatccaaccacctgcggcggcacatgatcatccattcaggtgtccgtgaattcacctgcgagacctgcggcaagtccttcaagaggaagaaccacctggaggtacatcggcgcacccacaccggcgagacccccctgcagtgcgagatctgtggctaccagtgccggcagcgcgcgtcgctcaactggcacatgaagaagcacactgcggaggtgcagtacaacttcacgtgcgatcgctgcgggaagcgcttcgagaagctggacagcgtcaagttccacacgctcaaaagccacccggatcacaagcccacctgacccacctgaccactgaccgcccctatttattcgtccgctcggacaccacgcccgggcttgccggggcctggacagctgcgagggccgcccggaccgcgggccggaaggaggcgcccccgccccgccccagagctgggccccctgggcaggttccccaccccgccccaccgcatccttctcggagctggtgcctggggctgcattgctggaactgtgtcaagagagcagagtgagattaaagagcgagaaaggaga

SEQ ID NO: 203338 - DNA, 674 bp, Homo sapiens
  Payload ID: 20098
  Gene Name: zinc finger protein 653
  ENST ID: ENST00000590296
  CDS Start-End: 1-652
cgagatgttccactgcccatacgagggctgcagccaagtctacgtggccctcagcagcttccagaaccacgtcaatcttgtgcatcggaaaggaaagaccaaagtgtgccctcatcctggctgtggcaagaagttctatttatccaaccacctgcggcggcacatgatcatccattcaggtgtccgtgaattcacctgcgagacctgcggcaagtccttcaagaggaagaaccacctggaggtgcgagatctgtggctaccagtgccggcagcgcgcgtcgctcaactggcacatgaagaagcacactgcggaggtgcagtacaacttcacgtgcgatcgctgcgggaagcgcttcgagaagctggacagcgtcaagttccacacgctcaaaagccacccggatcacaagcccacctgacccacctgaccactgaccgcccctatttattcgtccgctcggacaccacgcccgggcttgccggggcctggacagctgcgagggccgcccggaccgcgggccggaaggaggcgcccccgccccgccccagagctgggccccctgggcaggttccccaccccgccccaccgcatccttctcggagctggtgcctggggctgcattgctggaactgtgtcaagagagcagagtgagattaaagagcgagaaaggaga

SEQ ID NO: 203339 - DNA, 636 bp, Homo sapiens
  Payload ID: 20098
  Gene Name: zinc finger protein 653
  ENST ID: ENST00000588541
  CDS Start-End: 1-104
gcggccgccacggacggagactgaggctcagaggggacaagacctgcttgaggtcacacaggcagttgagagcagagctgagtcttgaacttgggtctggctgatacccaagactgtccccactgcaatgtgacactcccagcctccagcggaagccttgggagcaggtccccaaaaagccaaagcggaagaaaaggcggcgacgcaacgtgaactgcctgaagaacgtggtgatctggtacgaggaccacaagcaccgctgcccgtacgagccgcacctggcggagctagaccccacttttggcctgtacaccacggccgtgtggcagtgcgaagctggccaccgctacttccaggacctgcattcgcccctgaagcccctcagcgactcagaccctgacagtgacaaaggtaggtctgcagggcgagggcacatagggggccgcccatttctgggggcttcttacgagccctaggctagcatcacaaacagaatagcagccacagtggctctggctctggctctggcactggggcagagcagggacacgatgggccaggctgagtccttcgtggccttgccctctttgcgtccttacagagcttgagtggggaggcagtccctctttatggagc

SEQ ID NO: 203340 - DNA, 581 bp, Homo sapiens
  Payload ID: 20098
  Gene Name: zinc finger protein 653
  ENST ID: ENST00000589051
  CDS Start-End: 1-218
agatgttccactgcccatacgagggctgcagccaagtctacgtggccctcagcagcttccaggtgtccgtgaattcacctgcgagacctgcggcaagtccttcaagaggaagaaccacctggaggtacatcggcgcacccacaccggcgagacccccctgcagtgcgagatctgtggctaccagtgccggcagcgcgcgtcgctcaactggcacatgaagaagcacactgcggaggtgcagtacaacttcacgtgcgatcgctgcgggaagcgcttcgagaagctggacagcgtcaagttccacacgctcaaaagccacccggatcacaagcccacctgacccacctgaccactgaccgcccctatttattcgtccgctcggacaccacgcccgggcttgccggggcctggacagctgcgagggccgcccggaccgcgggccggaaggaggcgcccccgccccgccccagagctgggccccctgggcaggttccccaccccgccccaccgcatccttctcggagctggtgcctggggctgcattgctggaactgtgtcaagagagcagagtgagattaaag

SEQ ID NO: 203341 - DNA, 534 bp, Homo sapiens
  Payload ID: 20098
  Gene Name: zinc finger protein 653
  ENST ID: ENST00000592756
  CDS Start-End: 1-508
gaaagagaaggaggacctgtgcttgctaaagaaggaggagaaggaggagccagtagccccggagctggcaacaacggtgcctgagagcgcagagcctgaggcagaggcggacggggaggagctggacggcagcgacatgtcagccatcatctatgaaatccccaaggagcctgagaagaggcggcggagcaagcggtcgcgggtgatggatgctgacggcctgctcgagatgttccactgcccatacgagggctgcagccaagtctacgtggccctcagcagcttccagaaccacgtcaatcttgtgcatcggaaaggaaagaccaaagtgtgccctcatcctggctgtggcaagaagttctatttatccaaccacctgcggcggcacatgatcatccattcaggtgtccgtgaattcacctgcgagacctgcggcaagtccttcaagaggaagaaccacctggaggtacatcggcgcacccacaccggcgagacccccctgcagtgagtgacaggccgccccgtgccgctaga

SEQ ID NO: 203342 - DNA, 4966 bp, Homo sapiens
  Payload ID: 20099
  Gene Name: zinc finger protein 654
  Uniprot ID: Q8IZM8
  ENST ID: ENST00000309495
  CDS Start-End: 208-1953
ctggaaaataatgcaggtaatctaaaaaggacggaggaacagcaaggtttggatgaagggtttgactctcttacagatcagagcactggagagactgatcctgatgatgtatctggagtgcagcctaaaggtcatattaatacgaagaaaaatcttacagctctcagtacttccaaagtagatcacaatgtcccaaggcatcgttgtatgttatgtaacaaggaatttttaggtggtcacattgtaaggcatgcccaggctcatcagaaaaaaggcagttttgcatgtgtaatatgtggtaggaaatttagaaacagaggacttatgcagaagcatttgaagaatcatgttaagaagatacagaggcagcaaattgctgcagctcaacaggatgatcaggaagtcactgctttggaagaaataaattgttctagttcttccatttcatttgaaaatgggaattctgatagtaaggatttggaagtggagacacttactgcttctagtgaaggaaacaaagaagtcatccctgagcatgtggctgaattcattgaaattcccataagtgtaccagaagatgttattgaaaatgttattgaaaatggcagtcctaataattctttaaataatgttttcaagcctttaactgaatgtggggatgattatgaggaggaagaggatgaagaaggtgattatgaagaagatgattatgacctgaatcaagaaacttcagtaattcataaaatcaatggaactgtgtgccatccaaaagacatatatgccacagatcaagaaggaaactttaagtgtcctgctcttggttgtgtccggatatttaaaagaattgggtttctaaataaacatgcaatgaccgtacatccaaccgatttaaatgtgcgacaaacagtaatgaagtggagcaaaggaaaatgcaaattttgtcaaaggcaatttgaagattctcaacattttatagaccaccttaatagacatagctatccaaatgtgtatttttgtttgcattttaattgcaacgagtcgtttaagctgccgttccagcttgcccagcacacaaaaagtcacaggatatttcaggctcagtgtagttttccagaatgccatgagctttttgaagatcttcctctgctgtatgaacatgaagctcaacactatttaagtaaaacaccagagtcatctgcacaaccaagtgaaacaattctttgggatgttcagacagactcaaatcctaatcaggaaaaagactcatctagtaatgagaaacaaactattagtctgccagtttctactagcaaatcaaggaaagagtctacagaaccaaagacatgtatagaaagtatggaaaagaaaacagacagtttagttcagaatggaaacgaacgttctgatgacactgtttcaaatataagcttgatagaccaaaagatgcctgacatagagccaaattctgaaaataattgtagtagtagtgatatagtcaatggacacagtgaaatagagcaaacacctttagtttcatcagatcctgctttgaaaattgatacaaacagaatcaggacagaaaatggttccattttgcccagtgttgtaccacaagaacacaacaccttgccagtatctcaggcaccttccaaaccaaatctgacaagtgaacatacttcatatggcttaattttaacaaaaccatacgtcagaccattgcctcccagttaccttgatgaacggtatcttagtatgccaaaacgcagaaaatttctgactgatagagtagatgcctgttctgatcaagataacgtgtataaaaaatcagtgaaaagattaagatgtggcaaatgcctgaccacctactgtaatgcagaagcacttgaggctcatcttgcacaaaagaaatgtcagacactctttggatttgattcagatgatgaaagtgcctgatgaaaacggttcagaaagatctgtcaatcaagcagtagtgtgaaaaaagcactataagaaaatgcatcatcagtttgctatttccctgatggccttaattttagagtggtcttggattactaaagataaagacaaagcacattttctagaatgaactcacagagatgtgctggcttagactccaaaaggattataaaactcccaaagtaccagttttccagaaaaccacattttacagtttatgatgattaatagcagcagcatgttcagtttcgcttatatgagaaacatgtttaggcaactagtcagaaaaccagctatggccttacagaaagggaaaaattaacccattattaaaaagtgtgtgtggggaggggggctggtttacaatattaaaccatttaaagtattttattctacaaatggggtttgttttcttgtcatgcataatcagattatgtcccctcccttctggttaaacatggtttaaggaaccgctgctgtttggtttgtgattgatttagaaacttatacattaacttaccacagtgctatcaattaaagattgtaacaggtttccagatgattaattaggtcaaagttcaatgaatggcacgccagcattgaaaattaaaaaacaaaacaaaaaaaaccacagtgctttgctaataagctcttgatagaacctcccactaaccacttttgtggtacaaattagttaacatttaaagggcagcagtgtcaataaaatagaaaaaaaccgatcagtactctggggagagatgaaaggaatctaagactttacaggctttgtagttgaaggaaaacactgaattgcaaattattcaatgtgaataatggtaaaagcacactgggatacttctgtttgtgtatatgttgggacattgcttgatgattcatagtaaggtcctttagacattaatgtgagttatctaagtacagtcctattaaaataactggctcaaaaaatcagctaagaatcaggttgagaaatcattcattttattctattaggagaggtaattccaaaataagccatactattcctgtttttttaattcattagtgatgactctggtctgaacagtaatttttatatgtaaaaggaagtatttacacaaaacatttgcacaagaacacagtaagagatacattcaagcattgttttccttagtgatgttattttcctaagaagattttaacttaataaagtgttaaaacaataaatatttttaaaaataccctctcagatgttttccatttgtccattattgaaaggaagatgcttaaagacttccttttactaatagtgtgtaaatctaaaacagggattaaaataacaaaaaggcagtgtttcaaaacagatctcctaatgtcccaatgtcaaatattccagttattctaaataataaaatctttgttcaaggcagataatctcatcagaccctattagagcttcttgaatgaggctattacggaagtggggaatttcttccaggtagcatccatattttattaaattaggatttccagatcatgatagatcagatgatttttttttaatttcccggttttattggtttatcatcagcattcactactatgcaatgatggtcataagtccattccaaatttaaatttgtttctgttatgtagcctatattaggctgtggaatttacatttaggtaactaaacacagctcataattaaaatcttttctttaaggtcagctaaaaaaaatgtttcctgtatttcttgatactaaaaatgtaatgatttttattttagttcattctaaaagtatgtcttgtaataaaaagtctgtttggaaactggttcatttggacagtgaagtcttttgaaatatttctgctttgtacattttccagaagtttaatattttatcacattttccacaagttgtaacaattgatataaatccatgcccacaaagtattccattttcattacttttactgttcatgccaagatgtttcaaatatattccatttgtaatctgtctttaacttgaggtttatttctacttttgtgttgctaaaattatttctgcaagactgagatcaaactggtttatatataactaaatcaaggaatgttttataaaattctatttgaccacactgtcttaacctcggtttatatacttctcaaatagctattgaaagaatgtgttcattttattacatctgtcttttaaaacataaacctacatcattttgcttttatagggtgcataaacttccaacagttctaatttgagcgcttcagaagaaaaggaagcttgcttcttattcctcagattcttctttttttctgttttgaggatgtattcatcctacatggaccaagtttcaaatctttgtttttaaataaaaatttccttcaaaaaattaaatgttaaatttctgctgtgtgtcagtaaggtgaagaaaatagcaaatctgaatttttgctgctcagatattatggaggaggtaaaaaggggaatctccgtggacaaggacactggtactttgggctttagccatattcatttttttgaaaccaccaattatataatacttaaataatttatatcattgaacttgtgattcttttcaaatcacactgaaggttcagccgtactcctttcatgtttggtttaatactgttgtatggatgaaaaacctaaaagggatgatagtgtttattttttaatttatttggtactgtaaaacaccttttcagaatgagtaaatgctgcatatgcattttggagttgttaatatgtgaaagatattacagattcagcaagaaaggaaatttgtgcttccttgttgaatgttaaattattttactttgcattttataagagtacaaattaaaactgagccattgaactgcaataaatcaacaatagtgtctcatttcaagaaattttttgtactgtacatagatttgttcaataaaacgtccttgttggtaatcaag

SEQ ID NO: 203343 - DNA, 2535 bp, Homo sapiens
  Payload ID: 20100
  Gene Name: zinc finger protein 655
  Uniprot ID: Q8N720
  ENST ID: ENST00000252713
  CDS Start-End: 238-1713
cctcatccggggctctcacccacatccgggaccctcatgcctgggcggaggagggggggccctcattcgggaccctgcactccgtcgccggaagtgccaccgagaagcgccggcctcggggctgtctacagcggcccgggagaggctgtggtggccccgagcgcgagtgtgtaggtgacaggacagcggccaggcccgcccctcccctcgtgatggtcattgtcctccagagcagtgatggaggaaataccagcccaggaagcagcagggtcaccaagggtccagtttcagtctttggagacccagtctgagtgtctgtccccagagcctcagtttgtgcaggacaccgacatggaacagggactcactggggatggagagaccagagaagagaacaagctgttgattcctaagcagaaaatttcggaagaagtgcattcatacaaagtgagagtaggaagactcaaacacgatattacccaagttcctgagactagagaagtgtataagtctgaggacagattagaaagacttcaggaaattctaaggaaatttctgtacctggagagagagtttaggcaaataacaatcagcaaggaaaccttcaccagtgagaagaacaatgaatgtcatgaacccgaaaaaagcttcagtctggactctactattgatgcagatcagagagttcttagaatacagaataccgatgacaatgataagtatgacatgagcttcaaccagaattcagcctctggtaaacatgaacacttaaatctaacagaggattttcagagtagtgaatgtaaggaaagcttaatggatctctcccaccttaataaatgggagagcatccctaacactgagaaatcctataaatgtgatgtatgtgggaaaattttccatcagagctcagcccttactagacatcagagaatccatactagagagaagccctacaaatgtaaagaatgtgaaaagtctttcagtcagagctcaagtcttagtcgacataaaagaatacacactagagaaaaaccttacaaatgtgaagcatctgataaatcctgtgaagcgtctgataaatcctgtagtccaagctcaggcataattcagcataagaaaattcacaccagagccaaatcttacaaatgtagcagttgtgaaagagtcttcagtcgtagtgtccaccttactcaacatcagaaaattcacaaagagatgccctgtaagtgtactgtatgtggcagtgacttctgccatacttcatacctacttgaacatcagagggtccatcatgaagagaaagcctatgagtatgatgaatatgggttggcctatattaaacaacaaggaattcatttcagagaaaagccctatacgtgtagtgaatgtggaaaagacttcagattgaattcacatcttattcagcatcaaagaattcacacaggagagaaagcacatgaatgtaatgaatgtggaaaagctttcagtcaaacctcatgccttattcagcatcacaaaatgcataggaaagagaaatcgtatgaatgtaatgagtatgagggcagtttcagtcatagctcagatcttatcctgcaacaagaagtcctcaccagacagaaagcctttgattgtgatgtatgggaaaagaactccagtcagagagcacatctagttcaacatcagagcattcataccaaagagaactcatgaatgtaatgaagatgggaagatatttatcaaattcaggcttcattcagcatctgagagttcacaccagggagaaatcatgtatgtactgcatgtggtaaagccttcagtcatagctcagccattgctcagcatcagataattcacaccagagagaaaccctctgaatgtgacgaatgaagaaaaggtattagtgttaaactcttaatcgactcctgcaaatctataccagtgagaaatcttacaaatgtattgaatgtggcaaatttttcatgctattagtattttcataccttagtcacatttggagaattcacatgggaataaaattccattgctgcaatgaatgtgaaaaagccatcagtcaaagaaactaccttgtttagtatcaaattcacgccatgcaaaaagattataaatgtaataagcatgtatgtgtgtgaggagattcagtcataacccaacgctcattcaacatcaaagaatttatacctaagagaacttatttgggtgtagtaaatggcagatctttcaataggagtttaactagtctttgtcatatcagaatatccatagtagacaagaatttgatgtaacgcaaatggaaaaactcgacaccacatttcaggctttacccaacatcgaaataatggagagaaaattgttgattatttgtttatgaaattgttaatacatagtcccaatctttttcattgcacaaaaatctagggttgacttggtaaatgcagtgacattttctcatggagttcctttatttaatatgtattctaagtaggtacgtttatttttacttttttattataa

SEQ ID NO: 203344 - DNA, 1601 bp, Homo sapiens
  Payload ID: 20100
  Gene Name: zinc finger protein 655
  Uniprot ID: Q8N720
  ENST ID: ENST00000320583
  CDS Start-End: 410-955
aacggctagagacgcccagtgagttagcatggagggcagtgggaccggaaaaagacgtggaaaagctgcgaaaacgagccttcgaatcatggacgcgcgggcccagctcctcctccgagttcctcatccggggccgtcactcacatccggggccctcactcacatccgggaccctcatccggggctctcacccacatccgggaccctcatgcctgggcggaggagggggggccctcattcgggaccctgcactccgtcgccggaagtgccaccgagaagcgccggcctcggggctgtctacagcggcccgggagaggctgtggtggccccgagcgcgagtgtgtaggtgacaggacagcggccaggcccgcccctcccctcgtgatggtcattgtcctccagagcagtgatggaggaaataccagcccaggaagcagcagggtcaccaagggtccagtttcagtctttggagacccagtctgagtgtctgtccccagagcctcagtttgtgcaggacaccgacatggaacagggactcactggggctccacctgttcctcaggtgcctgctcttccccgtgagggaagcccaggagaccaggcagctgcgctcttgacagccaggtaccaggagtttgtgacattcgaggatgtggctgtgcaccttactcgagaggaatggggatacctggaccctgttcagagggacctctacagagaagtgatgttagagaattatgggaacgtggtctcactgggcatacttctccgccttcccaccacccggattcatagtgtgaattcctgcccggccctgagtcatacccaggcaagtgctttctctggagaaacacttgccgtccttacagcaggaatctccaagagatggcccaagtatcggcttcccatcgatattgctcgtccctgctcggaaactccttttccacgattgtgagatattaaaattgactgatggaatagaagctccccaggatgccaccactgtgtaaaatcgcagctcctcaaattacctctgtttaatttcaaatgttagggtccaaggaagccctctgttgcaaccagatatgttttgaacccagttcattcagaaaccatggttggtggtcatcatctacttgtattgtgaaaaaccagaaattccaaattcagctcttcagttatggtcttttcatattattttagaatgtgaaacttatgctgtgtgcccctccttttatgtggcgaacacaacctgccccgtatggtgcctaactctcctgtgaaccctgggcttccctcatgtttaacattctggtttcctccttccttgaagtccctgtggccctcttcaaggtcctaccttcctaccctttattctttgtggttctgtacagattgatgcaattatattgcctttcctgattaagtgttccttactctgtccttgatggaggggagaagggagggcaaagaagttaaatttatttcagggcatcaaattgaatatctacttaataactttgtaaactgtaaagtgacatacatataattgtaaagtactgttaattttatctaataattacagagtttccaacagttaa

SEQ ID NO: 203345 - DNA, 1370 bp, Homo sapiens
  Payload ID: 20100
  Gene Name: zinc finger protein 655
  Uniprot ID: Q8N720
  ENST ID: ENST00000357864
  CDS Start-End: 394-726
cagtgagttagcatggagggcagtgggaccggaaaaagacgtggaaaagctgcgaaaacgagccttcgaatcatggacgcgcgggcccagctcctcctccgagttcctcatccggggccgtcactcacatccggggccctcactcacatccgggaccctcatccggggctctcacccacatccgggaccctcatgcctgggcggaggagggggggccctcattcgggaccctgcactccgtcgccggaagtgccaccgagaagcgccggcctcggggctgtctacagcggcccgggagaggctgtggtggccccgagcgcgagtgtgtaggtgacaggacagcggccaggcccgcccctcccctcgtgatggtcattgtcctccagagcagtgatggaggaaataccagcccaggaagcagcagggtcaccaagggtccagtttcagtctttggagacccagtctgagtgtctgtccccagagcctcagtttgtgcaggacaccgacatggaacagggactcactgggggcatacttctccgccttcccaccacccggattcatagtgtgaattcctgcccggccctgagtcatacccaggcaagtgctttctctggagaaacacttgccgtccttacagcaggaatctccaagagatggcccaagtatcggcttcccatcgatattgctcgtccctgctcggaaactccttttccacgattgtgagatattaaaattgactgatggaatagaagctccccaggatgccaccactgtgtaaaatcgcagctcctcaaattacctctgtttaatttcaaatgttagggtccaaggaagccctctgttgcaaccagatatgttttgaacccagttcattcagaaaccatggttggtggtcatcatctacttgtattgtgaaaaaccagaaattccaaattcagctcttcagttatggtcttttcatattattttagaatgtgaaacttatgctgtgtgcccctccttttatgtggcgaacacaacctgccccgtatggtgcctaactctcctgtgaaccctgggcttccctcatgtttaacattctggtttcctccttccttgaagtccctgtggccctcttcaaggtcctaccttcctaccctttattctttgtggttctgtacagattgatgcaattatattgcctttcctgattaagtgttccttactctgtccttgatggaggggagaagggagggcaaagaagttaaatttatttcagggcatcaaattgaatatctacttaataactttgtaaactgtaaagtgacatacatataattgtaaagtactgttaattttatctaataattacagagtttccaacagtt

SEQ ID NO: 203346 - DNA, 4528 bp, Homo sapiens
  Payload ID: 20100
  Gene Name: zinc finger protein 655
  Uniprot ID: Q8N720
  ENST ID: ENST00000394163
  CDS Start-End: 184-1659
cggcgtccggccgcggccgacggtagttcgcttccccgagagtgcgcggaggcccgggtgcgaggagggcctgtttctcttcagccctggttcattcacctcgcggaccgagggccccgccgtcaggagccggcgaccgtgccctggtgcgagctgtgatggtcattgtcctccagagcagtgatggaggaaataccagcccaggaagcagcagggtcaccaagggtccagtttcagtctttggagacccagtctgagtgtctgtccccagagcctcagtttgtgcaggacaccgacatggaacagggactcactggggatggagagaccagagaagagaacaagctgttgattcctaagcagaaaatttcggaagaagtgcattcatacaaagtgagagtaggaagactcaaacacgatattacccaagttcctgagactagagaagtgtataagtctgaggacagattagaaagacttcaggaaattctaaggaaatttctgtacctggagagagagtttaggcaaataacaatcagcaaggaaaccttcaccagtgagaagaacaatgaatgtcatgaacccgaaaaaagcttcagtctggactctactattgatgcagatcagagagttcttagaatacagaataccgatgacaatgataagtatgacatgagcttcaaccagaattcagcctctggtaaacatgaacacttaaatctaacagaggattttcagagtagtgaatgtaaggaaagcttaatggatctctcccaccttaataaatgggagagcatccctaacactgagaaatcctataaatgtgatgtatgtgggaaaattttccatcagagctcagcccttactagacatcagagaatccatactagagagaagccctacaaatgtaaagaatgtgaaaagtctttcagtcagagctcaagtcttagtcgacataaaagaatacacactagagaaaaaccttacaaatgtgaagcatctgataaatcctgtgaagcgtctgataaatcctgtagtccaagctcaggcataattcagcataagaaaattcacaccagagccaaatcttacaaatgtagcagttgtgaaagagtcttcagtcgtagtgtccaccttactcaacatcagaaaattcacaaagagatgccctgtaagtgtactgtatgtggcagtgacttctgccatacttcatacctacttgaacatcagagggtccatcatgaagagaaagcctatgagtatgatgaatatgggttggcctatattaaacaacaaggaattcatttcagagaaaagccctatacgtgtagtgaatgtggaaaagacttcagattgaattcacatcttattcagcatcaaagaattcacacaggagagaaagcacatgaatgtaatgaatgtggaaaagctttcagtcaaacctcatgccttattcagcatcacaaaatgcataggaaagagaaatcgtatgaatgtaatgagtatgagggcagtttcagtcatagctcagatcttatcctgcaacaagaagtcctcaccagacagaaagcctttgattgtgatgtatgggaaaagaactccagtcagagagcacatctagttcaacatcagagcattcataccaaagagaactcatgaatgtaatgaagatgggaagatatttatcaaattcaggcttcattcagcatctgagagttcacaccagggagaaatcatgtatgtactgcatgtggtaaagccttcagtcatagctcagccattgctcagcatcagataattcacaccagagagaaaccctctgaatgtgacgaatgaagaaaaggtattagtgttaaactcttaatcgactcctgcaaatctataccagtgagaaatcttacaaatgtattgaatgtggcaaatttttcatgctattagtattttcataccttagtcacatttggagaattcacatgggaataaaattccattgctgcaatgaatgtgaaaaagccatcagtcaaagaaactaccttgtttagtatcaaattcacgccatgcaaaaagattataaatgtaataagcatgtatgtgtgtgaggagattcagtcataacccaacgctcattcaacatcaaagaatttatacctaagagaacttatttgggtgtagtaaatggcagatctttcaataggagtttaactagtctttgtcatatcagaatatccatagtagacaagaatttgatgtaacgcaaatggaaaaactcgacaccacatttcaggctttacccaacatcgaaataatggagagaaaattgttgattatttgtttatgaaattgttaatacatagtcccaatctttttcattgcacaaaaatctagggttgacttggtaaatgcagtgacattttctcatggagttcctttatttaatatgtattctaagtaggtacgtttatttttacttttttattataattttgatattaaaaagaacagagatggggtcttgctttgttgcccaggctggtcttgaactcctggcctcaagcgatcctcccacctgtcctcccaaagtgctggggttacaggcgtgtgtcactgtgctgggcctattttatttatagaactcatttaagctgtttttattttaatatgccctataaacatttttatattttttgaaattggttcttagtgttcacaacttccataagatactgctaatgcaccagtattaaaacacatcgacgtaagtagctcatttagctttttctgctgttcttggcccaagttctttccaaaaccaactcttaggcctgctctttactagggatcttatgtcgtattgctttacagccacaacacttggattcctgttgattaacttctccattctcttaagcacctttagaagatttagaagtttcctagttttaagtgtttcaccagcaagtattccatacctacttgatgttgctggtctggtgtcttatttcctaaagtgaagcatctttttttaaaaaagaatttgattgacaatatatccagtccaatataagtatgaaggattctctctcctgagattgtagcaggcagccaaacattttcaaatgatgcccaaggttttagctgtcttgtgtgcatccacagtctgcgaagaagacatgataaggacatcagggagccaacaagactcctaatagcctcactacattcatccagtgcctattctgcatgcctaagcttagagttcttttatatacctctacggccagcaaaatgctcaggtctgctcttggtagggtaaacataaagaagatacacaggccgggcatggtggctcacacctgtaatcccagcactttgggaggctgaggcggatggatcacgaggtcaggcagtcgagaccatcctggccaacatggtgaaaccccgtctctactaaaaatacaaaagttagccgggtgtggtggcacgcgcctgtaatcccagctactcaggaggctgaggcaggagaactgcttgaacctgggaggcggaggttgcagtgagccgagattgcaccactgcactccagcctgggcgacagagcaggactctctctcaaaaaaacacaaaaaaacaaaaacaaaaaaccatacacacacacacacacacacaaatcagcatcataagggaatgtagccttccaacagagatgatgctgttcgtatgttaatctcagagacagtatttcaagagagtggcaggtctgttcctggtaaaattttaaccattaggattgcagataaatgtttgaattctgctcctctctcatcaatccaggacagtatttgaagtgtgagggctttgtgtatagttgtttatccattaccacatttttgtattttaatagtctacaggctatataaaagaacatggctttttgactgataaaagtgattacagatgttggctcaagttcagggccaccatcatatacctaacaagagttcatgattctttaggtaatgtcaaaacattttgtatttttccatcttaagctttataacattttgtgagtaagacaaatgttatttaaaattcttgttgtcagtccagcaattgaggctttcatagttcagtgttataatattcagtagggaccctcaacaaatatataaaaatatgttgctcactctataatcctcctatggctaacctctaggatagttctgccactatattttacttctttgccatcagcaagagtaggatttcatcaaggcaaggtaggaatctaaatgaaattgatatataaatgaattgatctaaatgtaaaagcaaatgaaaaatgcatgtgttttttcctgtcaaacatgtatacccttatgtatagagaccagtagtcacgtatggtgactgaaacaggattatgtaatccctaaaaagcagaatatgtaaaaatcacatgtatgcgtttggtttaggaatgtgcttttgtacttccacttgaataaaggtgtgtttggtattctgagaa

SEQ ID NO: 203347 - DNA, 793 bp, Homo sapiens
  Payload ID: 20100
  Gene Name: zinc finger protein 655
  ENST ID: ENST00000422164
  CDS Start-End: 247-793
gaagccgttttggggtcgcagcggggtggcagcttgttttgccttcacgggagtagaaggaggcggcgtccggccgcggccgacggtagttcgcttccccgagagtgcgcggaggcccgggtgcgaggagggcctgtttctcttcagccctggttcattcacctcgcggaccgagggccccgccgtcaggagccggcgaccgtgccctggtgcgagctgtgatggtcattgtcctccagagcagtgatggaggaaataccagcccaggaagcagcagggtcaccaagggtccagtttcagtctttggagacccagtctgagtgtctgtccccagagcctcagtttgtgcaggacaccgacatggaacagggactcactgggggatttccaatttccaagcctgatgggatctcccagctggaacaggatctacaggtctttgatctggaaactaagactagagaagtcttaagagatgactgctcagatggagagaccagagaagagaacaagctgttgattcctaagcagaaaatttcggaagaagtgcattcatacaaagtgagagtaggaagactcaaacacgatattacccaagttcctgagactagagaagtgtataagtctgaggacagattagaaagacttcaggaaattctaaggaaatttctgtacctggagagagagtttaggcaaataacaatcagcaaggaaaccttcaccagtgagaagaacaatgaatgtcatgaacccgaaaaaagcttcagtctggactctactattgatgcagatc

SEQ ID NO: 203348 - DNA, 782 bp, Homo sapiens
  Payload ID: 20100
  Gene Name: zinc finger protein 655
  ENST ID: ENST00000422422
  CDS Start-End: 90-242
tggtggccccgagcgcgagtgtgtaggtgacaggacagcggccaggcccgcccctcccctcgtgatggtcattgtcctccagagcagtgatggaggaaataccagcccaggaagcagcagggtcaccaagggtccagtttcagtctttggagacccagtctgagtgtctgtccccagagcctcagtttgtgcaggacaccgacatggaacagggactcactggggtgggaagctgggattagccaagctgtagtgctgctgggaagcatcagtggggtttgtcggcagctcccttggtgcatacttctccgccttcccaccacccggattcatagtgtgaattcctgcccggccctgagtcatacccaggcaagtgctttctctggagaaacacttgccgtccttacagcaggaatctccaagagatggcccaagtatcggcttcccatcgatattgctcgtccctgctcggaaactccttttccacgattgtgagatattaaaattgactgatggaatagaagctccccaggatgccaccactgtgtaaaatcgcagctcctcaaattacctctgtttaatttcaaatgttagggtccaaggaagccctctgttgcaaccagatatgttttgaacccagttcattcagaaaccatggttggtggtcatcatctacttgtattgtgaaaaaccagaaattccaaattcagctcttcagttatggtcttttcatattattttagaatgtgaaacttatgctgtgtgcccctccttttatgtgg

SEQ ID NO: 203349 - DNA, 567 bp, Homo sapiens
  Payload ID: 20100
  Gene Name: zinc finger protein 655
  ENST ID: ENST00000427931
  CDS Start-End: 231-567
gttttggggtcgcagcggggtggcagcttgttttgccttcacgggagtagaaggaggcggcgtccggccgcggccgacggtagttcgcttccccgagagtgcgcggaggcccgggtgcgaggagggcctgtttctcttcagccctggttcattcacctcgcggaccgagggccccgccgtcaggagccggcgaccgtgccctgtgatggtcattgtcctccagagcagtgatggaggaaataccagcccaggaagcagcagggtcaccaagggtccagtttcagtctttggagacccagtctgagtgtctgtccccagagcctcagtttgtgcaggacaccgacatggaacagggactcactgggggatttccaatttccaagcctgatgggatctcccagctggaacaggatctacaggtctttgatctggaaactaagactagagaagtcttaagagatgactgctcagatggagagaccagagaagagaacaagctgttgattcctaagcagaaaatttcggaagaagtgcattcatacaaagtgagagtaggaagactcaaac

SEQ ID NO: 203350 - DNA, 4624 bp, Homo sapiens
  Payload ID: 20100
  Gene Name: zinc finger protein 655
  ENST ID: ENST00000425063
  CDS Start-End: 103-414
ccgggagaggctgtggtggccccgagcgcgagtgtgtaggtgacaggacagcggccaggcccgcccctcccctcgtgatggtcattgtcctccagagcagtgatggaggaaataccagcccaggaagcagcagggtcaccaagggtccagtttcagtctttggagacccagtctgagtgtctgtccccagagcctcagtttgtgcaggacaccgacatggaacagggactcactggggctccacctgttcctcaggtgcctgctcttccccgtgagggaagcccaggagaccaggcagctgcgctcttgacagccaggtaccaggatttccaatttccaagcctgatgggatctcccagctggaacaggatctacaggtctttgatctggaaactaagactagagaagtcttaagagatgactgctcagatggagagaccagagaagagaacaagctgttgattcctaagcagaaaatttcggaagaagtgcattcatacaaagtgagagtaggaagactcaaacacgatattacccaagttcctgagactagagaagtgtataagtctgaggacagattagaaagacttcaggaaattctaaggaaatttctgtacctggagagagagtttaggcaaataacaatcagcaaggaaaccttcaccagtgagaagaacaatgaatgtcatgaacccgaaaaaagcttcagtctggactctactattgatgcagatcagagagttcttagaatacagaataccgatgacaatgataagtatgacatgagcttcaaccagaattcagcctctggtaaacatgaacacttaaatctaacagaggattttcagagtagtgaatgtaaggaaagcttaatggatctctcccaccttaataaatgggagagcatccctaacactgagaaatcctataaatgtgatgtatgtgggaaaattttccatcagagctcagcccttactagacatcagagaatccatactagagagaagccctacaaatgtaaagaatgtgaaaagtctttcagtcagagctcaagtcttagtcgacataaaagaatacacactagagaaaaaccttacaaatgtgaagcatctgataaatcctgtgaagcgtctgataaatcctgtagtccaagctcaggcataattcagcataagaaaattcacaccagagccaaatcttacaaatgtagcagttgtgaaagagtcttcagtcgtagtgtccaccttactcaacatcagaaaattcacaaagagatgccctgtaagtgtactgtatgtggcagtgacttctgccatacttcatacctacttgaacatcagagggtccatcatgaagagaaagcctatgagtatgatgaatatgggttggcctatattaaacaacaaggaattcatttcagagaaaagccctatacgtgtagtgaatgtggaaaagacttcagattgaattcacatcttattcagcatcaaagaattcacacaggagagaaagcacatgaatgtaatgaatgtggaaaagctttcagtcaaacctcatgccttattcagcatcacaaaatgcataggaaagagaaatcgtatgaatgtaatgagtatgagggcagtttcagtcatagctcagatcttatcctgcaacaagaagtcctcaccagacagaaagcctttgattgtgatgtatgggaaaagaactccagtcagagagcacatctagttcaacatcagagcattcataccaaagagaactcatgaatgtaatgaagatgggaagatatttatcaaattcaggcttcattcagcatctgagagttcacaccagggagaaatcatgtatgtactgcatgtggtaaagccttcagtcatagctcagccattgctcagcatcagataattcacaccagagagaaaccctctgaatgtgacgaatgaagaaaaggtattagtgttaaactcttaatcgactcctgcaaatctataccagtgagaaatcttacaaatgtattgaatgtggcaaatttttcatgctattagtattttcataccttagtcacatttggagaattcacatgggaataaaattccattgctgcaatgaatgtgaaaaagccatcagtcaaagaaactaccttgtttagtatcaaattcacgccatgcaaaaagattataaatgtaataagcatgtatgtgtgtgaggagattcagtcataacccaacgctcattcaacatcaaagaatttatacctaagagaacttatttgggtgtagtaaatggcagatctttcaataggagtttaactagtctttgtcatatcagaatatccatagtagacaagaatttgatgtaacgcaaatggaaaaactcgacaccacatttcaggctttacccaacatcgaaataatggagagaaaattgttgattatttgtttatgaaattgttaatacatagtcccaatctttttcattgcacaaaaatctagggttgacttggtaaatgcagtgacattttctcatggagttcctttatttaatatgtattctaagtaggtacgtttatttttacttttttattataattttgatattaaaaagaacagagatggggtcttgctttgttgcccaggctggtcttgaactcctggcctcaagcgatcctcccacctgtcctcccaaagtgctggggttacaggcgtgtgtcactgtgctgggcctattttatttatagaactcatttaagctgtttttattttaatatgccctataaacatttttatattttttgaaattggttcttagtgttcacaacttccataagatactgctaatgcaccagtattaaaacacatcgacgtaagtagctcatttagctttttctgctgttcttggcccaagttctttccaaaaccaactcttaggcctgctctttactagggatcttatgtcgtattgctttacagccacaacacttggattcctgttgattaacttctccattctcttaagcacctttagaagatttagaagtttcctagttttaagtgtttcaccagcaagtattccatacctacttgatgttgctggtctggtgtcttatttcctaaagtgaagcatctttttttaaaaaagaatttgattgacaatatatccagtccaatataagtatgaaggattctctctcctgagattgtagcaggcagccaaacattttcaaatgatgcccaaggttttagctgtcttgtgtgcatccacagtctgcgaagaagacatgataaggacatcagggagccaacaagactcctaatagcctcactacattcatccagtgcctattctgcatgcctaagcttagagttcttttatatacctctacggccagcaaaatgctcaggtctgctcttggtagggtaaacataaagaagatacacaggccgggcatggtggctcacacctgtaatcccagcactttgggaggctgaggcggatggatcacgaggtcaggcagtcgagaccatcctggccaacatggtgaaaccccgtctctactaaaaatacaaaagttagccgggtgtggtggcacgcgcctgtaatcccagctactcaggaggctgaggcaggagaactgcttgaacctgggaggcggaggttgcagtgagccgagattgcaccactgcactccagcctgggcgacagagcaggactctctctcaaaaaaacacaaaaaaacaaaaacaaaaaaccatacacacacacacacacacacaaatcagcatcataagggaatgtagccttccaacagagatgatgctgttcgtatgttaatctcagagacagtatttcaagagagtggcaggtctgttcctggtaaaattttaaccattaggattgcagataaatgtttgaattctgctcctctctcatcaatccaggacagtatttgaagtgtgagggctttgtgtatagttgtttatccattaccacatttttgtattttaatagtctacaggctatataaaagaacatggctttttgactgataaaagtgattacagatgttggctcaagttcagggccaccatcatatacctaacaagagttcatgattctttaggtaatgtcaaaacattttgtatttttccatcttaagctttataacattttgtgagtaagacaaatgttatttaaaattcttgttgtcagtccagcaattgaggctttcatagttcagtgttataatattcagtagggaccctcaacaaatatataaaaatatgttgctcactctataatcctcctatggctaacctctaggatagttctgccactatattttacttctttgccatcagcaagagtaggatttcatcaaggcaaggtaggaatctaaatgaaattgatatataaatgaattgatctaaatgtaaaagcaaatgaaaaatgcatgtgttttttcctgtcaaacatgtatacccttatgtatagagaccagtagtcacgtatggtgactgaaacaggattatgtaatccctaaaaagcagaatatgtaaaaatcacatgtatgcgtttggtttaggaatgtgcttttgtacttccacttgaataaaggtgtgtt

SEQ ID NO: 203351 - DNA, 573 bp, Homo sapiens
  Payload ID: 20100
  Gene Name: zinc finger protein 655
  ENST ID: ENST00000422647
  CDS Start-End: 245-573
gttttggggtcgcagcggggtggcagcttgttttgccttcacgggagtagaaggaggcggcgtccggccgcggccgacggtagttcgcttccccgagagtgcgcggaggcccgggtgcgaggagggcctgtttctcttcagccctggttcattcacctcgcggaccgagggccccgccgtcaggagccggcgaccgtgccctggtgcgagctggtcttgatggtcattgtcctccagagcagtgatggaggaaataccagcccaggaagcagcagggtcaccaagggtccagtttcagtctttggagacccagtctgagtgtctgtccccagagcctcagtttgtgcaggacaccgacatggaacagggactcactgggggatttccaatttccaagcctgatgggatctcccagctggaacaggatctacaggtctttgatctggaaactaagactagagaagtcttaagagatgactgctcagatggagagaccagagaagagaacaagctgttgattcctaagcagaaaatttcggaagaagtgcattcatacaaagtgagagtaggaag

SEQ ID NO: 203352 - DNA, 4666 bp, Homo sapiens
  Payload ID: 20100
  Gene Name: zinc finger protein 655
  Uniprot ID: Q8N720
  ENST ID: ENST00000424881
  CDS Start-End: 221-1801
tggcagcttgttttgccttcacgggagtagaaggaggcggcgtccggccgcggccgacggtagttcgcttccccgagagtgcgcggaggcccgggtgcgaggagggcctgtttctcttcagccctggttcattcacctcgcggaccgagggccccgccgtcaggagccggcgaccgtgccctggtgcgagctgtgatggtcattgtcctccagagcagtgatggaggaaataccagcccaggaagcagcagggtcaccaagggtccagtttcagtctttggagacccagtctgagtgtctgtccccagagcctcagtttgtgcaggacaccgacatggaacagggactcactgggggatttccaatttccaagcctgatgggatctcccagctggaacaggatctacaggtctttgatctggaaactaagactagagaagtcttaagagatgactgctcagatggagagaccagagaagagaacaagctgttgattcctaagcagaaaatttcggaagaagtgcattcatacaaagtgagagtaggaagactcaaacacgatattacccaagttcctgagactagagaagtgtataagtctgaggacagattagaaagacttcaggaaattctaaggaaatttctgtacctggagagagagtttaggcaaataacaatcagcaaggaaaccttcaccagtgagaagaacaatgaatgtcatgaacccgaaaaaagcttcagtctggactctactattgatgcagatcagagagttcttagaatacagaataccgatgacaatgataagtatgacatgagcttcaaccagaattcagcctctggtaaacatgaacacttaaatctaacagaggattttcagagtagtgaatgtaaggaaagcttaatggatctctcccaccttaataaatgggagagcatccctaacactgagaaatcctataaatgtgatgtatgtgggaaaattttccatcagagctcagcccttactagacatcagagaatccatactagagagaagccctacaaatgtaaagaatgtgaaaagtctttcagtcagagctcaagtcttagtcgacataaaagaatacacactagagaaaaaccttacaaatgtgaagcatctgataaatcctgtgaagcgtctgataaatcctgtagtccaagctcaggcataattcagcataagaaaattcacaccagagccaaatcttacaaatgtagcagttgtgaaagagtcttcagtcgtagtgtccaccttactcaacatcagaaaattcacaaagagatgccctgtaagtgtactgtatgtggcagtgacttctgccatacttcatacctacttgaacatcagagggtccatcatgaagagaaagcctatgagtatgatgaatatgggttggcctatattaaacaacaaggaattcatttcagagaaaagccctatacgtgtagtgaatgtggaaaagacttcagattgaattcacatcttattcagcatcaaagaattcacacaggagagaaagcacatgaatgtaatgaatgtggaaaagctttcagtcaaacctcatgccttattcagcatcacaaaatgcataggaaagagaaatcgtatgaatgtaatgagtatgagggcagtttcagtcatagctcagatcttatcctgcaacaagaagtcctcaccagacagaaagcctttgattgtgatgtatgggaaaagaactccagtcagagagcacatctagttcaacatcagagcattcataccaaagagaactcatgaatgtaatgaagatgggaagatatttatcaaattcaggcttcattcagcatctgagagttcacaccagggagaaatcatgtatgtactgcatgtggtaaagccttcagtcatagctcagccattgctcagcatcagataattcacaccagagagaaaccctctgaatgtgacgaatgaagaaaaggtattagtgttaaactcttaatcgactcctgcaaatctataccagtgagaaatcttacaaatgtattgaatgtggcaaatttttcatgctattagtattttcataccttagtcacatttggagaattcacatgggaataaaattccattgctgcaatgaatgtgaaaaagccatcagtcaaagaaactaccttgtttagtatcaaattcacgccatgcaaaaagattataaatgtaataagcatgtatgtgtgtgaggagattcagtcataacccaacgctcattcaacatcaaagaatttatacctaagagaacttatttgggtgtagtaaatggcagatctttcaataggagtttaactagtctttgtcatatcagaatatccatagtagacaagaatttgatgtaacgcaaatggaaaaactcgacaccacatttcaggctttacccaacatcgaaataatggagagaaaattgttgattatttgtttatgaaattgttaatacatagtcccaatctttttcattgcacaaaaatctagggttgacttggtaaatgcagtgacattttctcatggagttcctttatttaatatgtattctaagtaggtacgtttatttttacttttttattataattttgatattaaaaagaacagagatggggtcttgctttgttgcccaggctggtcttgaactcctggcctcaagcgatcctcccacctgtcctcccaaagtgctggggttacaggcgtgtgtcactgtgctgggcctattttatttatagaactcatttaagctgtttttattttaatatgccctataaacatttttatattttttgaaattggttcttagtgttcacaacttccataagatactgctaatgcaccagtattaaaacacatcgacgtaagtagctcatttagctttttctgctgttcttggcccaagttctttccaaaaccaactcttaggcctgctctttactagggatcttatgtcgtattgctttacagccacaacacttggattcctgttgattaacttctccattctcttaagcacctttagaagatttagaagtttcctagttttaagtgtttcaccagcaagtattccatacctacttgatgttgctggtctggtgtcttatttcctaaagtgaagcatctttttttaaaaaagaatttgattgacaatatatccagtccaatataagtatgaaggattctctctcctgagattgtagcaggcagccaaacattttcaaatgatgcccaaggttttagctgtcttgtgtgcatccacagtctgcgaagaagacatgataaggacatcagggagccaacaagactcctaatagcctcactacattcatccagtgcctattctgcatgcctaagcttagagttcttttatatacctctacggccagcaaaatgctcaggtctgctcttggtagggtaaacataaagaagatacacaggccgggcatggtggctcacacctgtaatcccagcactttgggaggctgaggcggatggatcacgaggtcaggcagtcgagaccatcctggccaacatggtgaaaccccgtctctactaaaaatacaaaagttagccgggtgtggtggcacgcgcctgtaatcccagctactcaggaggctgaggcaggagaactgcttgaacctgggaggcggaggttgcagtgagccgagattgcaccactgcactccagcctgggcgacagagcaggactctctctcaaaaaaacacaaaaaaacaaaaacaaaaaaccatacacacacacacacacacacaaatcagcatcataagggaatgtagccttccaacagagatgatgctgttcgtatgttaatctcagagacagtatttcaagagagtggcaggtctgttcctggtaaaattttaaccattaggattgcagataaatgtttgaattctgctcctctctcatcaatccaggacagtatttgaagtgtgagggctttgtgtatagttgtttatccattaccacatttttgtattttaatagtctacaggctatataaaagaacatggctttttgactgataaaagtgattacagatgttggctcaagttcagggccaccatcatatacctaacaagagttcatgattctttaggtaatgtcaaaacattttgtatttttccatcttaagctttataacattttgtgagtaagacaaatgttatttaaaattcttgttgtcagtccagcaattgaggctttcatagttcagtgttataatattcagtagggaccctcaacaaatatataaaaatatgttgctcactctataatcctcctatggctaacctctaggatagttctgccactatattttacttctttgccatcagcaagagtaggatttcatcaaggcaaggtaggaatctaaatgaaattgatatataaatgaattgatctaaatgtaaaagcaaatgaaaaatgcatgtgttttttcctgtcaaacatgtatacccttatgtatagagaccagtagtcacgtatggtgactgaaacaggattatgtaatccctaaaaagcagaatatgtaaaaatcacatgtatgcgtttggtttaggaatgtgcttttgtacttccacttgaataaaggtgtgtttggtattctg

SEQ ID NO: 203353 - DNA, 1441 bp, Homo sapiens
  Payload ID: 20100
  Gene Name: zinc finger protein 655
  ENST ID: ENST00000423973
  CDS Start-End: 147-542
aagtgccaccgagaagcgccggcctcggggctgtctacagcggcccgggagaggctgtggtggccccgagcgcgagtgtgtaggtgacaggacagcggccaggcccgcccctcccctcgtgatggtcattgtcctccagagcagtgatggaggaaataccagcccaggaagcagcagggtcaccaagggtccagtttcagtctttggagacccagtctgagtgtctgtccccagagcctcagtttgtgcaggacaccgacatggaacagggactcactggggctccacctgttcctcaggtgcctgctcttccccgtgagggaagcccaggagaccaggcagctgcgctcttgacagccaggtaccagagcagccaggatgtgttatttcaggagtttgtgacattcgaggatgtggctgtgcaccttactcgagaggaatggggatacctggaccctgttcagagggacctctacagagaagtgatgttagagaattatgggaacgtggtctcactgggtacagtgggaagctgggattagccaagctgtagtgctgctgggaagcatcagtggggtttgtcggcagctcccttggtgcatacttctccgccttcccaccacccggattcatagtgtgaattcctgcccggccctgagtcatacccaggcaagtgctttctctggagaaacacttgccgtccttacagcaggaatctccaagagatggcccaagtatcggcttcccatcgatattgctcgtccctgctcggaaactccttttccacgattgtgagatattaaaattgactgatggaatagaagctccccaggatgccaccactgtgtaaaatcgcagctcctcaaattacctctgtttaatttcaaatgttagggtccaaggaagccctctgttgcaaccagatatgttttgaacccagttcattcagaaaccatggttggtggtcatcatctacttgtattgtgaaaaaccagaaattccaaattcagctcttcagttatggtcttttcatattattttagaatgtgaaacttatgctgtgtgcccctccttttatgtggcgaacacaacctgccccgtatggtgcctaactctcctgtgaaccctgggcttccctcatgtttaacattctggtttcctccttccttgaagtccctgtggccctcttcaaggtcctaccttcctaccctttattctttgtggttctgtacagattgatgcaattatattgcctttcctgattaagtgttccttactctgtccttgatggaggggagaagggagggcaaagaagttaaatttatttcagggcatcaaattgaatatctacttaataactttgtaaactgtaaagtgacatacatataattgtaaagtactgttaattttatctaataattacagagtttccaacagttaa

SEQ ID NO: 203354 - DNA, 1198 bp, Homo sapiens
  Payload ID: 20100
  Gene Name: zinc finger protein 655
  Uniprot ID: Q8N720
  ENST ID: ENST00000440391
  CDS Start-End: 220-552
ggcagcttgttttgccttcacgggagtagaaggaggcggcgtccggccgcggccgacggtagttcgcttccccgagagtgcgcggaggcccgggtgcgaggagggcctgtttctcttcagccctggttcattcacctcgcggaccgagggccccgccgtcaggagccggcgaccgtgccctggtgcgagctgtgatggtcattgtcctccagagcagtgatggaggaaataccagcccaggaagcagcagggtcaccaagggtccagtttcagtctttggagacccagtctgagtgtctgtccccagagcctcagtttgtgcaggacaccgacatggaacagggactcactgggggcatacttctccgccttcccaccacccggattcatagtgtgaattcctgcccggccctgagtcatacccaggcaagtgctttctctggagaaacacttgccgtccttacagcaggaatctccaagagatggcccaagtatcggcttcccatcgatattgctcgtccctgctcggaaactccttttccacgattgtgagatattaaaattgactgatggaatagaagctccccaggatgccaccactgtgtaaaatcgcagctcctcaaattacctctgtttaatttcaaatgttagggtccaaggaagccctctgttgcaaccagatatgttttgaacccagttcattcagaaaccatggttggtggtcatcatctacttgtattgtgaaaaaccagaaattccaaattcagctcttcagttatggtcttttcatattattttagaatgtgaaacttatgctgtgtgcccctccttttatgtggcgaacacaacctgccccgtatggtgcctaactctcctgtgaaccctgggcttccctcatgtttaacattctggtttcctccttccttgaagtccctgtggccctcttcaaggtcctaccttcctaccctttattctttgtggttctgtacagattgatgcaattatattgcctttcctgattaagtgttccttactctgtccttgatggaggggagaagggagggcaaagaagttaaatttatttcagggcatcaaattgaatatctacttaataactttgtaaactgtaaagtgacatacatataattgtaaagtactgttaattttatctaataattacagagtttccaacagttaa

SEQ ID NO: 203355 - DNA, 545 bp, Homo sapiens
  Payload ID: 20100
  Gene Name: zinc finger protein 655
  ENST ID: ENST00000452314
  CDS Start-End: 249-545
acatccgggaccctcatccggggctctcacccacatccgggaccctcatgcctgggcggaggagggggggccctcattcgggaccctgcactccgtcgccggaagtgccaccgagaagcgccggcctcggggctgtctacagcggcccgggagaggctgtggtggccccgagcgcgagtgtgtaggtgacaggacagcggccaggcccgcccctcccctcgtgatggtcattgtcctccagagcagtgatggaggaaataccagcccaggaagcagcagggtcaccaagggtccagtttcagtctttggagacccagtctgagtgtctgtccccagagcctcagtttgtgcaggacaccgacatggaacagggactcactgggggcatacttctccgccttcccaccacccggattcatagtgtgaattcctgcccggccctgagtcatacccaggcaagtgctttctctggagaaacacttgccgtccttacagcaggaatctccaagagatggcccaagtatcggcttcccatcgatattgct

SEQ ID NO: 203356 - DNA, 571 bp, Homo sapiens
  Payload ID: 20100
  Gene Name: zinc finger protein 655
  ENST ID: ENST00000454654
  CDS Start-End: 250-561
ctcacccacatccgggaccctcatgcctgggcggaggagggggggccctcattcgggaccctgcactccgtcgccggaagtgccaccgagaagcgccggcctcggggctgtctacagcggcccgggagaggctgtggtggccccgagcgcgagtgtgtaggtgacaggacagcggccaggcccgcccctcccctcgtaatttctcttaatcttaccttgcagtgatggtcattgtcctccagagcagtgatggaggaaataccagcccaggaagcagcagggtcaccaagggtccagtttcagtctttggagacccagtctgagtgtctgtccccagagcctcagtttgtgcaggacaccgacatggaacagggactcactggggctccacctgttcctcaggtgcctgctcttccccgtgagggaagcccaggagaccaggcagctgcgctcttgacagccaggtaccaggatttccaatttccaagcctgatgggatctcccagctggaacaggatctacaggtctttgatctggaaactaagactagagaagtcttaagagatgactg

SEQ ID NO: 203357 - DNA, 655 bp, Homo sapiens
  Payload ID: 20100
  Gene Name: zinc finger protein 655
  ENST ID: ENST00000412636
  CDS Start-End: 221-361
acccacatccgggaccctcatgcctgggcggaggagggggggccctcattcgggaccctgcactccgtcgccggaagtgccaccgagaagcgccggcctcggggctgtctacagcggcccgggagaggctgtggtggccccgagcgcgagtgtgtaggtgacaggacagcggccaggcccgcccctcccctcgtgatggtcattgtcctccagagcagtgatggaggaaataccagcccaggaagcagcagggtcaccaagggtccagtttcagtctttggagacccagtctgagtgtctgtccccagagcctcagtttgtgcaggacaccgacatggaacagggactcactgggggttagctaaccatgcagcaggtgcttgagtttcacctttctccagtccagcagaattacattttgatgacctccattttgatacttgtagaccagatctaatccgaagattaatctttaggatttccaatttccaagcctgatgggatctcccagctggaacaggatctacaggtctttgatctggaaactaagactagagaagtcttaagagatgactgctcagatggagagaccagagaagagaacaagctgttgattcctaagcagaaaatttcggaagaagtgcattcatacaaa

SEQ ID NO: 203358 - DNA, 1496 bp, Homo sapiens
  Payload ID: 20100
  Gene Name: zinc finger protein 655
  ENST ID: ENST00000416144
  CDS Start-End: 245-616
ccgggaccctcatccggggctctcacccacatccgggaccctcatgcctgggcggaggagggggggccctcattcgggaccctgcactccgtcgccggaagtgccaccgagaagcgccggcctcggggctgtctacagcggcccgggagaggctgtggtggccccgagcgcgagtgtgtaggtgacaggacagcggccaggcccgcccctcccctcgtgatggtcattgtcctccagagcagtgatggaggaaataccagcccaggaagcagcagggtcaccaagggtccagtttcagtctttggagacccagtctgagtgtctgtccccagagcctcagtttgtgcaggacaccgacatggaacagggactcactggggctccacctgttcctcaggtgcctgctcttccccgtgagggaagcccaggagaccaggcagctgcgctcttgacagccaggtaccaggagtttgtgacattcgaggatgtggctgtgcaccttactcgagaggaatggggatacctggaccctgttcagagggacctctacagagaagtgatgttagagaattatgggaacgtggtctcactgggtacagtgggaagctgggattagccaagctgtagtgctgctgggaagcatcagtggggtttgtcggcagctcccttggtgcatacttctccgccttcccaccacccggattcatagtgtgaattcctgcccggccctgagtcatacccaggcaagtgctttctctggagaaacacttgccgtccttacagcaggaatctccaagagatggcccaagtatcggcttcccatcgatattgctcgtccctgctcggaaactccttttccacgattgtgagatattaaaattgactgatggaatagaagctccccaggatgccaccactgtgtaaaatcgcagctcctcaaattacctctgtttaatttcaaatgttagggtccaaggaagccctctgttgcaaccagatatgttttgaacccagttcattcagaaaccatggttggtggtcatcatctacttgtattgtgaaaaaccagaaattccaaattcagctcttcagttatggtcttttcatattattttagaatgtgaaacttatgctgtgtgcccctccttttatgtggcgaacacaacctgccccgtatggtgcctaactctcctgtgaaccctgggcttccctcatgtttaacattctggtttcctccttccttgaagtccctgtggccctcttcaaggtcctaccttcctaccctttattctttgtggttctgtacagattgatgcaattatattgcctttcctgattaagtgttccttactctgtccttgatggaggggagaagggagggcaaagaagttaaatttatttcagggcatcaaattgaatatctacttaataactttgtaaactgtaaagtgacatacatataattgtaaagtactgttaattttatctaataatta

SEQ ID NO: 203359 - DNA, 544 bp, Homo sapiens
  Payload ID: 20100
  Gene Name: zinc finger protein 655
  ENST ID: ENST00000449244
  CDS Start-End: 147-536
aagtgccaccgagaagcgccggcctcggggctgtctacagcggcccgggagaggctgtggtggccccgagcgcgagtgtgtaggtgacaggacagcggccaggcccgcccctcccctcgtgatggtcattgtcctccagagcagtgatggaggaaataccagcccaggaagcagcagggtcaccaagggtccagtttcagtctttggagacccagtctgagtgtctgtccccagagcctcagtttgtgcaggacaccgacatggaacagggactcactggggctccacctgttcctcaggtgcctgctcttccccgtgagggaagcccaggagaccaggcagctgcgctcttgacagccaggtaccagccaggatgtgttatttcaggagtttgtgacattcgaggatgtggctgtgcaccttactcgagaggaatggggatacctggaccctgttcagagggacctctacagagaagtgatgttagagaattatgggaacgtggtctcactgggatttccaatttccaagcctgatgggatct

SEQ ID NO: 203360 - DNA, 1815 bp, Homo sapiens
  Payload ID: 20100
  Gene Name: zinc finger protein 655
  Uniprot ID: Q8N720
  ENST ID: ENST00000493277
  CDS Start-End: 98-1678
agaggctgtggtggccccgagcgcgagtgtgtaggtgacaggacagcggccaggcccgcccctcccctcgtgatggtcattgtcctccagagcagtgatggaggaaataccagcccaggaagcagcagggtcaccaagggtccagtttcagtctttggagacccagtctgagtgtctgtccccagagcctcagtttgtgcaggacaccgacatggaacagggactcactgggggatttccaatttccaagcctgatgggatctcccagctggaacaggatctacaggtctttgatctggaaactaagactagagaagtcttaagagatgactgctcagatggagagaccagagaagagaacaagctgttgattcctaagcagaaaatttcggaagaagtgcattcatacaaagtgagagtaggaagactcaaacacgatattacccaagttcctgagactagagaagtgtataagtctgaggacagattagaaagacttcaggaaattctaaggaaatttctgtacctggagagagagtttaggcaaataacaatcagcaaggaaaccttcaccagtgagaagaacaatgaatgtcatgaacccgaaaaaagcttcagtctggactctactattgatgcagatcagagagttcttagaatacagaataccgatgacaatgataagtatgacatgagcttcaaccagaattcagcctctggtaaacatgaacacttaaatctaacagaggattttcagagtagtgaatgtaaggaaagcttaatggatctctcccaccttaataaatgggagagcatccctaacactgagaaatcctataaatgtgatgtatgtgggaaaattttccatcagagctcagcccttactagacatcagagaatccatactagagagaagccctacaaatgtaaagaatgtgaaaagtctttcagtcagagctcaagtcttagtcgacataaaagaatacacactagagaaaaaccttacaaatgtgaagcatctgataaatcctgtgaagcgtctgataaatcctgtagtccaagctcaggcataattcagcataagaaaattcacaccagagccaaatcttacaaatgtagcagttgtgaaagagtcttcagtcgtagtgtccaccttactcaacatcagaaaattcacaaagagatgccctgtaagtgtactgtatgtggcagtgacttctgccatacttcatacctacttgaacatcagagggtccatcatgaagagaaagcctatgagtatgatgaatatgggttggcctatattaaacaacaaggaattcatttcagagaaaagccctatacgtgtagtgaatgtggaaaagacttcagattgaattcacatcttattcagcatcaaagaattcacacaggagagaaagcacatgaatgtaatgaatgtggaaaagctttcagtcaaacctcatgccttattcagcatcacaaaatgcataggaaagagaaatcgtatgaatgtaatgagtatgagggcagtttcagtcatagctcagatcttatcctgcaacaagaagtcctcaccagacagaaagcctttgattgtgatgtatgggaaaagaactccagtcagagagcacatctagttcaacatcagagcattcataccaaagagaactcatgaatgtaatgaagatgggaagatatttatcaaattcaggcttcattcagcatctgagagttcacaccagggagaaatcatgtatgtactgcatgtggtaaagccttcagtcatagctcagccattgctcagcatcagat

SEQ ID NO: 203361 - DNA, 705 bp, Homo sapiens
  Payload ID: 20100
  Gene Name: zinc finger protein 655
  ENST ID: ENST00000626122
  CDS Start-End: 394-705
cagtgagttagcatggagggcagtgggaccggaaaaagacgtggaaaagctgcgaaaacgagccttcgaatcatggacgcgcgggcccagctcctcctccgagttcctcatccggggccgtcactcacatccggggccctcactcacatccgggaccctcatccggggctctcacccacatccgggaccctcatgcctgggcggaggagggggggccctcattcgggaccctgcactccgtcgccggaagtgccaccgagaagcgccggcctcggggctgtctacagcggcccgggagaggctgtggtggccccgagcgcgagtgtgtaggtgacaggacagcggccaggcccgcccctcccctcgtgatggtcattgtcctccagagcagtgatggaggaaataccagcccaggaagcagcagggtcaccaagggtccagtttcagtctttggagacccagtctgagtgtctgtccccagagcctcagtttgtgcaggacaccgacatggaacagggactcactggggctccacctgttcctcaggtgcctgctcttccccgtgagggaagcccaggagaccaggcagctgcgctcttgacagccaggtaccaggatttccaatttccaagcctgatgggatctcccagctggaacaggatctacaggtctttgatctggaaactaagactagagaagtcttaa

SEQ ID NO: 203362 - DNA, 2030 bp, Homo sapiens
  Payload ID: 20101
  Gene Name: zinc finger protein 658
  ENST ID: ENST00000619925
  CDS Start-End: 238-2030
ctcgacccaggaagtccagctggcttcacctctcaggcacatgaataggattacatgctccttgattacagtggggttatgtcgcagtaaaaccattatcaagtcgaaccatctcatgtcagggaccatctctgtaagaactgagaggcagaccaggtctctcatgaccccactgctctttcctcctccccagctgaacctccacagtcctctacactcttccaggagcagcagaaaatgaacatgtctcaggcatcagtgtcattccaggacgtgactgtggaattcacccgggaggagtggcagcacctgggccctgtcgagaggacgctgtacagagatgtgatgctggagaactacagccacctcatctcagtgggatattgcattactaaacctaaggtgatctccaagttggagaaaggagaagagccatggtctttagaagatgaattcctgaaccagaggtacccagggtattttaaagttgatcacatcaaagggatccgggaaaaacaagaaaaacctctgtggcaagaaatattcatcagtgatgctgacaaaacattgagtaaagaaggacagaaagttttagaaaaaccatttaatctggaaatagctccagagctttcagaaaaaatatcctgtaaatgtgactcacacagaatgaatttgccagttgcttctcaattaattataagtgaaagaaaatattcaagaaagaagactgaatacatgaatgtgtgtgagaaactgcagcttgatattaagcatgagaaagctcatgctgaagagaaatcttatgaacatggtgaaaatgctaaagctttcagttataagaaagatcagcattggaaatttcaaactttggaggaatcttttgaatgtgatggatctggacaaggtttatatgataagacaatttgtattacacctcagagttttctaacaggagaaaagtcctgtaaggatgatgaatttagaaaaaactttgataaaatcactttatttaaccacatgagaactgacacaagggggaaatgctctgatcttaatgaatatgggacatcctgtgacaaaaccaccgctgttgaatacaataaagttcacatggctatgacacactatgagtgtaatgaaagggggattaatttcagtaggaagtcacccctcactcaatctcagagaactattacaggatggagtgcttttgaaagcaataaatgtgaagaaaattttagccagagctcagcccatatagtacatcagaaaacacaagctggagataaatttggtgaacataatgaatgtacagatgccctctaccagaaattagactttacagcacatcagagaattcacacagaagataaattctacctttctgatgaacatgggaaatgcagaaaatccttttaccggaaagcacacctcattcagcatcagaggccccactcaggagagaaaacttaccaatatgaggaatgtgcaaaatccttttgttcaagttcacatcctattcagcatcctggaacttatgtgggattcaaactttatgaatgtaatgaatgtgggaaagctttctgtcagaattcaaacctcagtaaacatctgagaattcacacaaaagagaaaccttgtgataacaatggctgtgggagatcttacaagtcacccctcataggacaccagaaaacagatgcagagatggaactctgtggtggcagtgaatatgggaagacatcacatctcaaaggacatcagagaattctcatgggggagaaaccctatgaatgtattgaatgtgggaaaactttctccaagacatcacatctcagagcacatcagagaattcacacaggtgaaaaaccctatgaatgtgttgaatgtgagaaaactttctctcacaagacacacctcagtgtacatcagagagttcacacaggggagaaaccctatgaatgtaatgactgtgggaaatcttttacctataactcagccctgagagcacatcaaagaattcacacagg

SEQ ID NO: 203363 - DNA, 2262 bp, Homo sapiens
  Payload ID: 20101
  Gene Name: zinc finger protein 658
  Uniprot ID: Q5TYW1
  ENST ID: ENST00000622180
  CDS Start-End: 238-2091
ctcgacccaggaagtccagctggcttcacctctcaggcacatgaataggattacatgctccttgattacagtggggttatgtcgcagtaaaaccattatcaagtcgaaccatctcatgtcagggaccatctctgtaagaactgagaggcagaccaggtctctcatgaccccactgctctttcctcctccccagctgaacctccacagtcctctacactcttccaggagcagcagaaaatgaacatgtctcaggcatcagtgtcattccaggacgtgactgtggaattcacccgggaggagtggcagcacctgggccctgtcgagaggacgctgtacagagatgtgatgctggagaactacagccacctcatctcagtgggatattgcattactaaacctaaggtgatctccaagttggagaaaggagaagagccatggtctttagaagatgaattcctgaaccagaggtacccagggtattttaaagttgatcacatcaaagggatccgggaaaaacaagaaaaacctctgtggcaagaaatattcatcagtgatgctgacaaaacattgagtaaagaaggacagaaagttttagaaaaaccatttaatctggaaatagctccagagctttcagaaaaaatatcctgtaaatgtgactcacacagaatgaatttgccagttgcttctcaattaattataagtgaaagaaaatattcaagaaagaagactgaatacatgaatgtgtgtgagaaactgcagcttgatattaagcatgagaaagctcatgctgaagagaaatcttatgaacatggtgaaaatgctaaagctttcagttataagaaagatcagcattggaaatttcaaactttggaggaatcttttgaatgtgatggatctggacaaggtttatatgataagacaatttgtattacacctcagagttttctaacaggagaaaagtcctgtaaggatgatgaatttagaaaaaactttgataaaatcactttatttaaccacatgagaactgacacaagggggaaatgctctgatcttaatgaatatgggacatcctgtgacaaaaccaccgctgttgaatacaataaagttcacatggctatgacacactatgagtgtaatgaaagggggattaatttcagtaggaagtcacccctcactcaatctcagagaactattacaggatggagtgcttttgaaagcaataaatgtgaagaaaattttagccagagctcagcccatatagtacatcagaaaacacaagctggagataaatttggtgaacataatgaatgtacagatgccctctaccagaaattagactttacagcacatcagagaattcacacagaagataaattctacctttctgatgaacatgggaaatgcagaaaatccttttaccggaaagcacacctcattcagcatcagaggccccactcaggagagaaaacttaccaatatgaggaatgtgcaaaatccttttgttcaagttcacatcctattcagcatcctggaacttatgtgggattcaaactttatgaatgtaatgaatgtgggaaagctttctgtcagaattcaaacctcagtaaacatctgagaattcacacaaaagagaaaccttgtgataacaatggctgtgggagatcttacaagtcacccctcataggacaccagaaaacagatgcagagatggaactctgtggtggcagtgaatatgggaagacatcacatctcaaaggacatcagagaattctcatgggggagaaaccctatgaatgtattgaatgtgggaaaactttctccaagacatcacatctcagagcacatcagagaattcacacaggtgaaaaaccctatgaatgtgttgaatgtgagaaaactttctctcacaagacacacctcagtgtacatcagagagttcacacaggggagaaaccctatgaatgtaatgactgtgggaaatcttttacctataactcagccctgagagcacatcaaagaattcacacagggcttgctgtctgtcatgttggtatcttaatggctaccaagagtctgtttcatcagtcgtaaggtctctgttttaatgttaaatgctggtcagctgtgcctgaatcccaaaggaacggctcaatgaagagggagtcatgaagaatttggaagagcaagtgccccagtcctatgtatttatgtctccccactgatgtacagtgctccatctgccataaatgtctattgactcaa

SEQ ID NO: 203364 - DNA, 584 bp, Homo sapiens
  Payload ID: 20101
  Gene Name: zinc finger protein 658
  ENST ID: ENST00000621015
  CDS Start-End: 294-584
aaacccagccccacctcctgccgtctgccctcccgggcctgaaagggacacggtgtccgagtctttaggtctgcgcgggagccgaggctgcgcacctgggtagagacaggatttcgccatgttgaccaggctggtcttgaactcttggcctccagcagttcacccccctcggcctcccaaactgctgggattacaggcatgatccaccatgcccggctgagtagttctttgacattagctttaatgaagctgaacctccacagtcctctacactcttccaggagcagcagaaaatgaacatgtctcaggcatcagtgtcattccaggacgtgactgtggaattcacccgggaggagtggcagcacctgggccctgtcgagaggacgctgtacagagatgtgatgctggagaactacagccacctcatctcagtgggatattgcattactaaacctaaggtgatctccaagttggagaaaggagaagagccatggtctttagaagatgaattcctgaaccagaggtacccagggtattttaaagttgatcacatcaaagggatccgggaaaaacaagaaaaacct

SEQ ID NO: 203365 - DNA, 4025 bp, Homo sapiens
  Payload ID: 20101
  Gene Name: zinc finger protein 658
  Uniprot ID: Q5TYW1
  ENST ID: ENST00000621410
  CDS Start-End: 153-3332
gcatgtgtaaacccagccccacctcctgccgtctgccctcccgggcctgaaagggacacggtgtccgagtctttaggtctgcgcgggagccgaggctgcgcacctgggctgaacctccacagtcctctacactcttccaggagcagcagaaaatgaacatgtctcaggcatcagtgtcattccaggacgtgactgtggaattcacccgggaggagtggcagcacctgggccctgtcgagaggacgctgtacagagatgtgatgctggagaactacagccacctcatctcagtgggatattgcattactaaacctaaggtgatctccaagttggagaaaggagaagagccatggtctttagaagatgaattcctgaaccagaggtacccagggtattttaaagttgatcacatcaaagggatccgggaaaaacaagaaaaacctctgtggcaagaaatattcatcagtgatgctgacaaaacattgagtaaagaaggacagaaagttttagaaaaaccatttaatctggaaatagctccagagctttcagaaaaaatatcctgtaaatgtgactcacacagaatgaatttgccagttgcttctcaattaattataagtgaaagaaaatattcaagaaagaagactgaatacatgaatgtgtgtgagaaactgcagcttgatattaagcatgagaaagctcatgctgaagagaaatcttatgaacatggtgaaaatgctaaagctttcagttataagaaagatcagcattggaaatttcaaactttggaggaatcttttgaatgtgatggatctggacaaggtttatatgataagacaatttgtattacacctcagagttttctaacaggagaaaagtcctgtaaggatgatgaatttagaaaaaactttgataaaatcactttatttaaccacatgagaactgacacaagggggaaatgctctgatcttaatgaatatgggacatcctgtgacaaaaccaccgctgttgaatacaataaagttcacatggctatgacacactatgagtgtaatgaaagggggattaatttcagtaggaagtcacccctcactcaatctcagagaactattacaggatggagtgcttttgaaagcaataaatgtgaagaaaattttagccagagctcagcccatatagtacatcagaaaacacaagctggagataaatttggtgaacataatgaatgtacagatgccctctaccagaaattagactttacagcacatcagagaattcacacagaagataaattctacctttctgatgaacatgggaaatgcagaaaatccttttaccggaaagcacacctcattcagcatcagaggccccactcaggagagaaaacttaccaatatgaggaatgtgcaaaatccttttgttcaagttcacatcctattcagcatcctggaacttatgtgggattcaaactttatgaatgtaatgaatgtgggaaagctttctgtcagaattcaaacctcagtaaacatctgagaattcacacaaaagagaaaccttgtgataacaatggctgtgggagatcttacaagtcacccctcataggacaccagaaaacagatgcagagatggaactctgtggtggcagtgaatatgggaagacatcacatctcaaaggacatcagagaattctcatgggggagaaaccctatgaatgtattgaatgtgggaaaactttctccaagacatcacatctcagagcacatcagagaattcacacaggtgaaaaaccctatgaatgtgttgaatgtgagaaaactttctctcacaagacacacctcagtgtacatcagagagttcacacaggggagaaaccctatgaatgtaatgactgtgggaaatcttttacctataactcagccctgagagcacatcaaagaattcacacaggtgagaagccctatgaatgcagtgactgtgagaaaacttttgcccataattcagccctcagagcacatcatagaattcacacgggggagaaaccttatgaatgtaatgaatgtggaaggtcttttgcccatatttctgttctcaaggcacatcaaagaattcacacaggggagaaaccctatgaatgtaatgaatgtgggagatctttcacctacaattcagccctgagagcacatcagagaattcacacaggtagaaaaccctatgaatgtagtgactgtgagaaaacttttgcccataattcagccctcaaaatacatcagagaattcacacgggggagaaaccctatgaatgtaatgaatgtgagaaaacatttgcccataattcagcccttagagcacatcagaatatccacacaggggagaaactctatgaatgtagtgaatgtggaaaaacttttttccagaagacacgcctcagtacacatcggagaattcacacaggggagaaaccctatgaatgtagcaagtgtgggaaaactttctcccagaaatcatacctcagtggacatgagagaattcacacaggggaaaaaccgtatgaatgtaacgtatgtgggaaaacttttgtctataaggcagccctcatagtgcatcaaagaattcacacaggggagaaaccctatgaatgtaaccaatgtgggaaaactttctcccaaagaacacacctctgtgcacatcagagaattcatactggggaaaaaccctatgagtgtaatgaatgtgggaaaacgtttgctgataattcagccctcagggcacatcacagaattcacacaggggagaaaccctatgaatgtaatgactgtgggaagactttctccaagacatcacatctcagagcacatcttagaactcgctcaggggagaaaccctatgaatgcagtgaatgtgggaaaaccttctctgagaagtcatatgttagtgcacatcagagagttcatacgggggagaaaccctacgaatgtaatgtatgtgggaagccatttgcccataattcaaccctcagagtacatcaaagaattcacacaggggagaaatcctatgaatgtaatgattgtgggaaaacgttctcccagaaatcacaccttagtgcacaccagagaattcacacaggggagaaaccctatgagtgtaatgaatgcggaaaagcttttgcccaaaattcaactctcagagtacaccagagaattcacacaggggagaaaccctatgaatgtgatgaatgtgggaaaacttttgtccgtaaggcagctcttagggtacatcacaccagaatgcataccagagagaaaaccctagcatgtaatggatttgggaagtcctgagggaatgcataccttaccacataacacgtagtgcagaaactcatgtgacataggctgggaacttgtttcccttatccatttcctttttcattaggctcatagtttgtggaaaaatcccaatatgccgtttattcaggtggggctgaccatgggatgtggtgctaatgataaatattacatttacccttggcccttaaaaaaaaaaaagaaaaaccctcacagtcttcctggttcataagatggatttggaggttatttctgcagcaaacttgggtcctgtgtgttcaaaaccatagagcacaaggtcaaggaagctagagtctgaaaaacgaacaattcacttccaggtcttcatcagggttttgtttttgttgctttaaagcaagagttaagtttatagtctgttaagctcttacaaatttggcttattagttaaatggacgtagtttagcttaaactttatgttagagtgagatgaaaccctatgaatataatcagttttagaaaaactaatcagtttattgtgcatcagagacgtcacatgaagaagaaaacttgtcgacatccaggatgatcaggagccttcattaaaacagaaattttagggaaaaccacaaaaaccttcgtaaagtgaattgcattaaacatcaattataataaaatttcatattttgaataaatgacatttttcct

SEQ ID NO: 203366 - DNA, 4160 bp, Homo sapiens
  Payload ID: 20101
  Gene Name: zinc finger protein 658
  Uniprot ID: Q5TYW1
  ENST ID: ENST00000612867
  CDS Start-End: 301-3480
aacccagccccacctcctgccgtctgccctcccgggcctgaaagggacacggtgtccgagtctttaggtctgcgcgggagccgaggctgcgcacctggggcacatgaataggattacatgctccttgattacagtggggttatgtcgcagtaaaaccattatcaagtcgaaccatctcatgtcagggaccatctctgtaagaactgagaggcagaccaggtctctcatgaccccactgctctttcctcctccccagctgaacctccacagtcctctacactcttccaggagcagcagaaaatgaacatgtctcaggcatcagtgtcattccaggacgtgactgtggaattcacccgggaggagtggcagcacctgggccctgtcgagaggacgctgtacagagatgtgatgctggagaactacagccacctcatctcagtgggatattgcattactaaacctaaggtgatctccaagttggagaaaggagaagagccatggtctttagaagatgaattcctgaaccagaggtacccagggtattttaaagttgatcacatcaaagggatccgggaaaaacaagaaaaacctctgtggcaagaaatattcatcagtgatgctgacaaaacattgagtaaagaaggacagaaagttttagaaaaaccatttaatctggaaatagctccagagctttcagaaaaaatatcctgtaaatgtgactcacacagaatgaatttgccagttgcttctcaattaattataagtgaaagaaaatattcaagaaagaagactgaatacatgaatgtgtgtgagaaactgcagcttgatattaagcatgagaaagctcatgctgaagagaaatcttatgaacatggtgaaaatgctaaagctttcagttataagaaagatcagcattggaaatttcaaactttggaggaatcttttgaatgtgatggatctggacaaggtttatatgataagacaatttgtattacacctcagagttttctaacaggagaaaagtcctgtaaggatgatgaatttagaaaaaactttgataaaatcactttatttaaccacatgagaactgacacaagggggaaatgctctgatcttaatgaatatgggacatcctgtgacaaaaccaccgctgttgaatacaataaagttcacatggctatgacacactatgagtgtaatgaaagggggattaatttcagtaggaagtcacccctcactcaatctcagagaactattacaggatggagtgcttttgaaagcaataaatgtgaagaaaattttagccagagctcagcccatatagtacatcagaaaacacaagctggagataaatttggtgaacataatgaatgtacagatgccctctaccagaaattagactttacagcacatcagagaattcacacagaagataaattctacctttctgatgaacatgggaaatgcagaaaatccttttaccggaaagcacacctcattcagcatcagaggccccactcaggagagaaaacttaccaatatgaggaatgtgcaaaatccttttgttcaagttcacatcctattcagcatcctggaacttatgtgggattcaaactttatgaatgtaatgaatgtgggaaagctttctgtcagaattcaaacctcagtaaacatctgagaattcacacaaaagagaaaccttgtgataacaatggctgtgggagatcttacaagtcacccctcataggacaccagaaaacagatgcagagatggaactctgtggtggcagtgaatatgggaagacatcacatctcaaaggacatcagagaattctcatgggggagaaaccctatgaatgtattgaatgtgggaaaactttctccaagacatcacatctcagagcacatcagagaattcacacaggtgaaaaaccctatgaatgtgttgaatgtgagaaaactttctctcacaagacacacctcagtgtacatcagagagttcacacaggggagaaaccctatgaatgtaatgactgtgggaaatcttttacctataactcagccctgagagcacatcaaagaattcacacaggtgagaagccctatgaatgcagtgactgtgagaaaacttttgcccataattcagccctcagagcacatcatagaattcacacgggggagaaaccttatgaatgtaatgaatgtggaaggtcttttgcccatatttctgttctcaaggcacatcaaagaattcacacaggggagaaaccctatgaatgtaatgaatgtgggagatctttcacctacaattcagccctgagagcacatcagagaattcacacaggtagaaaaccctatgaatgtagtgactgtgagaaaacttttgcccataattcagccctcaaaatacatcagagaattcacacgggggagaaaccctatgaatgtaatgaatgtgagaaaacatttgcccataattcagcccttagagcacatcagaatatccacacaggggagaaactctatgaatgtagtgaatgtggaaaaacttttttccagaagacacgcctcagtacacatcggagaattcacacaggggagaaaccctatgaatgtagcaagtgtgggaaaactttctcccagaaatcatacctcagtggacatgagagaattcacacaggggaaaaaccgtatgaatgtaacgtatgtgggaaaacttttgtctataaggcagccctcatagtgcatcaaagaattcacacaggggagaaaccctatgaatgtaaccaatgtgggaaaactttctcccaaagaacacacctctgtgcacatcagagaattcatactggggaaaaaccctatgagtgtaatgaatgtgggaaaacgtttgctgataattcagccctcagggcacatcacagaattcacacaggggagaaaccctatgaatgtaatgactgtgggaagactttctccaagacatcacatctcagagcacatcttagaactcgctcaggggagaaaccctatgaatgcagtgaatgtgggaaaaccttctctgagaagtcatatgttagtgcacatcagagagttcatacgggggagaaaccctacgaatgtaatgtatgtgggaagccatttgcccataattcaaccctcagagtacatcaaagaattcacacaggggagaaatcctatgaatgtaatgattgtgggaaaacgttctcccagaaatcacaccttagtgcacaccagagaattcacacaggggagaaaccctatgagtgtaatgaatgcggaaaagcttttgcccaaaattcaactctcagagtacaccagagaattcacacaggggagaaaccctatgaatgtgatgaatgtgggaaaacttttgtccgtaaggcagctcttagggtacatcacaccagaatgcataccagagagaaaaccctagcatgtaatggatttgggaagtcctgagggaatgcataccttaccacataacacgtagtgcagaaactcatgtgacataggctgggaacttgtttcccttatccatttcctttttcattaggctcatagtttgtggaaaaatcccaatatgccgtttattcaggtggggctgaccatgggatgtggtgctaatgataaatattacatttacccttggcccttaaaaaaaaaaaagaaaaaccctcacagtcttcctggttcataagatggatttggaggttatttctgcagcaaacttgggtcctgtgtgttcaaaaccatagagcacaaggtcaaggaagctagagtctgaaaaacgaacaattcacttccaggtcttcatcagggttttgtttttgttgctttaaagcaagagttaagtttatagtctgttaagctcttacaaatttggcttattagttaaatggacgtagtttagcttaaactttatgttagagtgagatgaaaccctatgaatataatcagttttagaaaaactaatcagtttattgtgcatcagagacgtcacatgaagaagaaaacttgtcgacatccaggatgatcaggagccttcattaaaacagaaattttagggaaaaccacaaaaaccttcgtaaagtgaattgcattaaacatcaattataataaaatttcatattttgaataaa

SEQ ID NO: 203367 - DNA, 698 bp, Homo sapiens
  Payload ID: 20101
  Gene Name: zinc finger protein 658
  ENST ID: ENST00000619435
  CDS Start-End: 461-698
gggagccgaggctgcgcacctggggtgagagcgtcggtgacagggctccgcgcggcccaggaacctggggacgggcgggcttgtgtgcggaggacagcagcaggcagtctcaggagtccccaggatggccctcccctctcctccccggcccagtgcgcgggcccaggccgagtcctgtccgcaggtgtaggggctgccgggccccgcggggttgcgggccgggaagaggaaatgtgcgtggatgaggttgacggcgaacaggaggagtagagacaggatttcgccatgttgaccaggctggtcttgaactcttggcctccagcagttcacccccctcggcctcccaaactgctgggattacaggcatgatccaccatgcccggctgagtagttctttgacattagctttaatgaagctgaacctccacagtcctctacactcttccaggagcagcagaaaatgaacatgtctcaggcatcagtgtcattccaggacgtgactgtggaattcacccgggaggagtggcagcacctgggccctgtcgagaggacgctgtacagagatgtgatgctggagaactacagccacctcatctcagtgggatattgcattactaaacctaaggtgatctccaagttggagaaaggagaagagccatggtctttagaagatgaattcctgaaccagaggtacccag

SEQ ID NO: 203368 - DNA, 642 bp, Homo sapiens
  Payload ID: 20101
  Gene Name: zinc finger protein 658
  ENST ID: ENST00000616544
  CDS Start-End: 176-642
aaacccagccccacctcctgccgtctgccctcccgggcctgaaagggacacggtgtccgagtctttaggtctgcgcgggagccgaggctgcgcacctggggacgtgactgtggaattcacccgggaggagtggcagcacctgggccctgtcgagaggacgctgtacagagatgtgatgctggagaactacagccacctcatctcagtgggatattgcattactaaacctaaggtgatctccaagttggagaaaggagaagagccatggtctttagaagatgaattcctgaaccagaggtacccagggtattttaaagttgatcacatcaaagggatccgggaaaaacaagaaaaacctctgtggcaagaaatattcatcagtgatgctgacaaaacattgagtaaagaaggacagaaagttttagaaaaaccatttaatctggaaatagctccagagctttcagaaaaaatatcctgtaaatgtgactcacacagaatgaatttgccagttgcttctcaattaattataagtgaaagaaaatattcaagaaagaagactgaatacatgaatgtgtgtgagaaactgcagcttgatattaagcatgagaaagctcatgctgaagagaaatcttatgaacatgg

SEQ ID NO: 203369 - DNA, 1120 bp, Homo sapiens
  Payload ID: 20102
  Gene Name: zinc finger protein 66
  ENST ID: ENST00000360204
  CDS Start-End: 242-415
gtctctccctgcagctggagctccaggtcgtctgttcactgctctctgtcttcttctcctagaggcccagcctctgtggccctgtgtcctgcaggtattgggagatccacagctaagacgccaggaccccctggaagcctagaaatggtgagagtgccggtccagcatcccgagagaggggccattgcaatttagagatgtggccatagaattctctctggaggagtggcattgcctggacatggcacagcggaatttatatagggatgtgatgttagagaactacagaaacctggtctttcttggtattgttgtctcaaagccagacctcatcacccatctggagcaaggaaaaaaaccttcgactatgcagagacatgagatggtagccaacccctcaggtaggtgtgagtgaaaatgaatacaacagacaacacagtaagaagtccaaggtcaaaaagaaagccagtccttaaggtgtgattctggaagctgtgttccaaaggaacttctgggcagctgttttttttgttttttgtttttgtttttgttgttttaaattttgctgtcacaaaggggcatattgtcttatgcttctaaattctctaaaaattctacttttctctcagtgagcttccttcacattcacagtgagagccaaagtcctcttcatgacatataagagacagcacaatccagctgctttttcattgttttggggacacacaaatatcttcctaattttgagaaactgaaactattttttagttttctttttgtatccggtctgaaatttgtgagagtagtagtttctgttgcatttttttttgttcatttttgtgcacagtccattctatttttattactatatagtcttgaaatatagtttgaaattgtaagtacgatattctgttttcttctttttcctcaagattgctttggctattcaaagtttattttagtttcatgtaaattttagaattgtattttccattattgtaaaaaaaaacactgcaattttaataggaagattattgagtctgtaaatcactttggataatatgattctttaataatatttattcttttaattcattgacataaaatattttaaaattaa

SEQ ID NO: 203370 - DNA, 1745 bp, Homo sapiens
  Payload ID: 20102
  Gene Name: zinc finger protein 66
  Uniprot ID: Q6ZN08
  ENST ID: ENST00000344519
  CDS Start-End: 24-1745
caggaccccctggaagcctagaaatggggccattgcaatttagagatgtggccatagaattctctctggaggagtggcattgcctggacatggcacagcggaatttatatagggatgtgatgttagagaactacagaaacctggtctttcttggtattgttgtctcaaagccagacctcatcacccatctggagcaaggaaaaaaaccttcgactatgcagagacatgagatggtagccaacccctcagttttgtgttctcattttaaccaagacctttggccagagcagagcataaaagattctttccaaaaactgatactgagaaggcataaaaaatgtggacatgataatttgcagttaaaaaaaggctgtgaaagtgtggataagtgtaaagtgcacaaaagaggttataatggacttaaccaatgtttgacaactacccaaagcaaaatgtttcaatgtgataaacatgggaaagtctttcatcaattttcaaatacaaacagacataagataagacatactggaaaaaacccttgcaaatttacagaatgtggcaaagcttttaaccggtcctcaacctttactacacataagaaaattcatactggagagaaaccctataaatgtatagaatgtggcaaagccttcaaccggtcctcacaccttactacacataagataattcatactggagagaaacggtacaaatgtgaagactgtggcaaagcctttaaccgctcctctaaccttactacacataagaaaattcatactggagagaaaccctacaaatgtgaagaatgtggcaaggcctttaagcgctcctctatccttactacacataagagaattcatactggagagaaaccctacaaatgtgaagaatgtggcaaagtttttaagtacctttcttccctttctacacataagataattcatactggagagaaaccctacaaatgtgaagaatgtggtaaagccttcaactggtcctcacaccttactacacataagagaattcatactggagagaaaccctacaaatgtgaagaatgtggcaaaggctttaagtactcctctacccttactaaacataaaataatccatactggagagaaaccctacaaatgtgaagaatgtggtgaagcctttaagtactcctgttcccttactgcacataagataattcatactggaaagaaaccttacaaatgtgaagaatgtggcaaagtgtttaagcactcctctcccctttctaaacataagagaattcatactggagagaaaccctacaaatgtgaagaatgtggcaaagccttcagtcggtcctctattcttactacacataagataattcacactggagagaaaccctacgaatgtgaagactgtggcaaagcctttaaccgctcctctaaccttactaaacacaagaaaattcatactggagagaagccttacaaatgtgaagaatgtggcaaggcctttaagtgctcctctattcttactacacataagagaattcatactgcagataaaccctacaaatgtgaagaatgtggcaaagactttaagtactcctctacccttactagacataagaaaattcatactggagggaaaccacacaagtgcaataaatgtggcaaagcctttatttcatcctcaaaccttagtagacatgagataattcatatgggagggaatccctacaaatgtgaaaatgtggcaaagccttag

SEQ ID NO: 203371 - DNA, 757 bp, Homo sapiens
  Payload ID: 20102
  Gene Name: zinc finger protein 66
  ENST ID: ENST00000594534
  CDS Start-End: 139-756
ccctgcagctggagctccaggtcgtctgttcactgctctctgtcttcttctcctagaggcccagcctctgtggccctgtgtcctgcaggtattgggagatccacagctaagacgccaggaccccctggaagcctagaaatggggccattgcaatttagagatgtggccatagaattctctctggaggagtggcattgcctggacatggcacagcggaatttatatagggatgtgatgttagagaactacagaaacctggtctttcttggtattgttgtctcaaagccagacctcatcacccatctggagcaaggaaaaaaaccttcgactatgcagagacatgagatggtagccaacccctcaggtcctgtgttgcatattttgtttttttgttgttgttttctttctttctttctttttctttctttcttttttttttttttgagatggaatcttgctctgttgcccaggctaaagtgcagtggtgcgatctcagctcactgcaagctctgccttctgggttcaagtgattcccctacctcagcctcccaagtagctgggattacaggtgcacgtcacatcgccaaggtaatttttgtgtttttagtagaaatggtatttcaccatgttggccaggctcgtctcaaactcctgacctcaggttatctgcccacctcaacctcccaaagtgctaggattacaggcttgagctactgcacctggcctgtgttacatattttagatatagatttataaa

SEQ ID NO: 203372 - DNA, 1806 bp, Homo sapiens
  Payload ID: 20102
  Gene Name: zinc finger protein 66
  ENST ID: ENST00000452874
  CDS Start-End: 1-1806
atggggccattgcaatttagagatgtggccatagaattctctctggaggagtggcattgcctggacatggcacagcggaatttatatagggatgtgatgttagagaactacagaaacctggtctttcttggtattgttgtctcaaagccagacctcatcacccatctggagcaaggaaaaaaaccttcgactatgcagagacatgagatggtagccaacccctcagttttgtgttctcattttaaccaagacctttggccagagcagagcataaaagattctttccaaaaactgatactgagaagacataaaaaatgtggacatgataatttgcagttaaaaaaaggctgtgaaagtgtggataagtgtaaagtgcacaaaagaggttataatggacttaaccaatgtttgacaactacccaaagcaaaatgtttcaatgtgataaacatgggaaagtctttcatcaattttcaaatacaaacagacataagataagacatactggaaaaaaccctttcaaatttacagaatgtggcaaagcttttaaccggtcctcaacccttactacacataagaaaattcatactggagagaaaccctataaatgtatagaatgtggcaaagccttcaaccggtcctcacaccttactacacataagataattcatactggagagaaacggtacaaatgtgaagactgtggcaaagcctttaaccgctcctctaaccttactacacataagaaaattcatactggagagaaaccctacaaatgtgaagaatgtggcaaggcctttaagcgctcctctatccttactacacataagagaattcatactggagagaaaccctacaaatgtgaagaatgtggcaaagtttttaagtacctttcttccctttctacacataagataattcatactggagagaaaccctacaaatgtgaagaatgtggtaaagccttcaactggtcctcacaccttactacacataagagaattcatactggagagaaaccctacaaatgtgaagaatgtggcaaaggctttaagtactcctctacccttactaaacataaaataatccatactggagagaaaccctacaaatgtgaagaatgtggtgaagcctttaagtactcctgttcccttactgcacataagataattcatactggaaagaaaccttacaaatgtgaagaatgtggcaaagtgtttaagcactcctctcccctttctaaacataagagaattcatgctggagagaaaccctacaaatgtgaagaatgtggcaaagccttcagtcggtcctctattcttactacacataagataattcacactggagagaaaccctacgaatgtgaagactgtggcaaagcctttaaccgctcctctaaccttactaaacacaagaaaattcatactggagagaagccttacaaatgtgaagaatgtggcaaggcctttaagtgctcctctattcttactacacataagagaattcatactgcagataaaccctacaaatgtgaagaatgtggcaaagactttaagtactcctctacccttactagacataagagaattcatactggagagaaaccctacaaatgtgaagaatgtggcaaagcttttaatcatcccgcaacccttttttcacataagaaaattcatactggagggaaaccacacaagtgcaataaatgtggcaaagcctttatttcatcctcaaaccttagtagacatgagataattcatatgggagggaatccctacaaatgtgaaaatgtggcaaagccttag

SEQ ID NO: 203373 - DNA, 1120 bp, Homo sapiens; identical to SEQ ID NO: 203369
  Payload ID: 20102
  Gene Name: zinc finger protein 66
  ENST ID: ENST00000615930
  CDS Start-End: 242-415

SEQ ID NO: 203374 - DNA, 774 bp, Homo sapiens
  Payload ID: 20102
  Gene Name: zinc finger protein 66
  ENST ID: ENST00000623857
  CDS Start-End: 139-462
ccctgcagctggagctccaggtcgtctgttcactgctctctgtcttcttctcctagaggcccagcctctgtggccctgtgtcctgcaggtattgggagatccacagctaagacgccaggaccccctggaagcctagaaatggggccattgcaatttagagatgtggccatagaattctctctggaggagtggcattgcctggacatggcacagcggaatttatatagggatgtgatgttagagaactacagaaacctggtctttcttggtattgttgtctcaaagccagacctcatcacccatctggagcaaggaaaaaaaccttcgactatgcagagacatgagatggtagccaacccctcaggtcctgtgttgcatattttgtttttttgttgttgttttctttctttctttctttctttttctttttctttctttttttttttttttttttttttctgagatggaatcttgctctgttgcccaggctaaagtgcagtggtgcgatctcggctcactgcaagctctgccttctgggttcaagtgattcccctacctcagcctcccaagtagctgggattacaggtgcacgtcacatcgccaaggtaatttttgtgtttttagtagaaatggtatttcaccatgttggccaggctcgtctcaaactcctgacctcaggttatctgcccacctcaacctcccaaagtgctaggattacaggcttgagctactgcacctggcctgtgttacatattttagatatagatttataaa

SEQ ID NO: 203375 - DNA, 5834 bp, Homo sapiens
  Payload ID: 20103
  Gene Name: zinc finger protein 660
  Uniprot ID: Q6AZW8
  ENST ID: ENST00000322734
  CDS Start-End: 334-1329
agttccttctgcgctttgttcaagatgtgggtctggcgctttcgtgactcaagaccctcttaggaacttcttcactgaactcaaggaggagatcaggcaagatctgtgctgtgcagatcctttggattgaggctgctgtgcacaggaatatggatggtgaaactgggactgaggaggagttaattccaaagcatcattcctgaaaaatcagaatcatacatactttcaagagaattccacagagacattgcccaggaagtcaaaatttagaaggctcctctgaagggaaagagaagactagagaggacactggtatgttccaagcaggagaaaatgaggagaaagacaagaaatttcaaacataagacagttaaagacaataaagtactcacagaagggagtgaccaagaatctgaaaaagacaatagtcagtgctgtgaccctgcaacaaatgagagagttcaggctgaaaagagacagtatgtatgtactgagtgtgggaaagcctttagtcagagtgcaaacctcacagtacatgagcgaatccacacgggagagaaaccctataagtgtaaggagtgtggaaaagctttcagtcatagctctaaccttgttgttcatcggagaatccacactggactgaagccctatacatgcagtgaatgtgggaaatctttcagtggaaagtcacatcttattcggcaccagggaatccacagtggggagaaaacttatgaatgtaaagagtgtgggaaagcctttagtcggagttcgggccttatatcacatcacagagttcacaccggagagaagccctattcttgtattgagtgtgggaaagcctttagccgtagttcaaaccttactcaacatcagcgaatgcacagaggaaaaaaagtttacaaatgtaaggagtgtgggaaaacatgtggttctaatacaaagattatggaccatcagagaattcacactggagagaagccttatgaatgtgatgagtgtggaaaaactttcatcttaaggaaaactcttaatgaacaccagagacttcatcgtagagagaaaccttacaaatgtaatgagtgtgggaaggcttttacttctaatcgaaaccttgttgatcatcagagagttcacactggagagaaaccctataaatgtaatgaatgtgggaaaaccttcaggcagacttctcaagttattctacacttgagaacccacactaaggagaaaccctataaatgtagtgagtgtgggaaagcctatcggtatagttcacagcttattcaacaccagaggaaacataatgaggagaaagaaacctcataaataacaaatattgtgggtagtagggctgactgctgcttttctaaaaagtagttctttagtatcaactttaattctacttctaagaatcatactctacttctaagaaaataattagaagtagacaaagattaatgaaagggatgttcatgacagcatcatatacgactgaaagaagaaaactagattttcaacattacagggttgaaatgaatgatgagctatccatatgatggttctgcagccattgcaaacatttttaaagacaatttaatgccatggggaaatgattggataagacggaagataatgacatacaatccaaaatttaaaaaaatatttttgcataggaaaaattgagaaggaagtaaaccaaaatgttaacagtgatcatctctgggcgataggattataggtgatttctattttcttctgtatacttttctatgctttctagattatctacatgagaatatactaattttatatgcaagaaaaaaagcacagtattttttaaatgcaatgaagacgtgcttattttcactcagcagtgttatgaaaggcacgtagtatatagagcccaaagccctgggattgcaccctgacactggcatttagcagcagtggaaccgcgagcaagtcccttccttttagagcgtgtttcctgttaagtaaaatcataaacaccgatcctttgtcctttttagttttaagacaagctgactttagagttgtcaacaaaatatataataacactgttaggttaaaagaacacagcaaaaattcactgaaccctcctttcccacagttctggaaggatctgcagatgatggagaactacctaggcttcatcttttcaacatatgtctacacaaccagaaaaaaatgaaattgaaacaactgtagactcaaaaacttcagatacagtcaccagttaatataaaactagtgggagactctgccttcacatggtatatagagtttaaaggctaaaagtacaaactttggggttggagatatccatgttctaaccccagttctaccatgaactagcttgtcagttttggacaagtcacttaactgctctgagcctcagacctgtgtgtaaaaaaggaacaattacctaccttacaaggttgttgtgaggattaagtgagtaatgcatgaaatatatgataagccagacacgtggtaaatgataaaatcttaagtataggacattgtagcagtgtttctaaacactttagggagagtgattaaagagaatttttgtgtaaggtagtacttaggatattttcagatgtattgaacagaataccaagtactagcagcctagaccttaagaacattgattgattgcttaaggggaatctagaggtaagcagtgctatgtttggtttggcaactcagcacttcatcacacttctctcttaactccataattttcagcatgttgactttcatttttcataacctcatggtggcaagacagtggccacagctgcatcttgccttcacacaactccttcagattgggaactggaaaaggagctgaggctttctcatctggtttcttccttttgtcactgagaaaaatctttccctgaagaagggacggagaggtgttgagcaatcaatacaacagatgttttctatcttcctctgcctttctttatgaccagtcctccttgaaggtcttagcccatcttccaccaatatttaaaacattttaagtgcttagctcaaagtcactctgaaacacttagaatctccctatttttaactcagccattcctctgtgtatacagtgaatccctaagcccactgttatctgtcttatgcacatagtgaattagtgtttggggaatttttgataatatgttatttagttctccctctattatacaagaaaattgagtgtcattgaggttaggtgactggctagtaagttgtcggagccaggatttgagctcagatctgactttgaaattcatgctttcttcattataccaaagtgcctctgcccaccatggtggttctgtatgtgagtggaagaccagttggcgttttcccaggtagctgcctctatgaaaggtgattgtatctaacaattatttgatatttgaccatggttttatagggaagatgttatcagtgttctgtgaatggggtttatggcctatctctgtacctcataatttagttttaaggtatatatatttctttcttgctgttaccggaaagaaagaagtgaagggtgaaggttgtatatttgtgtgaaaaaaaattactgattttgtcctattttgataggatagtggtttgcacataatttgtgatataatagtcctttgcatggtcattccaagcagggtttggaaggcctggaacagatttgtagcattcatggacaagcctggtctatcattcctgagcagaattgttgatgctttatatattgctgagcagatattctctgaccaaaacattttttcaccaccatgtcatagtgcctaaaactctttatttagataggctttcttttttgtcttagaagactatgatcttcaagagtatatctcaaggaaggatatgatgccatctcataaccagagaactgaatataggagagcttcatatttcttgccccaggcaggcgaggattatagtctcttgaggaggccatcacccatcttctaggctaatacctgccttgagctgtaggaataaacacttgacagtgggttcctgcatcctttcagataaacattcagctataatttgaactgatcacccacctttctccgggagtctcccagggttaccaacttttacctcagtcagagtttaggcatgcagctcttaccatcctttcaagccctttcataataccctctggaaaccaggaactgtctcttttaatgtgctttctttttctttcttttcttttcttttcttttttttttttttttgagatggaatctcgcactgtcgcccatgctggagtgcagtggcgtgatctcagctctcagctcaccgcaacctccagctcccaggttcaagcaattctcctgcctcagcctcctgagtagctgagattacaggcacctgccaccacacccagctaatttttgtatttttaatagagatagggtttcaccatgttggccaggctgatctcgaactcctgacctcacaagatccacctgcctcggcctcccaaagtgctgggattataggcatgagccactgcacctggctttatttatatgtgtatttatttatttatttatttatgagatggagtgttgctcttgtcgcccaggctggagtgcaatggcgtgatatcggctcactgcaacctctgcctcctgggttcaagcgattctcctgtctcagcctcccaagtagctgggattacaggtacctgccaccacacctggctaattttttgtatttttagtagagacgaggttttgccatgttggtcaggctggtcttgaatgaatgtgttttcttcacattcttgttccaatggaaaccgggctgttccccaagggcagtgcttattctgcattcctcaattgctggtttatgtgtctctcaactcatgtacctctctgtactgccatttcttctctcttctccatcagaaacttagctctaatcagtcatggttgcatacacacgtagtcctaggtactcaggaggctgaggggggaggatcacttgagcccaggagttcactgttacagtgagctatgatcacaattctgcactgcagcctaggtcacggagcaagaccctgtctcagaaacaaaacagtacaaaacaaaaaacccacaaaaacccaacccagtgcttttgaaatatatatcactaaactactgtgtattgctcattcttgttatttggtttcttgtctactcacatttattcacttacagttttagtaccctgaatattcctgaggaatataaagaggcaataattttagccacagacatcctggttatatagaattgctcctgtgtagaataaaaatatatatgctctttttagttgagaggaaaatacgaaaatctcattttatatagccttgagtagagggcaatacgtaagacaaagaattctgcttagagaggaaagtgtcgccctggacttagaaatcttttttcatagatggtgcgtcctgtgttaggtattacttggaagaaaattgaagtaaaaaacagctttaagtaactgagtaattaggattaattagtagctgttgaatctaaatcccttaagactaaatttcattgcagctctgtaccctcagcaggacttcctttcttgattgttttttccatttaatataaaatttaaaagatgcccatattgtcagttgtttttagtcgccagactgtctttaatagcctctgatgttataaaactggagtcatgaaattgttttgcaggaagtagtgataattccttcaataaacgtctgctattcttataaa

SEQ ID NO: 203376 - DNA, 474 bp, Homo sapiens
  Payload ID: 20103
  Gene Name: zinc finger protein 660
  ENST ID: ENST00000416644
  CDS Start-End: 357-474
ttgcgtacttcttgtcccacagtgctgtctgcagctcatccttgagggagctaatctcctgtttcagtgactcaagaccctcttaggaacttcttcactgaactcaaggaggagatcaggcaagatctgtgctgtgcagatcctttggattgaggctgctgtgcacaggaatatggatggtgaaactgggactgaggaggagttaattccaaagcatcattcctgaaaaatcagaatcatacatactttcaagagaattccacagagacattgcccaggaagtcaaaatttagaaggctcctctgaagggaaagagaagactagagaggacactggtatgttccaagcaggagaaaatgaggagaaagacaagaaatttcaaacataagacagttaaagacaataaagtactcacagaagggagtgaccaagaatctgaaaaagacaatagtcagtgctgtgaccctgcaacaa

SEQ ID NO: 203377 - DNA, 556 bp, Homo sapiens
  Payload ID: 20103
  Gene Name: zinc finger protein 660
  ENST ID: ENST00000441021
  CDS Start-End: 455-556
agttccttctgcgctttgttcaagatgtgggtctggcgctttcgtgactcaagaccctcttaggaacttcttcactgaactcaaggaggagatcaggcaagatctgtgctgtgcagatcctttggattgaggctgctgtgcacaggaatatgggtatttcctcttattccttactccactgcacctaatcaataaccaagaaccatgtaaccattgcttagagggacttgaacaggcagatgatgctggtgaattaaaggaagacagcctccaaatggtgaaactgggactgaggaggagttaattccaaagcatcattcctgaaaaatcagaatcatacatactttcaagagaattccacagagacattgcccaggaagtcaaaatttagaaggctcctctgaagggaaagagaagactagagaggacactggtatgttccaagcaggagaaaatgaggagaaagacaagaaatttcaaacataagacagttaaagacaataaagtactcacagaagggagtgaccaagaatctgaaaaagacaatagtcagtgc

SEQ ID NO: 203378 - DNA, 474 bp, Homo sapiens; identical to SEQ ID NO: 203376
  Payload ID: 20103
  Gene Name: zinc finger protein 660
  ENST ID: ENST00000630337
  CDS Start-End: 357-474

SEQ ID NO: 203379 - DNA, 556 bp, Homo sapiens; identical to SEQ ID NO: 203377
  Payload ID: 20103
  Gene Name: zinc finger protein 660
  ENST ID: ENST00000626409
  CDS Start-End: 455-556

SEQ ID NO: 203380 - DNA, 5834 bp, Homo sapiens; identical to SEQ ID NO: 203375
  Payload ID: 20103
  Gene Name: zinc finger protein 660
  Uniprot ID: Q6AZW8
  ENST ID: ENST00000625494
  CDS Start-End: 334-1329

SEQ ID NO: 203381 - DNA, 3186 bp, Homo sapiens
  Payload ID: 20104
  Gene Name: zinc finger protein 662
  Uniprot ID: Q6ZS27
  ENST ID: ENST00000328199
  CDS Start-End: 187-1545
cgggtgtggagcacggggagtcgggcgtggggcgggcagggagtggagtcggggtcttactccggtggctgcagggcgcagggtagccgtgtcaggcctgcccaggtgcagagcgctcttccgcgaccccaacagcctctggtccggtctggcgcgccctcgctttcccagagggcgacctgggctatggcggccgtggcgctggcgagcgggacacgcctcggccttgtcctcgagctgctcccgggacagcccgcgctgccccgggcgcgccgggagtcagtgaccttcgaggatgtggccgtctacttctctgagaacgaatggatcggcctgggccctgctcagagagccctgtacagggatgtgatgctggagaattatggggctgtggcttccctggcatttccatttcccaaaccggctctgatttcccagctggagcgaggggaaacaccctggtgctcggttcctcggggagctctggatggagaggccccaaggggcatctcctcagagggtgtgttgaagaggaagaaagaagattttattctgaaggaggaaattattgaggaagcacaggacctcatggtcctatcaagtggaccccagtggtgtggatcccaggaattatggtttgggaaaacctgtgaagagaaaagcaggttagggagatggcctggttacctcaatgggggacgtatggaaagttctacaaatgatattatagaagtgattgtcaaggatgagatgatctcagtagaagagagttcagggaatactgatgtcaataacctccttggtatacatcacaaaattctaaatgagcaaatattctatatatgtgaggaatgcggcaagtgttttgatcaaaatgaggactttgatcaacaccagaaaactcataatggagagaaggtctatggatgtaaggaatgtgggaaggctttcagttttcgatcacattgcattgcacatcagagaattcacagtggggtgaaaccctatgaatgtcaagaatgtgctaaggcctttgtttggaagtcaaacctgattcgtcaccagagaatacatactggagagaaaccctttgaatgtaaggaatgtgggaagggctttagtcagaacacaagccttacgcaacatcaacggatccacactggtgagaaaccatacacatgtaaggaatgtgggaaaagctttactcgaaacccagcccttcttcgacatcagagaatgcacactggggagaagccttacgaatgtaaggactgtgggaagggcttcatgtggaactcagatctttctcagcaccagagggtccacactggggacaagcctcatgaatgtactgactgtgggaaaagcttcttttgcaaggcacatcttattcgacatcaaagaatccatactggggaaagaccctataaatgtaatgactgtgggaaggccttcagtcagaattctgtcttaattaagcaccagaggcgccatgctagagacaaaccctataactgtcagatctctcaccttcttgaacattagagagtgcataatggtgatacttgtttataattcttatgctgcaggaaccctagagacaaaatgagatgaccattcacaatttgctgtaacccttaacttaaatagccagtattatcttgcccttttgaacatttaccatgtactctagcaagactggtccctctgttctatgatgttttaacaaggcatcatttagttgggcagctactctgtatcaggtgctaaccactttacatacattaatttgcataacaatcctattaaggtaggtgctcttctccccattttacaaatgagaaatctgagttgaaagaggttataaaactcattcagggttgctcagttagtaagttatagagttgaaattggagccaggcctatctgactgcagagtttactgttctttacttaattgtacatatttatgtctctgcccatttttatttgcttattttcctgtgcttttagtttcccttcatcactcagatctagctccttcaactaagaagatctctcttcctcttctacttgtaatcagtaccacccaagttagtatttaattatgtgccatcttatatttttctaatagtctcatgtcttttaatcttaaccccagctaaatgactctgaggaccaacagtacatttcttttatgtttttcaaatcctgaaacattaatctttgactagatataacatgctcatgataaaaaagaattgaaatagttgaaaagggtgttcagtgaaaagtaaatttccttgtcattcctatctcttgagttctccccagaggcaatcactgctactggttgtgtatctctgtagatactctttgtatacaagtgtttattagtattgcttttcataattctgtctcactgaaaaccttatttgatggaagcaacattgcagttaaattgtgaactctaagaccttttcttcagaagttgctttccttttgaggccaccaaagtaatttagggaaacagcagagggtaatccaggtctttttttttttttttttttttttagacagagtctcactctgttgctctggctggagtgcagtggtgctatctcagctcactgcaagctccacctcctgggttcatgccattcttctgcctcagcctcccaagtagctgggactacaggtgcccgccaccatgcctggctaatattttttatttttagtagagacggggtttcaccatgttagccaggctggtctcgatctcctgaccttgtgatccacctgtctcggcctcccaaagtgctgggattacaggcctcagctaccacgcctggccaatccaggtcttaagagacctcattgcctttgttttatgagatatcattctgggattgggaatatgtaaactcaactggagattttttttcataaaaatttatatagttccagccctctcattgcttcctatcctaaatcctcttccagtctgtccatccctcactaccatgatagtctacattctgataagctgtgaggccactgccaagggagggagaaatggtcactttctggtggtggttaatgctttgttagatagcttcatccagtcaatagttgaaaagttttcacataatccagtattggcatcagagccagaaatgccctccc

SEQ ID NO: 203382 - DNA, 4099 bp, Homo sapiens
  Payload ID: 20104
  Gene Name: zinc finger protein 662
  Uniprot ID: Q6ZS27
  ENST ID: ENST00000440367
  CDS Start-End: 532-1812
tggcagttaaagaaataactccccaggaggtgctagacatcgggcgcatgttagaggcacaaagatgagaatgttaaaagacataaaatacaggtctgctctgggaatgcaaaaactggtaaaaggagagataaaagagcaggtgcagtctagtgaagtacccgctacctcctatcagcaaatatctgtccacctagggtgcagcgagctggagaggaaggggtggcctagagcgcaggggaaggattcctccccagccgcctgcacccctaccccggtagcggtccctgggatcgtccgtgtctccaggagaaccggaccgctctcccctccctccccgagcgagaaaggaggaccacagagatgcggcgccctccgccgtcctagagcaaccggagcggcccgagccccggcctcccggatgctggggcctggcgggagtcagtgaccttcgaggatgtggccgtctacttctctgagaacgaatggatcggcctgggccctgctcagagagccctgtacagggatgtgatgctggagaattatggggctgtggcttccctggcagcatttccatttcccaaaccggctctgatttcccagctggagcgaggggaaacaccctggtgctcggttcctcggggagctctggatggagaggccccaaggggcatctcctcaggatatccatttctaaagcctgctgggatttcccatcctgagcaggtggaagagccattaaacctgaaactgcaaggagagggtccaagcctgatttgtccggagggtgtgttgaagaggaagaaagaagattttattctgaaggaggaaattattgaggaagcacaggacctcatggtcctatcaagtggaccccagtggtgtggatcccaggaattatggtttgggaaaacctgtgaagagaaaagcaggttagggagatggcctggttacctcaatgggggacgtatggaaagttctacaaatgatattatagaagtgattgtcaaggatgagatgatctcagtagaagagagttcagggaatactgatgtcaataacctccttggtatacatcacaaaattctaaatgagcaaatattctatatatgtgaggaatgcggcaagtgttttgatcaaaatgaggactttgatcaacaccagaaaactcataatggagagaaggtctatggatgtaaggaatgtgggaaggctttcagttttcgatcacattgcattgcacatcagagaattcacagtggggtgaaaccctatgaatgtcaagaatgtgctaaggcctttgtttggaagtcaaacctgattcgtcaccagagaatacatactggagagaaaccctttgaatgtaaggaatgtgggaagggctttagtcagaacacaagccttacgcaacatcaacggatccacactggtgagaaaccatacacatgtaaggaatgtgggaaaagctttactcgaaacccagcccttcttcgacatcagagaatgcacactggggagaagccttacgaatgtaaggactgtgggaagggcttcatgtggaactcagatctttctcagcaccagagggtccacactggggacaagcctcatgaatgtactgactgtgggaaaagcttcttttgcaaggcacatcttattcgacatcaaagaatccatactggggaaagaccctataaatgtaatgactgtgggaaggccttcagtcagaattctgtcttaattaagcaccagaggcgccatgctagagacaaaccctataactgtcagatctctcaccttcttgaacattagagagtgcataatggtgatacttgtttataattcttatgctgcaggaaccctagagacaaaatgagatgaccattcacaatttgctgtaacccttaacttaaatagccagtattatcttgcccttttgaacatttaccatgtactctagcaagactggtccctctgttctatgatgttttaacaaggcatcatttagttgggcagctactctgtatcaggtgctaaccactttacatacattaatttgcataacaatcctattaaggtaggtgctcttctccccattttacaaatgagaaatctgagttgaaagaggttataaaactcattcagggttgctcagttagtaagttatagagttgaaattggagccaggcctatctgactgcagagtttactgttctttacttaattgtacatatttatgtctctgcccatttttatttgcttattttcctgtgcttttagtttcccttcatcactcagatctagctccttcaactaagaagatctctcttcctcttctacttgtaatcagtaccacccaagttagtatttaattatgtgccatcttatatttttctaatagtctcatgtcttttaatcttaaccccagctaaatgactctgaggaccaacagtacatttcttttatgtttttcaaatcctgaaacattaatctttgactagatataacatgctcatgataaaaaagaattgaaatagttgaaaagggtgttcagtgaaaagtaaatttccttgtcattcctatctcttgagttctccccagaggcaatcactgctactggttgtgtatctctgtagatactctttgtatacaagtgtttattagtattgcttttcataattctgtctcactgaaaaccttatttgatggaagcaacattgcagttaaattgtgaactctaagaccttttcttcagaagttgctttccttttgaggccaccaaagtaatttagggaaacagcagagggtaatccaggtctttttttttttttttttttttttagacagagtctcactctgttgctctggctggagtgcagtggtgctatctcagctcactgcaagctccacctcctgggttcatgccattcttctgcctcagcctcccaagtagctgggactacaggtgcccgccaccatgcctggctaatattttttatttttagtagagacggggtttcaccatgttagccaggctggtctcgatctcctgaccttgtgatccacctgtctcggcctcccaaagtgctgggattacaggcctcagctaccacgcctggccaatccaggtcttaagagacctcattgcctttgttttatgagatatcattctgggattgggaatatgtaaactcaactggagattttttttcataaaaatttatatagttccagccctctcattgcttcctatcctaaatcctcttccagtctgtccatccctcactaccatgatagtctacattctgataagctgtgaggccactgccaagggagggagaaatggtcactttctggtggtggttaatgctttgttagatagcttcatccagtcaatagttgaaaagttttcacataatccagtattggcatcagagccagaaatgccctccctaggtccaggaccaaagataaaacaaacacgaggaacatgtagcgtctacacaggaaagtaaagaattatagaattaactaattctacttgaaatcaggagttttataaaacaacatttttagacgtggtcatcttttattggtttccatcatctcttccccttctctctgggaacagttacccgggtattctttgggaagctatcctttctcagctatgtggtttggcaccaccaccatcttcatgagtggaccctgtttggcttgtgtcaatcagtttatcccatccccttggccacagagccattgtgatatgaggagatactggctcttctggaaaagagaggcttttcttcatcgagagctaccagaggagatattatctgtcctctgtgtggcacataggaaaatgtgagacctagaattatagcaactttttttttctgttaaaaggggagattctcaagcttccaggtgctaccatatggagcctaaggataaagccaataccaaagaaaacagtgactaaacagagagaaactaggtccttggtgacatcttttgagccactagaccaagctttacctgaagcagagctacctcagaacttttcagctatgtgagccaataaacatctgtcaaacga

SEQ ID NO: 203383 - DNA, 436 bp, Homo sapiens
  Payload ID: 20104
  Gene Name: zinc finger protein 662
  ENST ID: ENST00000422021
  CDS Start-End: 94-414
gagtcagtgaccttcgaggatgtggccgtctacttctctgagaacgaatggatcggcctgggccctgctcagagagccctgtacagggatgtgatgctggagaattatggggctgtggcttccctggcagcatttccatttcccaaaccggctctgatttcccagctggagcgaggggaaacaccctggtgctcggttcctcggggagctctggatggagaggccccaaggggcatctcctcaggggagattctcaagcttccaggtgctaccatatggagcctaaggataaagccaataccaaagaaaacagtgactaaacagagagaaactaggtccttggtgacatcttttgagccactagaccaagctttacctgaagcagagctacctcagaacttttcagctatgtgagccaataaacatctgtcaaacg

SEQ ID NO: 203384 - DNA, 4227 bp, Homo sapiens
  Payload ID: 20105
  Gene Name: zinc finger protein 664
  Uniprot ID: Q8N3J9
  ENST ID: ENST00000337815
  CDS Start-End: 950-1735
gagagggaggtgggtgcgcggcgcccgcggcctggggcgctgactcccctcacttggaggcgccctgcgtccggcagaggaggcgagcatcccgctcaggtgatgaggaacccctcgcgcacccagcgcagaaggctgctgccgccggacgcctccattgtttgaccacaacaagggccggattctcacccagcaggatcctaaggcctttgtagtccttcagccactgtgggccctgcctctgcctgttcttctggaatgtcttgggggttttgatcctgtcactgtgacctgcaaatccaagagacacatctttggaagataagagagcttcttcaagaccaaaaaaggagacggcatgatacccatgtagggaattccccaaagcagggcttgccatacctggaccccgaggagcctgcttgctggaaaggctttcctgtctgatgtgcaggaggcagaatgccaaactgactcttcaaggggcaactgcaggggctcgagaccagccagcagtatctcatccttcgatacaggggatatactgtacagtcctttttctagaagtgagacatacaagattactctacaagaggaagattccaggggctcaaaaacgcaaaggtttgcactttgagagccccttggaatgttgacaactcaggatctaaaacaaagttctgtgttaatgagttacagaattcacgtggaagtcaatgtcactttataatcgataataatactgagtgaggaacactatgcaggaagaaaccttccgtagaaagacaggcagggaaaagcttaggctgaccttaaacttacctaatagagcaagcctgagatagactgccaaaatggccaaataagagactctatgaaataacagtcttgtaactgtagtaatcataaggaaattttctccttgaaatcacgataccaaataggaaaaatgatctacaagtgccccatgtgtagggaatttttctctgagagagcagatctttttatgcatcagaaaattcacacagctgagaagccccataaatgtgacaagtgtgataagggtttctttcatatatcagaacttcatattcattggagagaccatacaggagagaaggtctataaatgtgatgattgtggtaaggattttagcactacaacaaaacttaatagacataagaaaatccacacagtggagaagccctataaatgttacgagtgtggcaaagccttcaattggagctcccatcttcaaattcatatgagagttcatacaggtgagaaaccgtatgtctgtagtgagtgtggaaggggctttagtaatagttcaaacctttgcatgcatcagagagtccacaccggagagaagccctttaaatgtgaagagtgtgggaaggccttcaggcacacctccagcctctgcatgcatcaaagagtccacacaggagagaaaccctataaatgttatgagtgtgggaaggcgttcagtcagagttcgagcctctgcatccaccagagagtccacactggagagaaaccctatagatgttgtggatgtgggaaggccttcagtcagagttcgagcctgtgcatccaccagagagtccacacaggagagaaacctttcaaatgtgatgagtgcggaaaggccttcagtcagagtacgagcctctgcatccaccagagagtccacacaaaggagagaaaccatctcaaaatatcagttatataaaacgttttgctaagagtttaaaatcttaaaacccataagtgccactaggaaggaaaccctgtatatacctacattgacccaagaaatatttacgcaatccctagcagaacattgtttctgaggaggcatatgtgagattgatttgttggttcatgccaagtgtgttccacaggttgactttgaatgtggacctctgagcatccacgcaggatggctctcaggtcccagtcacagacgtcgcttcctgggattccagcacgatgcctccatagttgaaagactacacaaaaagccacaatcattgcccggcctcctgagtcaccttctatctatactttgcttaaaagctatcccagatactcccccttgaggagctcatgcccttccttcctctttattcgagcatactggcaatgcattggaaaacagacagctcccactaagatcacgttctggtatttctgaggttaacacttgatttagcccctacatatctttccatatatcctattatttctgaatatatgtcctcaaaatccccataaatatccatcccttcctagatggcattaactttcattttagattttaggtgactcataattcccattcacttagcctatcagaaaagtcattggcagacatatatgtccttgaaccttttttatttgtgtggattctgctcatcactgtctctgttagacttattttgtagtggctgcatcacatatttttcacttgaatttttttggaaatagctgaatgtaaatagcagggaggaagaagcaagcaaagtgagagcttttcttcatccagaattgccctctgggctcctttggtaacagatggagctccttcctagctagggagaccttatgagaagtggatggtaggaggagtcactaatgtttcaatctctatttctgtaatcttgggcaataatgcataggagttcttgataccccttcattgattactgtgtatcagttctttgttaggcatgaacgtctttattaatccatcattcttttcttcattcaacaaatatgtattgaacacctcctatatgccaggcactgtgctaggtgctgggaataccactgatgagacagacaaggtccctactcttgtggagtttacttctggtggaggagacagatgataagtaaacaaataaataatgtagtttgagatagtgattaagtgctatgaagaaaataaactagggtgatgattttagtggtggggtggggtgggggtggggtgacattagctagtggtcagggaggcctttccgcggtgggatgttgagctgaggccggaggagaagtagcagtcgctggcagagcacacaggctgctctgggggatgagctggtgcgtttaaggaacaggccagcactggcattcgcaagcagtggggaaggggagagatgccgaggtggtcagtatcctgactttcagaggcctttttttgtttgttttaatttttgctagattgatattaaaaactcatgtggaggaactcaaggaatgtttagaagaccaaaagtccccaatgacaggaacaaaagcaaccaatttttaactttctcttctcattcctgttttcattgatttcccacatgtagtccttttgctcaggaagtctttggggaaattaaggatctttgaagctctgaaataggtgatcaggttagtggtgtctgtcagctgtctaagaggttggaaaatgaactactcaagatagtcacgaaaatactgaaagtttgatttttctttccatatttgaattaattttttctgtttgactggaaggggtttttgtataactaaaacctcagcgcataaaggagatttaaaaggagcacatgatttagtgggtgggccatgaaactagagatgggatttgggggtgaatttgtcaatatctggattttaatccagacatctctgctaacaagcctttggtaagtcacttcagatacttttcctcctttttacaaagagagggctggcttagttatttgccaaagccccttccaggcctgaattccacaagtacgatttactgtagtgtcttatcactctttcatgtcacaatagcgtggagcattagagaaaagcctagacttttagttgatagccagttgaaatatcattgatagaattttagttttaggaaaaattggtttgatttctagctttattactattaggtatgtgagcttgggcaaatcgcttaatctttgagtctagttttctctcaaaatgagaacattaggctaaatgatttccgagtttccagctagtcctagagttctatatttctacatagttgaattattttatcatgctgttgctggggaatatgactaacccttttgaagctactaattttatgtcgagctttaaagtccataattgttatcttcagaaaatattatttgacctacagtatgtccaaatcaatttaataaaatcgctttataa

SEQ ID NO: 203385 - DNA, 4262 bp, Homo sapiens
  Payload ID: 20105
  Gene Name: zinc finger protein 664
  Uniprot ID: Q8N3J9
  ENST ID: ENST00000392404
  CDS Start-End: 981-1766
cgcgcgctgtcccccggaggcgtctgggtgtgcggagcgcgcgcgcgcgcggctcggaggcgcacctgtgaggtgtccctgaggagagggagggcgccctgcgtccggcagaggaggcgagcatcccgctcaggtgatgaggaacccctcgcgcacccagcgcagaaggctgctgccgccggacgcctccattgtttgaccacaacaagggccggattctcacccaggatcctaaggcctttgtagtccttcagccactgtgggccctgcctctgcctgttcttctggaatgtcttgggggttttgatcctgtcactgtgacctgcaaatccaagagacacatctttggaagataagagagcttcttcaagaccaaaaaaggagacggcatgatacccatgtagggaattccccaaagcagggcttgccatacctggaccccgaggagcctgcttgctggaaaggctttcctgtctgatgtgcaggaggcagaatgccaaactgactcttcaaggggcaactgcaggggctcgagaccagccagcagtatctcatccttcgatacaggggatatactgtacagtcctttttctagaagtgagacatacaagattactctacaagaggaagattccaggggctcaaaaacgcaaaggtttgcactttgagagccccttggaatgttgacaactcaggatctaaaacaaagttctgtgttaatgagttacagaattcacgtggaagtcaatgtcactttataatcgataataatactgagtgaggaacactatgcaggaagaaaccttccgtagaaagacaggcagggaaaagcttaggctgaccttaaacttacctaatagagcaagcctgagatagactgccaaaatggccaaataagagactctatgaaataacagtcttgtaactgtagtaatcataaggaaattttctccttgaaatcacgataccaaataggaaaaatgatctacaagtgccccatgtgtagggaatttttctctgagagagcagatctttttatgcatcagaaaattcacacagctgagaagccccataaatgtgacaagtgtgataagggtttctttcatatatcagaacttcatattcattggagagaccatacaggagagaaggtctataaatgtgatgattgtggtaaggattttagcactacaacaaaacttaatagacataagaaaatccacacagtggagaagccctataaatgttacgagtgtggcaaagccttcaattggagctcccatcttcaaattcatatgagagttcatacaggtgagaaaccgtatgtctgtagtgagtgtggaaggggctttagtaatagttcaaacctttgcatgcatcagagagtccacaccggagagaagccctttaaatgtgaagagtgtgggaaggccttcaggcacacctccagcctctgcatgcatcaaagagtccacacaggagagaaaccctataaatgttatgagtgtgggaaggcgttcagtcagagttcgagcctctgcatccaccagagagtccacactggagagaaaccctatagatgttgtggatgtgggaaggccttcagtcagagttcgagcctgtgcatccaccagagagtccacacaggagagaaacctttcaaatgtgatgagtgcggaaaggccttcagtcagagtacgagcctctgcatccaccagagagtccacacaaaggagagaaaccatctcaaaatatcagttatataaaacgttttgctaagagtttaaaatcttaaaacccataagtgccactaggaaggaaaccctgtatatacctacattgacccaagaaatatttacgcaatccctagcagaacattgtttctgaggaggcatatgtgagattgatttgttggttcatgccaagtgtgttccacaggttgactttgaatgtggacctctgagcatccacgcaggatggctctcaggtcccagtcacagacgtcgcttcctgggattccagcacgatgcctccatagttgaaagactacacaaaaagccacaatcattgcccggcctcctgagtcaccttctatctatactttgcttaaaagctatcccagatactcccccttgaggagctcatgcccttccttcctctttattcgagcatactggcaatgcattggaaaacagacagctcccactaagatcacgttctggtatttctgaggttaacacttgatttagcccctacatatctttccatatatcctattatttctgaatatatgtcctcaaaatccccataaatatccatcccttcctagatggcattaactttcattttagattttaggtgactcataattcccattcacttagcctatcagaaaagtcattggcagacatatatgtccttgaaccttttttatttgtgtggattctgctcatcactgtctctgttagacttattttgtagtggctgcatcacatatttttcacttgaatttttttggaaatagctgaatgtaaatagcagggaggaagaagcaagcaaagtgagagcttttcttcatccagaattgccctctgggctcctttggtaacagatggagctccttcctagctagggagaccttatgagaagtggatggtaggaggagtcactaatgtttcaatctctatttctgtaatcttgggcaataatgcataggagttcttgataccccttcattgattactgtgtatcagttctttgttaggcatgaacgtctttattaatccatcattcttttcttcattcaacaaatatgtattgaacacctcctatatgccaggcactgtgctaggtgctgggaataccactgatgagacagacaaggtccctactcttgtggagtttacttctggtggaggagacagatgataagtaaacaaataaataatgtagtttgagatagtgattaagtgctatgaagaaaataaactagggtgatgattttagtggtggggtggggtgggggtggggtgacattagctagtggtcagggaggcctttccgcggtgggatgttgagctgaggccggaggagaagtagcagtcgctggcagagcacacaggctgctctgggggatgagctggtgcgtttaaggaacaggccagcactggcattcgcaagcagtggggaaggggagagatgccgaggtggtcagtatcctgactttcagaggcctttttttgtttgttttaatttttgctagattgatattaaaaactcatgtggaggaactcaaggaatgtttagaagaccaaaagtccccaatgacaggaacaaaagcaaccaatttttaactttctcttctcattcctgttttcattgatttcccacatgtagtccttttgctcaggaagtctttggggaaattaaggatctttgaagctctgaaataggtgatcaggttagtggtgtctgtcagctgtctaagaggttggaaaatgaactactcaagatagtcacgaaaatactgaaagtttgatttttctttccatatttgaattaattttttctgtttgactggaaggggtttttgtataactaaaacctcagcgcataaaggagatttaaaaggagcacatgatttagtgggtgggccatgaaactagagatgggatttgggggtgaatttgtcaatatctggattttaatccagacatctctgctaacaagcctttggtaagtcacttcagatacttttcctcctttttacaaagagagggctggcttagttatttgccaaagccccttccaggcctgaattccacaagtacgatttactgtagtgtcttatcactctttcatgtcacaatagcgtggagcattagagaaaagcctagacttttagttgatagccagttgaaatatcattgatagaattttagttttaggaaaaattggtttgatttctagctttattactattaggtatgtgagcttgggcaaatcgcttaatctttgagtctagttttctctcaaaatgagaacattaggctaaatgatttccgagtttccagctagtcctagagttctatatttctacatagttgaattattttatcatgctgttgctggggaatatgactaacccttttgaagctactaattttatgtcgagctttaaagtccataattgttatcttcagaaaatattatttgacctacagtatgtccaaatcaatttaataaaatcgctttataacagg

SEQ ID NO: 203386 - DNA, 4321 bp, Homo sapiens
  Payload ID: 20105
  Gene Name: zinc finger protein 664
  Uniprot ID: Q8N3J9
  ENST ID: ENST00000538932
  CDS Start-End: 1027-1812
gcgctgtcccccggaggcgtctgggtgtgcggagcgcgcgcgcgcgcggctcggaggcgcacctgtgaggtgtccctgaggagagggaggtgggtgcgcggcgcccgcggcctggggcgctgactcccctcacttggaggcgccctgcgtccggcagaggaggcgagcatcccgctcaggtgatgaggaacccctcgcgcacccagcgcagaaggctgctgccgccggacgcctccattgtttgaccacaacaagggccggattctcacccaggatcctaaggcctttgtagtccttcagccactgtgggccctgcctctgcctgttcttctggaatgtcttgggggttttgatcctgtcactgtgacctgcaaatccaagagacacatctttggaagataagagagcttcttcaagaccaaaaaaggagacggcatgatacccatgtagggaattccccaaagcagggcttgccatacctggaccccgaggagcctgcttgctggaaaggctttcctgtctgatgtgcaggaggcagaatgccaaactgactcttcaaggggcaactgcaggggctcgagaccagccagcagtatctcatccttcgatacaggggatatactgtacagtcctttttctagaagtgagacatacaagattactctacaagaggaagattccaggggctcaaaaacgcaaaggtttgcactttgagagccccttggaatgttgacaactcaggatctaaaacaaagttctgtgttaatgagttacagaattcacgtggaagtcaatgtcactttataatcgataataatactgagtgaggaacactatgcaggaagaaaccttccgtagaaagacaggcagggaaaagcttaggctgaccttaaacttacctaatagagcaagcctgagatagactgccaaaatggccaaataagagactctatgaaataacagtcttgtaactgtagtaatcataaggaaattttctccttgaaatcacgataccaaataggaaaaatgatctacaagtgccccatgtgtagggaatttttctctgagagagcagatctttttatgcatcagaaaattcacacagctgagaagccccataaatgtgacaagtgtgataagggtttctttcatatatcagaacttcatattcattggagagaccatacaggagagaaggtctataaatgtgatgattgtggtaaggattttagcactacaacaaaacttaatagacataagaaaatccacacagtggagaagccctataaatgttacgagtgtggcaaagccttcaattggagctcccatcttcaaattcatatgagagttcatacaggtgagaaaccgtatgtctgtagtgagtgtggaaggggctttagtaatagttcaaacctttgcatgcatcagagagtccacaccggagagaagccctttaaatgtgaagagtgtgggaaggccttcaggcacacctccagcctctgcatgcatcaaagagtccacacaggagagaaaccctataaatgttatgagtgtgggaaggcgttcagtcagagttcgagcctctgcatccaccagagagtccacactggagagaaaccctatagatgttgtggatgtgggaaggccttcagtcagagttcgagcctgtgcatccaccagagagtccacacaggagagaaacctttcaaatgtgatgagtgcggaaaggccttcagtcagagtacgagcctctgcatccaccagagagtccacacaaaggagagaaaccatctcaaaatatcagttatataaaacgttttgctaagagtttaaaatcttaaaacccataagtgccactaggaaggaaaccctgtatatacctacattgacccaagaaatatttacgcaatccctagcagaacattgtttctgaggaggcatatgtgagattgatttgttggttcatgccaagtgtgttccacaggttgactttgaatgtggacctctgagcatccacgcaggatggctctcaggtcccagtcacagacgtcgcttcctgggattccagcacgatgcctccatagttgaaagactacacaaaaagccacaatcattgcccggcctcctgagtcaccttctatctatactttgcttaaaagctatcccagatactcccccttgaggagctcatgcccttccttcctctttattcgagcatactggcaatgcattggaaaacagacagctcccactaagatcacgttctggtatttctgaggttaacacttgatttagcccctacatatctttccatatatcctattatttctgaatatatgtcctcaaaatccccataaatatccatcccttcctagatggcattaactttcattttagattttaggtgactcataattcccattcacttagcctatcagaaaagtcattggcagacatatatgtccttgaaccttttttatttgtgtggattctgctcatcactgtctctgttagacttattttgtagtggctgcatcacatatttttcacttgaatttttttggaaatagctgaatgtaaatagcagggaggaagaagcaagcaaagtgagagcttttcttcatccagaattgccctctgggctcctttggtaacagatggagctccttcctagctagggagaccttatgagaagtggatggtaggaggagtcactaatgtttcaatctctatttctgtaatcttgggcaataatgcataggagttcttgataccccttcattgattactgtgtatcagttctttgttaggcatgaacgtctttattaatccatcattcttttcttcattcaacaaatatgtattgaacacctcctatatgccaggcactgtgctaggtgctgggaataccactgatgagacagacaaggtccctactcttgtggagtttacttctggtggaggagacagatgataagtaaacaaataaataatgtagtttgagatagtgattaagtgctatgaagaaaataaactagggtgatgattttagtggtggggtggggtgggggtggggtgacattagctagtggtcagggaggcctttccgcggtgggatgttgagctgaggccggaggagaagtagcagtcgctggcagagcacacaggctgctctgggggatgagctggtgcgtttaaggaacaggccagcactggcattcgcaagcagtggggaaggggagagatgccgaggtggtcagtatcctgactttcagaggcctttttttgtttgttttaatttttgctagattgatattaaaaactcatgtggaggaactcaaggaatgtttagaagaccaaaagtccccaatgacaggaacaaaagcaaccaatttttaactttctcttctcattcctgttttcattgatttcccacatgtagtccttttgctcaggaagtctttggggaaattaaggatctttgaagctctgaaataggtgatcaggttagtggtgtctgtcagctgtctaagaggttggaaaatgaactactcaagatagtcacgaaaatactgaaagtttgatttttctttccatatttgaattaattttttctgtttgactggaaggggtttttgtataactaaaacctcagcgcataaaggagatttaaaaggagcacatgatttagtgggtgggccatgaaactagagatgggatttgggggtgaatttgtcaatatctggattttaatccagacatctctgctaacaagcctttggtaagtcacttcagatacttttcctcctttttacaaagagagggctggcttagttatttgccaaagccccttccaggcctgaattccacaagtacgatttactgtagtgtcttatcactctttcatgtcacaatagcgtggagcattagagaaaagcctagacttttagttgatagccagttgaaatatcattgatagaattttagttttaggaaaaattggtttgatttctagctttattactattaggtatgtgagcttgggcaaatcgcttaatctttgagtctagttttctctcaaaatgagaacattaggctaaatgatttccgagtttccagctagtcctagagttctatatttctacatagttgaattattttatcatgctgttgctggggaatatgactaacccttttgaagctactaattttatgtcgagctttaaagtccataattgttatcttcagaaaatattatttgacctacagtatgtccaaatcaatttaataaaatcgctttataacagggttctgtgcttga

SEQ ID NO: 203387 - DNA, 5108 bp, Homo sapiens
  Payload ID: 20105
  Gene Name: zinc finger protein 664
  Uniprot ID: Q8N3J9
  ENST ID: ENST00000539644
  CDS Start-End: 1831-2616
ggaggcgggcggtgggggcgcgggccgggtggccgcgcatgcgtgcggcccccgctcccccggggcttccccggcctcgtgcgtgcgcacgcgcgctgtcccccggaggcgtctgggtgtgcggagcgcgcgcgcgcgcggctcggaggcgcacctgtgaggtgtccctgaggagagggaggtgggtgcgcggcgcccgcggcctggggcgctgactcccctcacttggagtgagttctcggcggccgggctgcagtctttctttctttcccggagggaggcgggggccgggggccagggagcgggctgggggtgggaaggaggtggagtggcttaaagaaaagaaaaacaacccatcccggaggatgggcctcgggatggcggggaaggtcagagcggctccgcgcagcctggcgggtcccgggctgagaagccgcccctcgggcctcgggcggtcggccgcgggcccgcagtgcgggggagcggggccggggggcgcagatggcggccggtgcgagcgagggctgggcagcgggcagggcgaggccgggcgaggcccctcgggagccggactcccgagccaggctccattgttgttggagccgagggaagggggagcgctgccgccctcgtcgcccgtggagccgcgtcttggagcccttccaggcgggtcccgggagaggcggtcatggccgcgccaggggaccggggagccgggcggctgcggaggagccggctgcatggggtgctgtgtgtttttcagggcgccctgcgtccggcagaggaggcgagcatcccgctcaggtgatgaggaacccctcgcgcacccagcgcagaaggctgctgccgccggacgcctccattgtttgaccacaacaagggccggattctcacccagcaggatcctaaggcctttgtagtccttcagccactgtgggccctgcctctgcctgttcttctggaatgtcttgggggttttgatcctgtcactgtgagtcttgctctgtcgcccaggctggagtgcagtggcacgatctcagctcattgcaacctctgtctcccaggttcaagcgattctcctgcctcagcctctggagtagctgggattacagatgggaccacctagttgcaggaaaacaagctcagggctcccactgattctacattatgacctgcaaatccaagagacacatctttggaagataagagagcttcttcaagaccaaaaaaggagacggcatgatacccatgtagggaattccccaaagcagggcttgccatacctggaccccgaggagcctgcttgctggaaaggctttcctgtctgatgtgcaggaggcagaatgccaaactgactcttcaaggggcaactgcaggggctcgagaccagccagcagtatctcatccttcgatacaggggatatactgtacagtcctttttctagaagtgagacatacaagattactctacaagaggaagattccaggggctcaaaaacgcaaaggtttgcactttgagagccccttggaatgttgacaactcaggatctaaaacaaagttctgtgttaatgagttacagaattcacgtggaagtcaatgtcactttataatcgataataatactgagtgaggaacactatgcaggaagaaaccttccgtagaaagacaggcagggaaaagcttaggctgaccttaaacttacctaatagagcaagcctgagatagactgccaaaatggccaaataagagactctatgaaataacagtcttgtaactgtagtaatcataaggaaattttctccttgaaatcacgataccaaataggaaaaatgatctacaagtgccccatgtgtagggaatttttctctgagagagcagatctttttatgcatcagaaaattcacacagctgagaagccccataaatgtgacaagtgtgataagggtttctttcatatatcagaacttcatattcattggagagaccatacaggagagaaggtctataaatgtgatgattgtggtaaggattttagcactacaacaaaacttaatagacataagaaaatccacacagtggagaagccctataaatgttacgagtgtggcaaagccttcaattggagctcccatcttcaaattcatatgagagttcatacaggtgagaaaccgtatgtctgtagtgagtgtggaaggggctttagtaatagttcaaacctttgcatgcatcagagagtccacaccggagagaagccctttaaatgtgaagagtgtgggaaggccttcaggcacacctccagcctctgcatgcatcaaagagtccacacaggagagaaaccctataaatgttatgagtgtgggaaggcgttcagtcagagttcgagcctctgcatccaccagagagtccacactggagagaaaccctatagatgttgtggatgtgggaaggccttcagtcagagttcgagcctgtgcatccaccagagagtccacacaggagagaaacctttcaaatgtgatgagtgcggaaaggccttcagtcagagtacgagcctctgcatccaccagagagtccacacaaaggagagaaaccatctcaaaatatcagttatataaaacgttttgctaagagtttaaaatcttaaaacccataagtgccactaggaaggaaaccctgtatatacctacattgacccaagaaatatttacgcaatccctagcagaacattgtttctgaggaggcatatgtgagattgatttgttggttcatgccaagtgtgttccacaggttgactttgaatgtggacctctgagcatccacgcaggatggctctcaggtcccagtcacagacgtcgcttcctgggattccagcacgatgcctccatagttgaaagactacacaaaaagccacaatcattgcccggcctcctgagtcaccttctatctatactttgcttaaaagctatcccagatactcccccttgaggagctcatgcccttccttcctctttattcgagcatactggcaatgcattggaaaacagacagctcccactaagatcacgttctggtatttctgaggttaacacttgatttagcccctacatatctttccatatatcctattatttctgaatatatgtcctcaaaatccccataaatatccatcccttcctagatggcattaactttcattttagattttaggtgactcataattcccattcacttagcctatcagaaaagtcattggcagacatatatgtccttgaaccttttttatttgtgtggattctgctcatcactgtctctgttagacttattttgtagtggctgcatcacatatttttcacttgaatttttttggaaatagctgaatgtaaatagcagggaggaagaagcaagcaaagtgagagcttttcttcatccagaattgccctctgggctcctttggtaacagatggagctccttcctagctagggagaccttatgagaagtggatggtaggaggagtcactaatgtttcaatctctatttctgtaatcttgggcaataatgcataggagttcttgataccccttcattgattactgtgtatcagttctttgttaggcatgaacgtctttattaatccatcattcttttcttcattcaacaaatatgtattgaacacctcctatatgccaggcactgtgctaggtgctgggaataccactgatgagacagacaaggtccctactcttgtggagtttacttctggtggaggagacagatgataagtaaacaaataaataatgtagtttgagatagtgattaagtgctatgaagaaaataaactagggtgatgattttagtggtggggtggggtgggggtggggtgacattagctagtggtcagggaggcctttccgcggtgggatgttgagctgaggccggaggagaagtagcagtcgctggcagagcacacaggctgctctgggggatgagctggtgcgtttaaggaacaggccagcactggcattcgcaagcagtggggaaggggagagatgccgaggtggtcagtatcctgactttcagaggcctttttttgtttgttttaatttttgctagattgatattaaaaactcatgtggaggaactcaaggaatgtttagaagaccaaaagtccccaatgacaggaacaaaagcaaccaatttttaactttctcttctcattcctgttttcattgatttcccacatgtagtccttttgctcaggaagtctttggggaaattaaggatctttgaagctctgaaataggtgatcaggttagtggtgtctgtcagctgtctaagaggttggaaaatgaactactcaagatagtcacgaaaatactgaaagtttgatttttctttccatatttgaattaattttttctgtttgactggaaggggtttttgtataactaaaacctcagcgcataaaggagatttaaaaggagcacatgatttagtgggtgggccatgaaactagagatgggatttgggggtgaatttgtcaatatctggattttaatccagacatctctgctaacaagcctttggtaagtcacttcagatacttttcctcctttttacaaagagagggctggcttagttatttgccaaagccccttccaggcctgaattccacaagtacgatttactgtagtgtcttatcactctttcatgtcacaatagcgtggagcattagagaaaagcctagacttttagttgatagccagttgaaatatcattgatagaattttagttttaggaaaaattggtttgatttctagctttattactattaggtatgtgagcttgggcaaatcgcttaatctttgagtctagttttctctcaaaatgagaacattaggctaaatgatttccgagtttccagctagtcctagagttctatatttctacatagttgaattattttatcatgctgttgctggggaatatgactaacccttttgaagctactaattttatgtcgagctttaaagtccataattgttatcttcagaaaatattatttgacctacagtatgtccaaatcaatttaataaaatcgctttataa

SEQ ID NO: 203388 - DNA, 4159 bp, Homo sapiens
  Payload ID: 20106
  Gene Name: zinc finger protein 665
  Uniprot ID: Q9H7R5
  ENST ID: ENST00000396424
  CDS Start-End: 91-2127
aaacccggaagcagatctcttggagtgaaggctgttagtcgccgcgtagaaccctggaagaagaggaagaggaaggcaaaggagtcagggatggctcttcctcagggacagttgacattcaaggatgtggccatagaattctctcaggaggagtggacatgcctggaccctgctcagaagactttgtacagggacgtcatgttggagaattataggaacctggtctccctggatatctcttgtaaatgtgtaaacacggatttgccaccaaaggggaagaacaatatgggagaagcgttctacacggtgaagttggagagacttgaaagctgtgacactgtaggcttgtccttccaggaagttcagaaaaatacatacgactttgagtgtcagtggaaagatgatgaaggaaattataaaacagtacttatgttgcaaaaagaaaatctccctggtagaagagctcaacgtgatagaagggctgcaggaaacaggcatattgaaaatcagcttggagtaagctttcagtcacatctccctgaactgcagcaatttcaacatgaagggaaaatttatgaatacaatcaagttgagaagtctcctaataatcgaggaaaacattataaatgtgatgaatgtggcaaggtcttcagtcaaaactcacggctaacaagtcataagagaattcatactggagagaagccttaccagtgtaataagtgtggcaaagcctttactgttcgttcaaacctaacaatccatcaggtcatccatactggagaaaaaccttacaaatgtaatgaatgtggaaaggtcttcagtcaaccttcaaaccttgcaggtcatcagagaattcatactggagagaaaccttacaagtgtaatgagtgtggcaaagcctttagagcacattcaaaactaactacacatcaggtcatccatactggagaaaaaccttacaaatgtaaggaatgtggcaagtgcttcactcaaaattcacaccttgcaagtcatcgaagaattcatactggggagaagccttacaagtgtaatgagtgtggcaaagcctttagtgttcgctcaagcctgactacccatcagacaatccacactggagaaaaaccttacaaatgtaatgaatgtggcaaggtcttcaggcacaattcataccttgcaaagcatcggcgaattcatactggtgagaaaccttacaagtgtaatgagtgtgggaaagccttcagtatgcattcaaacttaactaagcatcagatcatccataccggagaaaagcctttcaaatgtaatgaatgcgtcaaggttttcactcagtattcacacttagcaaatcatcgaagaattcatactggagagaaaccttacaggtgtgatgagtgtggcaaagcctttagtgtgcgatcaagcctaactacccatcaggcaattcatactggagaaaagccttacaaatgtaatgactgcggtaaggtcttcacacaaaattcacaccttgcaagtcatcggggaattcattctggagagaaaccttacaagtgtgatgaatgtggtaaagccttcagtcaaacatcacaacttgcaaggcattggagagttcatactggagaaaaaccttacaagtgtaatgagtgtggcaaagcctttagtgttcattcaagcctaactatacatcagacaatacatactggacaaaaaccatacaaatgtaatgattgcggcaaggtcttcagacacaattcgtaccttgcaattcatcagagaattcacactggtgagaaaccttataagtgtaatgagtgcggcaaagcatttagtgtacattcaaacctagctacccatcaggtcatccatactggagaaaaaccttacaaatgtaatgaatgtggcaaggtcttcactcaaaattcacatcttgcaaatcatagaagaattcacactggagaaaaaccttataggtgtaatgagtgtgggaaagccttcagtgttcgttcaaccctaactacccatatggcagtccatactggagacaaaccttacaaatgtaaccaatgtggcaaggtctttactcaaaattcaaaccttgcaaaacatcgaagaattcatagtggatagaaaccttacaaaggacgccgggcgtggtggctcacgcctgtaatcccagcactttgggaggccgaggcggggggatcacctgaggtctcgagttcgagaccaggctggccaacacggtgaaacgctgtctctactaaaaatacaaaaattagctgggtgtggtggtgcacgcctgtaatcccagctactcgggaggctgaggcaggagaatcacttgaacctgggaggcggaggttgcagtgagcgagatcatgccattgcactccagcctgggcaacaggagtgaaactccatctccaaaaaaaaaaaaaaaaaaaaagtaaccttacaaaggagtgcggccagtttttcagccacaaattctttcacaacatcagagaattcattcttgagacaattcttacaaatacagtgactgtggcaaactcctgatgagtttaagcattaacagacatcagagttcaaatcctgtgaatatactatgtatgacagaagctttatccaggtctcagagctcaatacgcatcaaaagatacatctttgatgaagtcacacaaacgtaacatgcatgctgagactattactcctggaccacaactgtaggtgaggattcataggaagagtagaactcagtctctagtttcctcataaccctctgatattatatacttcagcataatcagaagtccaaatgtgttaaaactcattacatgatacatatcaaaggttgtaggatgtttggaaatggccaattactttcagcttataaaatgttttgttgaagtatttaagatttattgaaaaggctactatttataacttccaaccagaactttgcaatgtgctgattttatacatgattatacgcctaacatggtgttgttcgggaaagaatcaaaggatggaagggctcactcacttcattaggtgaggattatttctctccaagctcctgaagaaaaaagactctgccttttaaaattaaatatagtctgaattagagagcacttggaaagggcagaggatgatgaactatgatgtcactcatcatccttattgcactgcaggtgcccttcttctgacagaagagcactgtgggtatgggaagaaattctctactggccgggcacagtggctcacgcctgtaatgccagcactttgggaggccaaggtgggtggatcacctgaggtcgggagttcgagaccagcctgaccaacatggagaaaccccatctctactaaaaatacaaaattagccaggcatggtggcgcatgcctgtaatcccagctactcaggaggctgaggcaggagactcgcttgaacccgggaggcagaggttgtggtgagccgagatcatgccactgcactccagtctgggcaataagagcgaaactctgactcaaaaaaagaaagaaagaaattctctaccagtagaccatgaaatagagccaggaagacactcggatttttattagaggagagtaatagcttattagggactgatgtgtggtacaaataatgcagaaaagtggaggctaccttctccatcaaatgccaatagctgttgcatagcaaagattgatttttttttttttttttgagatggagtcttgttctgttgcccaggctggagtgcagtgatgcaatctcagctcaccgcaacctccgcctcctgggttttagcgattctcctgcctcagcctcccaagtagctgggattacagacatgcaccaccacgcctggctaatgtttgtatttttagtagagatggagtttcactatgtttgccaggctggtctcgaactcctgacctcataatccgcccaccttggcctgccaaagtgctgggattacgggctggagccaccgtgcccggccggccgagcataagaagtttaatcaaagtaaccagaatcccatgtttgttactaggatttacattaactgctggaatcacattttgctactatttaagaatgcatcatagatttaatgttttaactaataaaatttgatgtattttataagta

SEQ ID NO: 203389 - DNA, 2273 bp, Homo sapiens
  Payload ID: 20106
  Gene Name: zinc finger protein 665
  Uniprot ID: Q9H7R5
  ENST ID: ENST00000600412
  CDS Start-End: 117-1958
gcgcgggcagtttcttgcaaacccggaagcagatctcttggagtgaaggctgttagtcgccgcatatctcttgtaaatgtgtaaacacggatttgccaccaaaggggaagaacaatatgggagaagcgttctacacggtgaagttggagagacttgaaagctgtgacactgtaggcttgtccttccaggaagttcagaaaaatacatacgactttgagtgtcagtggaaagatgatgaaggaaattataaaacagtacttatgttgcaaaaagaaaatctccctggtagaagagctcaacgtgatagaagggctgcaggaaacaggcatattgaaaatcagcttggagtaagctttcagtcacatctccctgaactgcagcaatttcaacatgaagggaaaatttatgaatacaatcaagttgagaagtctcctaataatcgaggaaaacattataaatgtgatgaatgtggcaaggtcttcagtcaaaactcacggctaacaagtcataagagaattcatactggagagaagccttaccagtgtaataagtgtggcaaagcctttactgttcgttcaaacctaacaatccatcaggtcatccatactggagaaaaaccttacaaatgtaatgaatgtggaaaggtcttcagtcaaccttcaaaccttgcaggtcatcagagaattcatactggagagaaaccttacaagtgtaatgagtgtggcaaagcctttagagcacattcaaaactaactacacatcaggtcatccatactggagaaaaaccttacaaatgtaaggaatgtggcaagtgcttcactcaaaattcacaccttgcaagtcatcgaagaattcatactggggagaagccttacaagtgtaatgagtgtggcaaagcctttagtgttcgctcaagcctgactacccatcagacaatccacactggagaaaaaccttacaaatgtaatgaatgtggcaaggtcttcaggcacaattcataccttgcaaagcatcggcgaattcatactggtgagaaaccttacaagtgtaatgagtgtgggaaagccttcagtatgcattcaaacttaactaagcatcagatcatccataccggagaaaagcctttcaaatgtaatgaatgcgtcaaggttttcactcagtattcacacttagcaaatcatcgaagaattcatactggagagaaaccttacaggtgtgatgagtgtggcaaagcctttagtgtgcgatcaagcctaactacccatcaggcaattcatactggagaaaagccttacaaatgtaatgactgcggtaaggtcttcacacaaaattcacaccttgcaagtcatcggggaattcattctggagagaaaccttacaagtgtgatgaatgtggtaaagccttcagtcaaacatcacaacttgcaaggcattggagagttcatactggagaaaaaccttacaagtgtaatgagtgtggcaaagcctttagtgttcattcaagcctaactatacatcagacaatacatactggacaaaaaccatacaaatgtaatgattgcggcaaggtcttcagacacaattcgtaccttgcaattcatcagagaattcacactggtgagaaaccttataagtgtaatgagtgcggcaaagcatttagtgtacattcaaacctagctacccatcaggtcatccatactggagaaaaaccttacaaatgtaatgaatgtggcaaggtcttcactcaaaattcacatcttgcaaatcatagaagaattcacactggagaaaaaccttataggtgtaatgagtgtgggaaagccttcagtgttcgttcaaccctaactacccatatggcagtccatactggagacaaaccttacaaatgtaaccaatgtggcaaggtctttactcaaaattcaaaccttgcaaaacatcgaagaattcatagtggatagaaaccttacaaaggacgccgggcgtggtggctcacgcctgtaatcccagcactttgggaggccgaggcggggggatcacctgaggtctcgagttcgagaccaggctggccaacacggtgaaacgctgtctctactaaaaatacaaaaattagctgggtgtggtggtgcacgcctgtaatcccagctactcgggaggctgaggcaggagaatcacttgaacctgggaggcggaggttgcagtgagcgagatcatgccattgcactccagcctgggcaacaggagtgaaactccatctccaaaaaaaaaaaaaaaaa

SEQ ID NO: 203390 - DNA, 3832 bp, Homo sapiens
  Payload ID: 20107
  Gene Name: zinc finger protein 667
  Uniprot ID: Q5HYK9
  ENST ID: ENST00000292069
  CDS Start-End: 163-1995
gcagcgcgcggtcccggggtcccggaggggagtgcgcaggcgctgagtccctgctcggctgtctcggtggtcgccgccggggtctgagcccgggaagaccgagccctgccttaccagctctctgcccatctctcagtgtggaccctaaagggggaggaaaggatgccttctgcacgggggaaatccaaatccaaggcacctataacatttggggacttagccatctacttctcccaggaggagtgggaatggctgagccccattcagaaggatttgtatgaagatgtcatgttggagaattaccggaacctggtctcgcttggtctttcctttcggagaccaaatgtgatcaccttattggagaaagggaaagcaccctggatggtagagccagtaagaagacgccgggctcctgactcggggtctaaatgtgagaccaagaagttacctccaaatcaatgcaacaaatctgggcaaagcatctgccagaaactagtttctgcacaacaaaaagctcctacacgaaagagtggctgcaacaaaaattcagtcctagtaaaacctaagaaagggcattcagggaagaaacctttaaaatgtaatgactgtggtaaaacctttagtcgaagcttctctcttaaacttcatcagaacattcatacaggagagaagccttttgaatgcagtaattgtagaaaagctttcagacagatctcatccatcctacttcatcagagaattcacagtggaaagaaaagccatgaatgcaataaatgtggggaaagcttcaatcaaagaacaacccttattctacatatgagaattcatgatggaaaggaaattcttgactgtgggaaggccttgagtcaatgtcagtctttcaatatacatcagaaaattcatgttgttgggaatgtctgccagtgcagaaagtgcggaaaagccttcaatcagatgtcatcccttttacttcataagaaaattcacaatggaaagaaaacacataaatataataaatgtgggagaggcttcaaaaagaaatcagtctttgttgtacataaaagaattcatgctggagagaaaatccctgaaaatgcgaaggccttaagtcagagtctacagcaaagaagtcaccatttagagaatccttttaaatgcagaaaatgtgggaaattatttaataggatttcacccctgatgcttcaccagagaattcacacttcagagaaaccgtacaaatgtgataaatgtgacaagttcttcaggcggctttcaacccttattctgcatctaagaattcataatggagaaaaactatacagatgcaataaatgtgagaaggtctgcaatcggcattcatcccttattcaacatcagaaagttcatacaaagaaaaagaaactatttgagtgtaaggaatgtgggaagatgttttctggaactgcaaaccttaaaatacatcagaatattcattctgaagagaaacctttcaaatgcaataaatgtagtaaagttttcggccgccaatcatttcttattgaacatcaaagaattcatactggagaaaaaccctaccagtgtgaggaatgtggaaaagccttcagccaccgaatatctctcacacgacataagagaattcatactgaagatagaccctatgaatgtgatcagtgtgggaaggccttcagccagagtgcacacctcgcccaacatgaaagaattcacactggagagaagccatatacatgcaaaacatgtggtaaggcctttagtcagcgcacatctcttattctacatgaaagaagtcatactggagagaaaccctatgaatgtaatgaatgtgggaaggcatttagcagtggctcagaccttattcgacatcagagaagtcattcttcagagaaaccctatgaatgtagtaaatgtgggaaggcatatagtcggagttcatccctgattcgacatcagaatacacattctgaagaaaaagcctaaggttgttttaaatctataaaatcaacgaatgaggctatcaaacatatggcaaatatgtatttgtctataatgtaaattttgtgtatatgggaccatttgatgatatgtcccactttgaaagccaaagagcaaaagtcattggtgattttgacctcaggatttgaaattaactgaaggaaactcagaagtttggtcagtcattgtgaatgaagatcatttttcatttgataagaattactggctgggcgcagtggcttacacctgtaaccccagcactttgggaggctgagacaggcggatcacgaggtcaagagtttgagaccacggtgaaaccctgtctctactaaaaaatacaaaattagctgggcgtggtggtgcgcacctgtaatctcagctactggagaggctgaggcaggagaatcgcttgaacccaggaggtgggggttgcaccgagcagagattgcaccactgcactccagtctgggcaacagagcaagactctgtgtcaaaaaaaaaaaaaattaccgatattttacttccagcatagttttaaagataatttattggtcacatacaacaaaatagaattgtgaagtccattatagggctctgagcctgatttaaggtcacagaaaaaagaatttgagtctgtttctcagatctagaattatcaaatataaggaacttctcggcaaaacagggtgccactttcagctgacaaacttgtgggtgagaataaagaaaagtgagtctttaggtagataaagttgtcactcataatggtgtgtaacagtagaaaccttactttaccatctccacggatatgaggatatatgatcttcatggtgtgaacgtctaacttggctgagacaagctatcagtaaaagaaccaagatatagtgaagaatgaggatttcagagccaggagaaatcagtattgttttatttggaaataaatcatctatatttatatgagtaaacattggtattttcatgtaacaatactggtatgcaataagtggtgtaatatgagttgttatggactgaatgtttatgtccctcccaaaactaattatgttaaaatcctcaccatcaatgtgatgttacttggaaatgaggcatttgggaggcaattaggattagatgaggtcatgagggtggagccctcgtgatgggattagtgcctttataagaagagacatcaggctgagcccggtggctcatgcctgtaatcccagcactttgggaggccaaggcgagtggatcatgaggtcaggagattgagacaatcctggctaacacggtgaaaccccgtctccactgaaaaaaaatacaaaaaattagccaggcacagtggcatgtgcctgtagtcccagctactcgggaggctgaaggagaagaatcgcttgaacccaggaggcggaggttgcagtgagccaggatcacgccactgtactccaccctgggcgacagagcgagactacgtctcaaaaagacatcagaaagcctgcttgctctctgcaccatgtgaggatgcaggaagaagccagctgtctacagaacaggaagagaaccctacgagaacctaaccatgctggcgacctgttctcagacttccagacttcagaactgtgagaagtaaattgttgtttaagccacccagtctatgatgttttgttatggcagccccagctaatatatggagtggaaagcctagatttatctactgggttcttttcctgtcagcagttcaacatgtgtagtagctttcagtctctgctgtttgtgccaaatatataagaaataaaatcagataacttttttgtaattggatcat

SEQ ID NO: 203391 - DNA, 4390 bp, Homo sapiens
  Payload ID: 20107
  Gene Name: zinc finger protein 667
  Uniprot ID: Q5HYK9
  ENST ID: ENST00000504904
  CDS Start-End: 721-2553
gagtccctgctcggctgtctcggtggtcgccgccggggtctgagcccgggaagaccgaggttccagccgtcctcacctcaggaggacatagctttgtgcctttcaaagccctttctcatctatcatcagggactcggaagacgagccaggtttacagccctgccttgatgtgtagtgccgagttccttgaagaaaattattttatggacaatgtatgagtctgttttcgtgctgctgataaagacatacccagactcacagttctacgtggctggggaggcctcacaatcgtgatggaaggtgaaagacacgtcttacatggccacagggagaatgagagtccctgtacagaaccatcagatcacatgagacttactcactgccatgagaacagcatgggggaaaccgcccccatgattcagttatctcccaccgggtccctcccacaacacgtggaaattatgggagctataattcaagatgagatttgagtggggacacagccagaccatatcagacaagaatcatcttctcaaatttggggtgcgtggctgagtgcacacacctgtgaaaactgcgggatgaatgcattacaacttcctggaacaagtcattttacctaagtaattggaaggggaaagccaactgatctgcttatctgccctgccttaccagctctctgcccatctctcagtgtggaccctaaagggggaggaaaggatgccttctgcacgggggaaatccaaatccaaggcacctataacatttggggacttagccatctacttctcccaggaggagtgggaatggctgagccccattcagaaggatttgtatgaagatgtcatgttggagaattaccggaacctggtctcgcttggtctttcctttcggagaccaaatgtgatcaccttattggagaaagggaaagcaccctggatggtagagccagtaagaagacgccgggctcctgactcggggtctaaatgtgagaccaagaagttacctccaaatcaatgcaacaaatctgggcaaagcatctgccagaaactagtttctgcacaacaaaaagctcctacacgaaagagtggctgcaacaaaaattcagtcctagtaaaacctaagaaagggcattcagggaagaaacctttaaaatgtaatgactgtggtaaaacctttagtcgaagcttctctcttaaacttcatcagaacattcatacaggagagaagccttttgaatgcagtaattgtagaaaagctttcagacagatctcatccatcctacttcatcagagaattcacagtggaaagaaaagccatgaatgcaataaatgtggggaaagcttcaatcaaagaacaacccttattctacatatgagaattcatgatggaaaggaaattcttgactgtgggaaggccttgagtcaatgtcagtctttcaatatacatcagaaaattcatgttgttgggaatgtctgccagtgcagaaagtgcggaaaagccttcaatcagatgtcatcccttttacttcataagaaaattcacaatggaaagaaaacacataaatataataaatgtgggagaggcttcaaaaagaaatcagtctttgttgtacataaaagaattcatgctggagagaaaatccctgaaaatgcgaaggccttaagtcagagtctacagcaaagaagtcaccatttagagaatccttttaaatgcagaaaatgtgggaaattatttaataggatttcacccctgatgcttcaccagagaattcacacttcagagaaaccgtacaaatgtgataaatgtgacaagttcttcaggcggctttcaacccttattctgcatctaagaattcataatggagaaaaactatacagatgcaataaatgtgagaaggtctgcaatcggcattcatcccttattcaacatcagaaagttcatacaaagaaaaagaaactatttgagtgtaaggaatgtgggaagatgttttctggaactgcaaaccttaaaatacatcagaatattcattctgaagagaaacctttcaaatgcaataaatgtagtaaagttttcggccgccaatcatttcttattgaacatcaaagaattcatactggagaaaaaccctaccagtgtgaggaatgtggaaaagccttcagccaccgaatatctctcacacgacataagagaattcatactgaagatagaccctatgaatgtgatcagtgtgggaaggccttcagccagagtgcacacctcgcccaacatgaaagaattcacactggagagaagccatatacatgcaaaacatgtggtaaggcctttagtcagcgcacatctcttattctacatgaaagaagtcatactggagagaaaccctatgaatgtaatgaatgtgggaaggcatttagcagtggctcagaccttattcgacatcagagaagtcattcttcagagaaaccctatgaatgtagtaaatgtgggaaggcatatagtcggagttcatccctgattcgacatcagaatacacattctgaagaaaaagcctaaggttgttttaaatctataaaatcaacgaatgaggctatcaaacatatggcaaatatgtatttgtctataatgtaaattttgtgtatatgggaccatttgatgatatgtcccactttgaaagccaaagagcaaaagtcattggtgattttgacctcaggatttgaaattaactgaaggaaactcagaagtttggtcagtcattgtgaatgaagatcatttttcatttgataagaattactggctgggcgcagtggcttacacctgtaaccccagcactttgggaggctgagacaggcggatcacgaggtcaagagtttgagaccacggtgaaaccctgtctctactaaaaaatacaaaattagctgggcgtggtggtgcgcacctgtaatctcagctactggagaggctgaggcaggagaatcgcttgaacccaggaggtgggggttgcaccgagcagagattgcaccactgcactccagtctgggcaacagagcaagactctgtgtcaaaaaaaaaaaaaattaccgatattttacttccagcatagttttaaagataatttattggtcacatacaacaaaatagaattgtgaagtccattatagggctctgagcctgatttaaggtcacagaaaaaagaatttgagtctgtttctcagatctagaattatcaaatataaggaacttctcggcaaaacagggtgccactttcagctgacaaacttgtgggtgagaataaagaaaagtgagtctttaggtagataaagttgtcactcataatggtgtgtaacagtagaaaccttactttaccatctccacggatatgaggatatatgatcttcatggtgtgaacgtctaacttggctgagacaagctatcagtaaaagaaccaagatatagtgaagaatgaggatttcagagccaggagaaatcagtattgttttatttggaaataaatcatctatatttatatgagtaaacattggtattttcatgtaacaatactggtatgcaataagtggtgtaatatgagttgttatggactgaatgtttatgtccctcccaaaactaattatgttaaaatcctcaccatcaatgtgatgttacttggaaatgaggcatttgggaggcaattaggattagatgaggtcatgagggtggagccctcgtgatgggattagtgcctttataagaagagacatcaggctgagcccggtggctcatgcctgtaatcccagcactttgggaggccaaggcgagtggatcatgaggtcaggagattgagacaatcctggctaacacggtgaaaccccgtctccactgaaaaaaaatacaaaaaattagccaggcacagtggcatgtgcctgtagtcccagctactcgggaggctgaaggagaagaatcgcttgaacccaggaggcggaggttgcagtgagccaggatcacgccactgtactccaccctgggcgacagagcgagactacgtctcaaaaagacatcagaaagcctgcttgctctctgcaccatgtgaggatgcaggaagaagccagctgtctacagaacaggaagagaaccctacgagaacctaaccatgctggcgacctgttctcagacttccagacttcagaactgtgagaagtaaattgttgtttaagccacccagtctatgatgttttgttatggcagccccagctaatatatggagtggaaagcctagatttatctactgggttcttttcctgtcagcagttcaacatgtgtagtagctttcagtctctgctgtttgtgccaaatatataagaaataaaatcagataacttttttgtaattggatcat

SEQ ID NO: 203392 - DNA, 522 bp, Homo sapiens
  Payload ID: 20107
  Gene Name: zinc finger protein 667
  ENST ID: ENST00000589946
  CDS Start-End: 270-522
tgcgtgggttctcggcccgccacggcgtggggtttgcgcccttcgctgctgtggttctcggggcttgtgcgcccaagtgtgaagttggcgccgcgtgtgaggcgagccgtgtgtgcctgtgtgtgagggagctatgtcgggaccgcggatgtgtatcgctgcgtgacccacgcgaaggaaacaatggagccattgggaagccgggagtggccctgccttaccagctctctgcccatctctcagtgtggaccctaaagggggaggaaaggatgccttctgcacgggggaaatccaaatccaaggcacctataacatttggggacttagccatctacttctcccaggaggagtgggaatggctgagccccattcagaaggatttgtatgaagatgtcatgttggagaattaccggaacctggtctcgcttggtctttcctttcggagaccaaatgtgatcaccttattggagaaagggaaagcaccctggatggtagagccagtaagaagacgccgggctcctg

SEQ ID NO: 203393 - DNA, 3921 bp, Homo sapiens
  Payload ID: 20107
  Gene Name: zinc finger protein 667
  ENST ID: ENST00000592189
  CDS Start-End: 156-431
gcggtcccggggtcccggaggggagtgcgcaggcgctgagtccctgctcggctgtctcggtggtcgccgccggggtctgagcccgggaagaccgagccctgccttaccagctctctgcccatctctcagtgtggaccctaaagggggaggaaaggatgccttctgcacgggggaaatccaaatccaaggcacctataacatttggggacttagccatctacttctcccaggaggagtgggaatggctgagccccattcagaaggatttgtatgaagatgtcatgttggagaattaccggaacctggtctcgcttggtctttcctttcggagaccaaatgtgatcaccttattggagaaagggaaagcaccctggatggtagagccagtaagaagacgccgggctcctggctggactacaatgatggcatgatctcggctcactgcaacctccgcctcctgggttcaagcaattctcgtgcctcagcctcccgagcggctgggattacagactcggggtctaaatgtgagaccaagaagttacctccaaatcaatgcaacaaatctgggcaaagcatctgccagaaactagtttctgcacaacaaaaagctcctacacgaaagagtggctgcaacaaaaattcagtcctagtaaaacctaagaaagggcattcagggaagaaacctttaaaatgtaatgactgtggtaaaacctttagtcgaagcttctctcttaaacttcatcagaacattcatacaggagagaagccttttgaatgcagtaattgtagaaaagctttcagacagatctcatccatcctacttcatcagagaattcacagtggaaagaaaagccatgaatgcaataaatgtggggaaagcttcaatcaaagaacaacccttattctacatatgagaattcatgatggaaaggaaattcttgactgtgggaaggccttgagtcaatgtcagtctttcaatatacatcagaaaattcatgttgttgggaatgtctgccagtgcagaaagtgcggaaaagccttcaatcagatgtcatcccttttacttcataagaaaattcacaatggaaagaaaacacataaatataataaatgtgggagaggcttcaaaaagaaatcagtctttgttgtacataaaagaattcatgctggagagaaaatccctgaaaatgcgaaggccttaagtcagagtctacagcaaagaagtcaccatttagagaatccttttaaatgcagaaaatgtgggaaattatttaataggatttcacccctgatgcttcaccagagaattcacacttcagagaaaccgtacaaatgtgataaatgtgacaagttcttcaggcggctttcaacccttattctgcatctaagaattcataatggagaaaaactatacagatgcaataaatgtgagaaggtctgcaatcggcattcatcccttattcaacatcagaaagttcatacaaagaaaaagaaactatttgagtgtaaggaatgtgggaagatgttttctggaactgcaaaccttaaaatacatcagaatattcattctgaagagaaacctttcaaatgcaataaatgtagtaaagttttcggccgccaatcatttcttattgaacatcaaagaattcatactggagaaaaaccctaccagtgtgaggaatgtggaaaagccttcagccaccgaatatctctcacacgacataagagaattcatactgaagatagaccctatgaatgtgatcagtgtgggaaggccttcagccagagtgcacacctcgcccaacatgaaagaattcacactggagagaagccatatacatgcaaaacatgtggtaaggcctttagtcagcgcacatctcttattctacatgaaagaagtcatactggagagaaaccctatgaatgtaatgaatgtgggaaggcatttagcagtggctcagaccttattcgacatcagagaagtcattcttcagagaaaccctatgaatgtagtaaatgtgggaaggcatatagtcggagttcatccctgattcgacatcagaatacacattctgaagaaaaagcctaaggttgttttaaatctataaaatcaacgaatgaggctatcaaacatatggcaaatatgtatttgtctataatgtaaattttgtgtatatgggaccatttgatgatatgtcccactttgaaagccaaagagcaaaagtcattggtgattttgacctcaggatttgaaattaactgaaggaaactcagaagtttggtcagtcattgtgaatgaagatcatttttcatttgataagaattactggctgggcgcagtggcttacacctgtaaccccagcactttgggaggctgagacaggcggatcacgaggtcaagagtttgagaccacggtgaaaccctgtctctactaaaaaatacaaaattagctgggcgtggtggtgcgcacctgtaatctcagctactggagaggctgaggcaggagaatcgcttgaacccaggaggtgggggttgcaccgagcagagattgcaccactgcactccagtctgggcaacagagcaagactctgtgtcaaaaaaaaaaaaaattaccgatattttacttccagcatagttttaaagataatttattggtcacatacaacaaaatagaattgtgaagtccattatagggctctgagcctgatttaaggtcacagaaaaaagaatttgagtctgtttctcagatctagaattatcaaatataaggaacttctcggcaaaacagggtgccactttcagctgacaaacttgtgggtgagaataaagaaaagtgagtctttaggtagataaagttgtcactcataatggtgtgtaacagtagaaaccttactttaccatctccacggatatgaggatatatgatcttcatggtgtgaacgtctaacttggctgagacaagctatcagtaaaagaaccaagatatagtgaagaatgaggatttcagagccaggagaaatcagtattgttttatttggaaataaatcatctatatttatatgagtaaacattggtattttcatgtaacaatactggtatgcaataagtggtgtaatatgagttgttatggactgaatgtttatgtccctcccaaaactaattatgttaaaatcctcaccatcaatgtgatgttacttggaaatgaggcatttgggaggcaattaggattagatgaggtcatgagggtggagccctcgtgatgggattagtgcctttataagaagagacatcaggctgagcccggtggctcatgcctgtaatcccagcactttgggaggccaaggcgagtggatcatgaggtcaggagattgagacaatcctggctaacacggtgaaaccccgtctccactgaaaaaaaatacaaaaaattagccaggcacagtggcatgtgcctgtagtcccagctactcgggaggctgaaggagaagaatcgcttgaacccaggaggcggaggttgcagtgagccaggatcacgccactgtactccaccctgggcgacagagcgagactacgtctcaaaaagacatcagaaagcctgcttgctctctgcaccatgtgaggatgcaggaagaagccagctgtctacagaacaggaagagaaccctacgagaacctaaccatgctggcgacctgttctcagacttccagacttcagaactgtgagaagtaaattgttgtttaagccacccagtctatgatgttttgttatggcagccccagctaatatatggagtggaaagcctagatttatctactgggttcttttcctgtcagcagttcaacatgtgtagtagctttcagtctctgctgtttgtgccaaatatataagaaataaaatcagataacttttttgtaattgg

SEQ ID NO: 203394 - DNA, 567 bp, Homo sapiens
  Payload ID: 20107
  Gene Name: zinc finger protein 667
  ENST ID: ENST00000587555
  CDS Start-End: 93-567
aaaggactgtgggcctcttcgcaaaacgtgcagccctgccttaccagctctctgcccatctctcagtgtggaccctaaagggggaggaaaggatgccttctgcacgggggaaatccaaatccaaggcacctataacatttggggacttagccatctacttctcccaggaggagtgggaatggctgagccccattcagaaggatttgtatgaagatgtcatgttggagaattaccggaacctggtctcgcttggtctttcctttcggagaccaaatgtgatcaccttattggagaaagggaaagcaccctggatggtagagccagtaagaagacgccgggctcctgactcggggtctaaatgtgagaccaagaagttacctccaaatcaatgcaacaaatctgggcaaagcatctgccagaaactagtttctgcacaacaaaaagctcctacacgaaagagtggctgcaacaaaaattcagtcctagtaaaacctaagaaagggcattcagggaagaaacctttaaaatgtaatgactgtggtaaaacctttagtcgaagcttctctc

SEQ ID NO: 203395 - DNA, 5250 bp, Homo sapiens
  Payload ID: 20107
  Gene Name: zinc finger protein 667
  ENST ID: ENST00000591790
  CDS Start-End: 1430-1813
taaggttgctggattaaagagtacaacaggggtaaataacgtgtatcttcggtcttaaagacattgccaaattgccctccattgaatttacaccaatttatctcctccagcactggataagaattctaatctcagcctttttagtgggtctcagtcttcgttggtctcttggatgcttggtatgtggttgacccttgaacagtgcaggggttagtggtaccaaccccctgtactgtagaaaatccacatagagttttcactccccaaagacttaagtactaatagtctactggtcaccttactgacacctaagcaataacctacacagtctattaacacatattttgtgtgttacatgtattgcatactctattcttacaataagctagagagaagaaaatgttattaagaaaatcataaggaaaatatatttactgttcatgaagtagagtggttttcatcgtcatggccttcaagttgagtaggctgaggaggaagaggaggagctggtcttactgtctcagaggtggaagaggtggaggagccggaagggggaggccggagaggtaggcacactcagtgtaacttctattgaaaaaaatctgcatataagtggaccctcacaattcaaactaacatggctcaagggtcaactgtattgtgagttgaaaaggaaaaggaaggcaagcaatgaccatgttccagttaccgaagacatcacatgtaaatatcctaacagcagaggtgaggtaggttttctttaccccattgtatagatgagcaaacaggctttgtgtaactttttcacagccagtaattggcagaggcaagctttgaatccaggattacctaatatcaaactgctgttctttcttccccagtagtgccgagttccttgaagaaaattattttatggacaatgtatgagtctgttttcgtgctgctgataaagacatacccagactcacagttctacgtggctggggaggcctcacaatcgtgatggaaggtgaaagacacgtcttacatggccacagggagaatgagagtccctgtacagaaccatcagatcacatgagacttactcactgccatgagaacagcatgggggaaaccgcccccatgattcagttatctcccaccgggtccctcccacaacacgtggaaattatgggagctataattcaagatgagatttgagtggggacacagccagaccatatcagacaagaatcatcttctcaaatttggggtgcgtggctgagtgcacacacctgtgaaaactgcgggatgaatgcattacaacttcctggaacaagtcattttacctaagtaattggaaggggaaagccaactgatctgcttatctgccctgccttaccagctctctgcccatctctcagtgtggaccctaaagggggaggaaaggatgccttctgcacgggggaaatccaaatccaaggcacctataacatttggggacttagccatctacttctcccaggaggagtgggaatggctgagccccattcagaaggatttgtatgaagatgtcatgttggagaattaccggaacctggtctcgcttggtctttcctttcggagaccaaatgtgatcaccttattggagaaagggaaagcaccctggatggtagagccagtaagaagacgccgggctcctgagctcactgaggcctccccagaagccaaggaggtgccagcaccatgcttgtacagcctactgaaccaggagccaattgaacctcttttgtttataaattacccactcaagtatttatttatagcaatataggaacttcctaatacaaacagactcggggtctaaatgtgagaccaagaagttacctccaaatcaatgcaacaaatctgggcaaagcatctgccagaaactagtttctgcacaacaaaaagctcctacacgaaagagtggctgcaacaaaaattcagtcctagtaaaacctaagaaagggcattcagggaagaaacctttaaaatgtaatgactgtggtaaaacctttagtcgaagcttctctcttaaacttcatcagaacattcatacaggagagaagccttttgaatgcagtaattgtagaaaagctttcagacagatctcatccatcctacttcatcagagaattcacagtggaaagaaaagccatgaatgcaataaatgtggggaaagcttcaatcaaagaacaacccttattctacatatgagaattcatgatggaaaggaaattcttgactgtgggaaggccttgagtcaatgtcagtctttcaatatacatcagaaaattcatgttgttgggaatgtctgccagtgcagaaagtgcggaaaagccttcaatcagatgtcatcccttttacttcataagaaaattcacaatggaaagaaaacacataaatataataaatgtgggagaggcttcaaaaagaaatcagtctttgttgtacataaaagaattcatgctggagagaaaatccctgaaaatgcgaaggccttaagtcagagtctacagcaaagaagtcaccatttagagaatccttttaaatgcagaaaatgtgggaaattatttaataggatttcacccctgatgcttcaccagagaattcacacttcagagaaaccgtacaaatgtgataaatgtgacaagttcttcaggcggctttcaacccttattctgcatctaagaattcataatggagaaaaactatacagatgcaataaatgtgagaaggtctgcaatcggcattcatcccttattcaacatcagaaagttcatacaaagaaaaagaaactatttgagtgtaaggaatgtgggaagatgttttctggaactgcaaaccttaaaatacatcagaatattcattctgaagagaaacctttcaaatgcaataaatgtagtaaagttttcggccgccaatcatttcttattgaacatcaaagaattcatactggagaaaaaccctaccagtgtgaggaatgtggaaaagccttcagccaccgaatatctctcacacgacataagagaattcatactgaagatagaccctatgaatgtgatcagtgtgggaaggccttcagccagagtgcacacctcgcccaacatgaaagaattcacactggagagaagccatatacatgcaaaacatgtggtaaggcctttagtcagcgcacatctcttattctacatgaaagaagtcatactggagagaaaccctatgaatgtaatgaatgtgggaaggcatttagcagtggctcagaccttattcgacatcagagaagtcattcttcagagaaaccctatgaatgtagtaaatgtgggaaggcatatagtcggagttcatccctgattcgacatcagaatacacattctgaagaaaaagcctaaggttgttttaaatctataaaatcaacgaatgaggctatcaaacatatggcaaatatgtatttgtctataatgtaaattttgtgtatatgggaccatttgatgatatgtcccactttgaaagccaaagagcaaaagtcattggtgattttgacctcaggatttgaaattaactgaaggaaactcagaagtttggtcagtcattgtgaatgaagatcatttttcatttgataagaattactggctgggcgcagtggcttacacctgtaaccccagcactttgggaggctgagacaggcggatcacgaggtcaagagtttgagaccacggtgaaaccctgtctctactaaaaaatacaaaattagctgggcgtggtggtgcgcacctgtaatctcagctactggagaggctgaggcaggagaatcgcttgaacccaggaggtgggggttgcaccgagcagagattgcaccactgcactccagtctgggcaacagagcaagactctgtgtcaaaaaaaaaaaaaattaccgatattttacttccagcatagttttaaagataatttattggtcacatacaacaaaatagaattgtgaagtccattatagggctctgagcctgatttaaggtcacagaaaaaagaatttgagtctgtttctcagatctagaattatcaaatataaggaacttctcggcaaaacagggtgccactttcagctgacaaacttgtgggtgagaataaagaaaagtgagtctttaggtagataaagttgtcactcataatggtgtgtaacagtagaaaccttactttaccatctccacggatatgaggatatatgatcttcatggtgtgaacgtctaacttggctgagacaagctatcagtaaaagaaccaagatatagtgaagaatgaggatttcagagccaggagaaatcagtattgttttatttggaaataaatcatctatatttatatgagtaaacattggtattttcatgtaacaatactggtatgcaataagtggtgtaatatgagttgttatggactgaatgtttatgtccctcccaaaactaattatgttaaaatcctcaccatcaatgtgatgttacttggaaatgaggcatttgggaggcaattaggattagatgaggtcatgagggtggagccctcgtgatgggattagtgcctttataagaagagacatcaggctgagcccggtggctcatgcctgtaatcccagcactttgggaggccaaggcgagtggatcatgaggtcaggagattgagacaatcctggctaacacggtgaaaccccgtctccactgaaaaaaaatacaaaaaattagccaggcacagtggcatgtgcctgtagtcccagctactcgggaggctgaaggagaagaatcgcttgaacccaggaggcggaggttgcagtgagccaggatcacgccactgtactccaccctgggcgacagagcgagactacgtctcaaaaagacatcagaaagcctgcttgctctctgcaccatgtgaggatgcaggaagaagccagctgtctacagaacaggaagagaaccctacgagaacctaaccatgctggcgacctgttctcagacttccagacttcagaactgtgagaagtaaattgttgtttaagccacccagtctatgatgttttgttatggcagccccagctaatatatggagtggaaagcctagatttatctactgggttcttttcctgtcagcagttcaacatgtgtagtagctttcagtctctgctgtttgtgccaaatatataagaaataaaatcagataacttttttgtaattggatcat

SEQ ID NO: 203396 - DNA, 3265 bp, Homo sapiens
  Payload ID: 20107
  Gene Name: zinc finger protein 667
  ENST ID: ENST00000629654
  CDS Start-End: 408-1586
tttcagactcggggtctaaatgtgagaccaagaagttacctccaaatcaatgcaacaaatctgggcaaagcatctgccagaaactagtttctgcacaacaaaaagctcctacacgaaagagtggctgcaacaaaaattcagtcctagtaaaacctaagaaagggcattcagggaagaaacctttaaaatgtaatgactgtggtaaaacctttagtcgaagcttctctcttaaacttcatcagaacattcatacaggagagaagccttttgaatgcagtaattgtagaaaagctttcagacagatctcatccatcctacttcatcagagaattcacagtggaaagaaaagccatgaatgcaataaatgtggggaaagcttcaatcaaagaacaacccttattctacatatgagaattcatgatggaaaggaaattcttgactgtgggaaggccttgagtcaatgtcagtctttcaatatacatcagaaaattcatgttgttgggaatgtctgccagtgcagaaagtgcggaaaagccttcaatcagatgtcatcccttttacttcataagaaaattcacaatggaaagaaaacacataaatataataaatgtgggagaggcttcaaaaagaaatcagtctttgttgtacataaaagaattcatgctggagagaaaatccctgaaaatgcgaaggccttaagtcagagtctacagcaaagaagtcaccatttagagaatccttttaaatgcagaaaatgtgggaaattatttaataggatttcacccctgatgcttcaccagagaattcacacttcagagaaaccgtacaaatgtgataaatgtgacaagttcttcaggcggctttcaacccttattctgcatctaagaattcataatggagaaaaactatacagatgcaataaatgtgagaaggtctgcaatcggcattcatcccttattcaacatcagaaagttcatacaaagaaaaagaaactatttgagtgtaaggaatgtgggaagatgttttctggaactgcaaaccttaaaatacatcagaatattcattctgaagagaaacctttcaaatgcaataaatgtagtaaagttttcggccgccaatcatttcttattgaacatcaaagaattcatactggagaaaaaccctaccagtgtgaggaatgtggaaaagccttcagccaccgaatatctctcacacgacataagagaattcatactgaagatagaccctatgaatgtgatcagtgtgggaaggccttcagccagagtgcacacctcgcccaacatgaaagaattcacactggagagaagccatatacatgcaaaacatgtggtaaggcctttagtcagcgcacatctcttattctacatgaaagaagtcatactggagagaaaccctatgaatgtaatgaatgtgggaaggcatttagcagtggctcagaccttattcgacatcagagaagtcattcttcagagaaaccctatgaatgtagtaaatgtgggaaggcatatagtcggagttcatccctgattcgacatcagaatacacattctgaagaaaaagcctaaggttgttttaaatctataaaatcaacgaatgaggctatcaaacatatggcaaatatgtatttgtctataatgtaaattttgtgtatatgggaccatttgatgatatgtcccactttgaaagccaaagagcaaaagtcattggtgattttgacctcaggatttgaaattaactgaaggaaactcagaagtttggtcagtcattgtgaatgaagatcatttttcatttgataagaattactggctgggcgcagtggcttacacctgtaaccccagcactttgggaggctgagacaggcggatcacgaggtcaagagtttgagaccacggtgaaaccctgtctctactaaaaaatacaaaaaaaaaaaaaattaccgatattttacttccagcatagttttaaagataatttattggtcacatacaacaaaatagaattgtgaagtccattatagggctctgagcctgatttaaggtcacagaaaaaagaatttgagtctgtttctcagatctagaattatcaaatataaggaacttctcggcaaaacagggtgccactttcagctgacaaacttgtgggtgagaataaagaaaagtgagtctttaggtagataaagttgtcactcataatggtgtgtaacagtagaaaccttactttaccatctccacggatatgaggatatatgatcttcatggtgtgaacgtctaacttggctgagacaagctatcagtaaaagaaccaagatatagtgaagaatgaggatttcagagccaggagaaatcagtattgttttatttggaaataaatcatctatatttatatgagtaaacattggtattttcatgtaacaatactggtatgcaataagtggtgtaatatgagttgttatggactgaatgtttatgtccctcccaaaactaattatgttaaaatcctcaccatcaatgtgatgttacttggaaatgaggcatttgggaggcaattaggattagatgaggtcatgagggtggagccctcgtgatgggattagtgcctttataagaagagacatcaggctgagcccggtggctcatgcctgtaatcccagcactttgggaggccaaggcgagtggatcatgaggtcaggagattgagacaatcctggctaacacggtgaaaccccgtctccactgaaaaaaaatacaaaaaattagccaggcacagtggcatgtgcctgtagtcccagctactcgggaggctgaaggagaagaatcgcttgaacccaggaggcggaggttgcagtgagccaggatcacgccactgtactccaccctgggcgacagagcgagactacgtctcaaaaagacatcagaaagcctgcttgctctctgcaccatgtgaggatgcaggaagaagccagctgtctacagaacaggaagagaaccctacgagaacctaaccatgctggcgacctgttctcagacttccagacttcagaactgtgagaagtaaattgttgtttaagccacccagtctatgatgttttgttatggcagccccagctaatatatggagtggaaagcctagatttatctactgggttcttttcctgtcagcagttcaacatgtgtagtagctttcagtctctgctgtttgtgccaaatatataagaaataaaatcagataacttttttgtaattgg

SEQ ID NO: 203397 - DNA, 2762 bp, Homo sapiens
  Payload ID: 20108
  Gene Name: zinc finger protein 668
  Uniprot ID: Q96K58
  ENST ID: ENST00000300849
  CDS Start-End: 685-2544
acttccggcgctaagttctaggtctgcacggctgactccgcccacgtaggtcacaacgcggcgtctttgcacgctaagctagccacacttccggcaagagcagctagaatcgttccggtgcatattgaataggcgcagaaagggagaaaaagattctacagccctggccacagtactttggtgacacttttcgtggggctctctggaggacttttcccaaggcagatggagaaaacttcgtgaaacccactccttgctattaaaggaaatgttgtggaatataattggacttaggttttgcagagcttgagcatggcctttttgtcctcccaccttctggttcttgaagacattgccggtgacctggccccagactaacacaaggcgggcgtataccgtcagcctgcctggcgtccccttgcctcagcacacacagagacctcttgcaagatgcttctctgccgccataggctggaggttccccgggaactttcccttccttcctagctgaggaagatccctcacttccgctcgccgcgccaccggtcccacctccccgccccccgctgggtcctagcgccggcccctgtttggcagggtccgggctccgtcggtgcgaggagccgacgccgacgccacggagtcagcacaagtctcatcagagaaaccccgttcaccaaggccatggaagtggaggctgcagaggcccggtccccagcccccggctacaagcgctcgggccgccgctacaagtgcctgtcctgtaccaagacatttccaaacgcgcccagggcagcgcgccacgctgccacacatgggccggcagactgctctgaagaggtggccgaggtgaagccaaagccagagacagaagctaaggcagaggaagccagtggggagaaggtgtcaggctccgcggccaagcctaggccctatgcgtgtccgctatgccccaaggcctacaagacggcacccgagctgcgcagccacgggcgcagccacacgggggagaagccctttccgtgccccgagtgcggccgccgcttcatgcagcccgtgtgcctgcgcgtgcacctggcctcgcacgctggcgaactgcccttccgctgtgcgcactgcccgaaggcctatggcgcgctctccaagctcaagatccaccagcgtggccacacaggcgagcggccttacgcctgcgccgactgcggcaagagctttgctgacccttcagtgttccgcaagcaccggcgtactcacgctggcctgcggccctacagctgtgagcgttgcggcaaagcctatgcggagctcaaggacctccgcaaccatgagcggtcccacaccggcgagcgccccttcctctgctccgagtgcgggaagagcttctcccgctcatcctcgctcacgtgccaccagcgcatccacgcggcacagaagccctaccgctgcccggcctgcggcaagggcttcacgcagctcagttcctaccagagccacgagcgcacgcactcgggggagaagcccttcctgtgcccgcgctgcggccgcatgttctccgacccctcgagcttccgtcgccaccagcgcgcccatgaaggggtgaagccataccactgcgagaagtgcggcaaggacttccggcagccggcggacctggccatgcaccggcgtgtgcacacaggcgaccggccgttcaagtgcctgcaatgtgacaagacgttcgtggcgtcctgggacctcaagcggcacgcgctggtgcactctggccagcggcccttccgctgtgaggagtgcgggcgagccttcgccgagcgtgccagcctcacgaagcatagccgggtgcactcgggggagcgccccttccactgtaacgcatgtgggaaatcctttgtggtgtcgtcgagcctgaggaagcacgagcggacccatcgaagcagtgaggccgcgggtgtgccccctgcacaggagctggtggtggggttggcgctgcctgtgggcgtggcaggtgagagttcagccgccccggcagcaggggcggggctgggggaccctccagcagggctgctagggctgcccccggagtcaggtggtgtgatggccacacagtggcaggtggtgggcatgacggtggagcatgtggaatgccaagatgctggtgtccgggaggctcctggtcccttggaaggggcaggcgaggcggggggtgaggaggctgacgagaagcccccccagtttgtgtgccgagagtgcaaggagaccttctccacaatgacgctgctgcgtcggcacgagcgctcacacccggagctccggcccttcccctgcacccagtgcggcaagagcttctctgaccgggctgggctgcgcaaacacagccgcactcacagctcagtgcgcccctacacctgcccccattgtcccaaggccttcttgagtgccagcgacttgcgcaagcatgaacgcacccaccctgtgcccatggggacccccacacccctggagcccctggtggctttgctaggaatgcctgaagaggggccggcctgaagcccatgaccccccagcaccacactccgggagcccagcccccatcgggggcttcctgtacctccttttgcctggctctgctctttagactccagatccctacccctcagcaactagctcccctgtcggccagctaagagagctgggacagtggaggctggcagaagctgagacgtgactgtctaggagtaacactcattaaagctttcattttggca

SEQ ID NO: 203398 - DNA, 2717 bp, Homo sapiens
  Payload ID: 20108
  Gene Name: zinc finger protein 668
  Uniprot ID: Q96K58
  ENST ID: ENST00000394983
  CDS Start-End: 640-2499
attgcgggcccagcaggtcctagaacccgccggctgtctccgcggttctgggctgcggacacccaggctcggcccgcgcggctgctggcccggcgcggtgtggtcccgggggtcctagagcccgccatgttttgggtttttgtcccggtcgcgtggcccgcgctgcaagatcccaggcgccggcggccccctcccctgctgaggcccggccaccactcccgcggtcctagagaacgccatcttgcaagcctttgtccctcattcggccttccgtccattcatttgttcatctcctcatccttcgttcagtcctccttgccacgtcctccgaagccacgttttctgaggcttataaccggggtcctgccctccaggggctgcctggctggcgggggcgccgcgtacagacggttgcgaggagcgaggagctccgggtttctgcaactctcggctcctcggcgcgcttcgtaggccccaccgcccttcaaactcccacaaacttaagggaccccattttactgatgaggaaactgaggtccagagcggcgtggggcccttacctctctactgccataaagtattcctgagggcactagggaagggggttcttgaaggatagaaaccccgttcaccaaggccatggaagtggaggctgcagaggcccggtccccagcccccggctacaagcgctcgggccgccgctacaagtgcctgtcctgtaccaagacatttccaaacgcgcccagggcagcgcgccacgctgccacacatgggccggcagactgctctgaagaggtggccgaggtgaagccaaagccagagacagaagctaaggcagaggaagccagtggggagaaggtgtcaggctccgcggccaagcctaggccctatgcgtgtccgctatgccccaaggcctacaagacggcacccgagctgcgcagccacgggcgcagccacacgggggagaagccctttccgtgccccgagtgcggccgccgcttcatgcagcccgtgtgcctgcgcgtgcacctggcctcgcacgctggcgaactgcccttccgctgtgcgcactgcccgaaggcctatggcgcgctctccaagctcaagatccaccagcgtggccacacaggcgagcggccttacgcctgcgccgactgcggcaagagctttgctgacccttcagtgttccgcaagcaccggcgtactcacgctggcctgcggccctacagctgtgagcgttgcggcaaagcctatgcggagctcaaggacctccgcaaccatgagcggtcccacaccggcgagcgccccttcctctgctccgagtgcgggaagagcttctcccgctcatcctcgctcacgtgccaccagcgcatccacgcggcacagaagccctaccgctgcccggcctgcggcaagggcttcacgcagctcagttcctaccagagccacgagcgcacgcactcgggggagaagcccttcctgtgcccgcgctgcggccgcatgttctccgacccctcgagcttccgtcgccaccagcgcgcccatgaaggggtgaagccataccactgcgagaagtgcggcaaggacttccggcagccggcggacctggccatgcaccggcgtgtgcacacaggcgaccggccgttcaagtgcctgcaatgtgacaagacgttcgtggcgtcctgggacctcaagcggcacgcgctggtgcactctggccagcggcccttccgctgtgaggagtgcgggcgagccttcgccgagcgtgccagcctcacgaagcatagccgggtgcactcgggggagcgccccttccactgtaacgcatgtgggaaatcctttgtggtgtcgtcgagcctgaggaagcacgagcggacccatcgaagcagtgaggccgcgggtgtgccccctgcacaggagctggtggtggggttggcgctgcctgtgggcgtggcaggtgagagttcagccgccccggcagcaggggcggggctgggggaccctccagcagggctgctagggctgcccccggagtcaggtggtgtgatggccacacagtggcaggtggtgggcatgacggtggagcatgtggaatgccaagatgctggtgtccgggaggctcctggtcccttggaaggggcaggcgaggcggggggtgaggaggctgacgagaagcccccccagtttgtgtgccgagagtgcaaggagaccttctccacaatgacgctgctgcgtcggcacgagcgctcacacccggagctccggcccttcccctgcacccagtgcggcaagagcttctctgaccgggctgggctgcgcaaacacagccgcactcacagctcagtgcgcccctacacctgcccccattgtcccaaggccttcttgagtgccagcgacttgcgcaagcatgaacgcacccaccctgtgcccatggggacccccacacccctggagcccctggtggctttgctaggaatgcctgaagaggggccggcctgaagcccatgaccccccagcaccacactccgggagcccagcccccatcgggggcttcctgtacctccttttgcctggctctgctctttagactccagatccctacccctcagcaactagctcccctgtcggccagctaagagagctgggacagtggaggctggcagaagctgagacgtgactgtctaggagtaacactcattaaagctttcattttggca

SEQ ID NO: 203399 - DNA, 386 bp, Homo sapiens
  Payload ID: 20108
  Gene Name: zinc finger protein 668
  ENST ID: ENST00000417935
  CDS Start-End: 111-386
catctagaggtggaggattgagaattgtggctggaggttcggtcgctgccgggaggaggactctgtcgctggagctgaggctggaaaaagaaaccccgttcaccaaggccatggaagtggaggctgcagaggcccggtccccagcccccggctacaagcgctcgggccgccgctacaagtgcctgtcctgtaccaagacatttccaaacgcgcccagggcagcgcgccacgctgccacacatgggccggcagactgctctgaagaggtggccgaggtgaagccaaagccagagacagaagctaaggcagaggaagccagtggggagaaggtgtcaggctccgcggccaagcctaggccctatgcgtgtccgctatgccccaaggcc

SEQ ID NO: 203400 - DNA, 2282 bp, Homo sapiens
  Payload ID: 20108
  Gene Name: zinc finger protein 668
  Uniprot ID: Q96K58
  ENST ID: ENST00000426488
  CDS Start-End: 134-2062
ctgtcacttccagacagtgccagctaccagatttagcccattggctcagcccttttctggtcccagtggctctgcggacacttggtccaactcctttcttcaatgagcagatcagggaggaaacgaacgcaggatgtcagagccaggaatgctgggcaggaaggatgtgtgggttccgagagaaaccccgttcaccaaggccatggaagtggaggctgcagaggcccggtccccagcccccggctacaagcgctcgggccgccgctacaagtgcctgtcctgtaccaagacatttccaaacgcgcccagggcagcgcgccacgctgccacacatgggccggcagactgctctgaagaggtggccgaggtgaagccaaagccagagacagaagctaaggcagaggaagccagtggggagaaggtgtcaggctccgcggccaagcctaggccctatgcgtgtccgctatgccccaaggcctacaagacggcacccgagctgcgcagccacgggcgcagccacacgggggagaagccctttccgtgccccgagtgcggccgccgcttcatgcagcccgtgtgcctgcgcgtgcacctggcctcgcacgctggcgaactgcccttccgctgtgcgcactgcccgaaggcctatggcgcgctctccaagctcaagatccaccagcgtggccacacaggcgagcggccttacgcctgcgccgactgcggcaagagctttgctgacccttcagtgttccgcaagcaccggcgtactcacgctggcctgcggccctacagctgtgagcgttgcggcaaagcctatgcggagctcaaggacctccgcaaccatgagcggtcccacaccggcgagcgccccttcctctgctccgagtgcgggaagagcttctcccgctcatcctcgctcacgtgccaccagcgcatccacgcggcacagaagccctaccgctgcccggcctgcggcaagggcttcacgcagctcagttcctaccagagccacgagcgcacgcactcgggggagaagcccttcctgtgcccgcgctgcggccgcatgttctccgacccctcgagcttccgtcgccaccagcgcgcccatgaaggggtgaagccataccactgcgagaagtgcggcaaggacttccggcagccggcggacctggccatgcaccggcgtgtgcacacaggcgaccggccgttcaagtgcctgcaatgtgacaagacgttcgtggcgtcctgggacctcaagcggcacgcgctggtgcactctggccagcggcccttccgctgtgaggagtgcgggcgagccttcgccgagcgtgccagcctcacgaagcatagccgggtgcactcgggggagcgccccttccactgtaacgcatgtgggaaatcctttgtggtgtcgtcgagcctgaggaagcacgagcggacccatcgaagcagtgaggccgcgggtgtgccccctgcacaggagctggtggtggggttggcgctgcctgtgggcgtggcaggtgagagttcagccgccccggcagcaggggcggggctgggggaccctccagcagggctgctagggctgcccccggagtcaggtggtgtgatggccacacagtggcaggtggtgggcatgacggtggagcatgtggaatgccaagatgctggtgtccgggaggctcctggtcccttggaaggggcaggcgaggcggggggtgaggaggctgacgagaagcccccccagtttgtgtgccgagagtgcaaggagaccttctccacaatgacgctgctgcgtcggcacgagcgctcacacccggagctccggcccttcccctgcacccagtgcggcaagagcttctctgaccgggctgggctgcgcaaacacagccgcactcacagctcagtgcgcccctacacctgcccccattgtcccaaggccttcttgagtgccagcgacttgcgcaagcatgaacgcacccaccctgtgcccatggggacccccacacccctggagcccctggtggctttgctaggaatgcctgaagaggggccggcctgaagcccatgaccccccagcaccacactccgggagcccagcccccatcgggggcttcctgtacctccttttgcctggctctgctctttagactccagatccctacccctcagcaactagctcccctgtcggccagctaagagagctgggacagtggaggctggcagaagctgagacgtgactgtctaggagtaacactcattaaagctttcattttggcacc

SEQ ID NO: 203401 - DNA, 400 bp, Homo sapiens
  Payload ID: 20108
  Gene Name: zinc finger protein 668
  ENST ID: ENST00000414399
  CDS Start-End: 77-400
cgtcggtgcgaggagccgacgccgacgccacggagtcagcacaagtctcatcagagaaaccccgttcaccaaggccatggaagtggaggctgcagaggcccggtccccagcccccggctacaagcgctcgggccgccgctacaagtgcctgtcctgtaccaagacatttccaaacgcgcccagggcagcgcgccacgctgccacacatgggccggcagactgctctgaagaggtggccgaggtcccacaccggcgagcgccccttcctctgctccgagtgcgggaagagcttctcccgctcatcctcgctcacgtgccaccagcgcatccacgcggcacagaagccctaccgctgcccggcctgcggcaagggcttcacgcagctcagttcctaccagag

SEQ ID NO: 203402 - DNA, 802 bp, Homo sapiens
  Payload ID: 20108
  Gene Name: zinc finger protein 668
  ENST ID: ENST00000442862
  CDS Start-End: 312-802
agattccagtctggggcggaggcccgtacagctgtgcaaggccagaattctgtgtgaacagttgctgtctctgaggactaaccatccagaggaggaaagaaaacacaaatgctggggacctgtcacttccagacagtgccagctaccagatttagcccattggctcagcccttttctggtcccaggtctgtcttttctgggcgcttggagaccttcaggccaggcccacgtctgggtacactctttatcctggcatagttcttggacactgagctgaagaaggaagatgagaaaccccgttcaccaaggccatggaagtggaggctgcagaggcccggtccccagcccccggctacaagcgctcgggccgccgctacaagtgcctgtcctgtaccaagacatttccaaacgcgcccagggcagcgcgccacgctgccacacatgggccggcagactgctctgaagaggtggccgaggtgaagccaaagccagagacagaagctaaggcagaggaagccagtggggagaaggtgtcaggctccgcggccaagcctaggccctatgcgtgtccgctatgccccaaggcctacaagacggcacccgagctgcgcagccacgggcgcagccacacgggggagaagccctttccgtgccccgagtgcggccgccgcttcatgcagcccgtgtgcctgcgcgtgcacctggcctcgcacgctggcgaactgcccttccgctgtgcgcactgcccgaaggcctatggcgcgctctccaagctcaagatccaccagcgtggccacacagg

SEQ ID NO: 203403 - DNA, 2865 bp, Homo sapiens
  Payload ID: 20108
  Gene Name: zinc finger protein 668
  Uniprot ID: Q96K58
  ENST ID: ENST00000538906
  CDS Start-End: 786-2645
attgcgggcccagcaggtcctagaacccgccggctgtctccgcggttctgggctgcggacacccaggctcggcccgcgcggctgctggcccggcgcggtgtggtcccgggggtcctagagcccgccatgttttgggtttttgtcccggtcgcgtggcccgcgctgcaagatcccaggcgccggcggccccctcccctgctgaggcccggccaccactcccgcggtcctagagaacgccatcttgcaagcctttgtccctcattcggccttccgtccattcatttgttcatctcctcatccttcgttcagtcctccttgccacgtcctccgaagccacgttttctgaggcttataaccggggtcctgccctccaggggctgcctggctggcgggggcgccgcgtacagacggttgcgaggagcgaggagctccgggtttctgcaactctcggctcctcggcgcgcttcgtaggccccaccgcccttcaaactcccacaaacttaagggaccccattttactgatgaggaaactgaggtccagagcggcgtggggcccttacctctctactgccataaagtattcctgagggcactagggaagggggttcttgaaggatgtaaaggggctttcccgttggagaaggcaggcaagggctccccgagcccaggaaactgcatctagaggtggaggattgagaattgtggctggaggttcggtcgctgccgggaggaggactctgtcgctggagctgaggctggaaaaagaaaccccgttcaccaaggccatggaagtggaggctgcagaggcccggtccccagcccccggctacaagcgctcgggccgccgctacaagtgcctgtcctgtaccaagacatttccaaacgcgcccagggcagcgcgccacgctgccacacatgggccggcagactgctctgaagaggtggccgaggtgaagccaaagccagagacagaagctaaggcagaggaagccagtggggagaaggtgtcaggctccgcggccaagcctaggccctatgcgtgtccgctatgccccaaggcctacaagacggcacccgagctgcgcagccacgggcgcagccacacgggggagaagccctttccgtgccccgagtgcggccgccgcttcatgcagcccgtgtgcctgcgcgtgcacctggcctcgcacgctggcgaactgcccttccgctgtgcgcactgcccgaaggcctatggcgcgctctccaagctcaagatccaccagcgtggccacacaggcgagcggccttacgcctgcgccgactgcggcaagagctttgctgacccttcagtgttccgcaagcaccggcgtactcacgctggcctgcggccctacagctgtgagcgttgcggcaaagcctatgcggagctcaaggacctccgcaaccatgagcggtcccacaccggcgagcgccccttcctctgctccgagtgcgggaagagcttctcccgctcatcctcgctcacgtgccaccagcgcatccacgcggcacagaagccctaccgctgcccggcctgcggcaagggcttcacgcagctcagttcctaccagagccacgagcgcacgcactcgggggagaagcccttcctgtgcccgcgctgcggccgcatgttctccgacccctcgagcttccgtcgccaccagcgcgcccatgaaggggtgaagccataccactgcgagaagtgcggcaaggacttccggcagccggcggacctggccatgcaccggcgtgtgcacacaggcgaccggccgttcaagtgcctgcaatgtgacaagacgttcgtggcgtcctgggacctcaagcggcacgcgctggtgcactctggccagcggcccttccgctgtgaggagtgcgggcgagccttcgccgagcgtgccagcctcacgaagcatagccgggtgcactcgggggagcgccccttccactgtaacgcatgtgggaaatcctttgtggtgtcgtcgagcctgaggaagcacgagcggacccatcgaagcagtgaggccgcgggtgtgccccctgcacaggagctggtggtggggttggcgctgcctgtgggcgtggcaggtgagagttcagccgccccggcagcaggggcggggctgggggaccctccagcagggctgctagggctgcccccggagtcaggtggtgtgatggccacacagtggcaggtggtgggcatgacggtggagcatgtggaatgccaagatgctggtgtccgggaggctcctggtcccttggaaggggcaggcgaggcggggggtgaggaggctgacgagaagcccccccagtttgtgtgccgagagtgcaaggagaccttctccacaatgacgctgctgcgtcggcacgagcgctcacacccggagctccggcccttcccctgcacccagtgcggcaagagcttctctgaccgggctgggctgcgcaaacacagccgcactcacagctcagtgcgcccctacacctgcccccattgtcccaaggccttcttgagtgccagcgacttgcgcaagcatgaacgcacccaccctgtgcccatggggacccccacacccctggagcccctggtggctttgctaggaatgcctgaagaggggccggcctgaagcccatgaccccccagcaccacactccgggagcccagcccccatcgggggcttcctgtacctccttttgcctggctctgctctttagactccagatccctacccctcagcaactagctcccctgtcggccagctaagagagctgggacagtggaggctggcagaagctgagacgtgactgtctaggagtaacactcattaaagctttcattttggcacc

SEQ ID NO: 203404 - DNA, 2396 bp, Homo sapiens
  Payload ID: 20108
  Gene Name: zinc finger protein 668
  Uniprot ID: Q96K58
  ENST ID: ENST00000535577
  CDS Start-End: 312-2171
agattccagtctggggcggaggcccgtacagctgtgcaaggccagaattctgtgtgaacagttgctgtctctgaggactaaccatccagaggaggaaagaaaacacaaatgctggggacctgtcacttccagacagtgccagctaccagatttagcccattggctcagcccttttctggtcccaggtctgtcttttctgggcgcttggagaccttcaggccaggcccacgtctgggtacactctttatcctggcatagttcttggacactgagctgaagaaggaagatgagaaaccccgttcaccaaggccatggaagtggaggctgcagaggcccggtccccagcccccggctacaagcgctcgggccgccgctacaagtgcctgtcctgtaccaagacatttccaaacgcgcccagggcagcgcgccacgctgccacacatgggccggcagactgctctgaagaggtggccgaggtgaagccaaagccagagacagaagctaaggcagaggaagccagtggggagaaggtgtcaggctccgcggccaagcctaggccctatgcgtgtccgctatgccccaaggcctacaagacggcacccgagctgcgcagccacgggcgcagccacacgggggagaagccctttccgtgccccgagtgcggccgccgcttcatgcagcccgtgtgcctgcgcgtgcacctggcctcgcacgctggcgaactgcccttccgctgtgcgcactgcccgaaggcctatggcgcgctctccaagctcaagatccaccagcgtggccacacaggcgagcggccttacgcctgcgccgactgcggcaagagctttgctgacccttcagtgttccgcaagcaccggcgtactcacgctggcctgcggccctacagctgtgagcgttgcggcaaagcctatgcggagctcaaggacctccgcaaccatgagcggtcccacaccggcgagcgccccttcctctgctccgagtgcgggaagagcttctcccgctcatcctcgctcacgtgccaccagcgcatccacgcggcacagaagccctaccgctgcccggcctgcggcaagggcttcacgcagctcagttcctaccagagccacgagcgcacgcactcgggggagaagcccttcctgtgcccgcgctgcggccgcatgttctccgacccctcgagcttccgtcgccaccagcgcgcccatgaaggggtgaagccataccactgcgagaagtgcggcaaggacttccggcagccggcggacctggccatgcaccggcgtgtgcacacaggcgaccggccgttcaagtgcctgcaatgtgacaagacgttcgtggcgtcctgggacctcaagcggcacgcgctggtgcactctggccagcggcccttccgctgtgaggagtgcgggcgagccttcgccgagcgtgccagcctcacgaagcatagccgggtgcactcgggggagcgccccttccactgtaacgcatgtgggaaatcctttgtggtgtcgtcgagcctgaggaagcacgagcggacccatcgaagcagtgaggccgcgggtgtgccccctgcacaggagctggtggtggggttggcgctgcctgtgggcgtggcaggtgagagttcagccgccccggcagcaggggcggggctgggggaccctccagcagggctgctagggctgcccccggagtcaggtggtgtgatggccacacagtggcaggtggtgggcatgacggtggagcatgtggaatgccaagatgctggtgtccgggaggctcctggtcccttggaaggggcaggcgaggcggggggtgaggaggctgacgagaagcccccccagtttgtgtgccgagagtgcaaggagaccttctccacaatgacgctgctgcgtcggcacgagcgctcacacccggagctccggcccttcccctgcacccagtgcggcaagagcttctctgaccgggctgggctgcgcaaacacagccgcactcacagctcagtgcgcccctacacctgcccccattgtcccaaggccttcttgagtgccagcgacttgcgcaagcatgaacgcacccaccctgtgcccatggggacccccacacccctggagcccctggtggctttgctaggaatgcctgaagaggggccggcctgaagcccatgaccccccagcaccacactccgggagcccagcccccatcgggggcttcctgtacctccttttgcctggctctgctctttagactccagatccctacccctcagcaactagctcccctgtcggccagctaagagagctgggacagtggaggctggcagaagctgagacgtgactgtctaggagtaacactcattaaagctttcattttggcaccaggtc

SEQ ID NO: 203405 - DNA, 2469 bp, Homo sapiens
  Payload ID: 20108
  Gene Name: zinc finger protein 668
  Uniprot ID: Q96K58
  ENST ID: ENST00000539836
  CDS Start-End: 324-2252
gtgcaaggccagaattctgtgtgaacagttgctgtctctgaggactaaccatccagaggaggaaagaaaacacaaatgctggggacctgtcacttccagacagtgccagctaccagatttagcccattggctcagcccttttctggtcccaggtctgtcttttctgggcgcttggagaccttcaggccaggcccacgtctgggtacactctttatcctggcatagttcttggacactgagctgaagaaggaagatgtggctctgcggacacttggtccaactcctttcttcaatgagcagatcagggaggaaacgaacgcaggatgtcagagccaggaatgctgggcaggaaggatgtgtgggttccgagagaaaccccgttcaccaaggccatggaagtggaggctgcagaggcccggtccccagcccccggctacaagcgctcgggccgccgctacaagtgcctgtcctgtaccaagacatttccaaacgcgcccagggcagcgcgccacgctgccacacatgggccggcagactgctctgaagaggtggccgaggtgaagccaaagccagagacagaagctaaggcagaggaagccagtggggagaaggtgtcaggctccgcggccaagcctaggccctatgcgtgtccgctatgccccaaggcctacaagacggcacccgagctgcgcagccacgggcgcagccacacgggggagaagccctttccgtgccccgagtgcggccgccgcttcatgcagcccgtgtgcctgcgcgtgcacctggcctcgcacgctggcgaactgcccttccgctgtgcgcactgcccgaaggcctatggcgcgctctccaagctcaagatccaccagcgtggccacacaggcgagcggccttacgcctgcgccgactgcggcaagagctttgctgacccttcagtgttccgcaagcaccggcgtactcacgctggcctgcggccctacagctgtgagcgttgcggcaaagcctatgcggagctcaaggacctccgcaaccatgagcggtcccacaccggcgagcgccccttcctctgctccgagtgcgggaagagcttctcccgctcatcctcgctcacgtgccaccagcgcatccacgcggcacagaagccctaccgctgcccggcctgcggcaagggcttcacgcagctcagttcctaccagagccacgagcgcacgcactcgggggagaagcccttcctgtgcccgcgctgcggccgcatgttctccgacccctcgagcttccgtcgccaccagcgcgcccatgaaggggtgaagccataccactgcgagaagtgcggcaaggacttccggcagccggcggacctggccatgcaccggcgtgtgcacacaggcgaccggccgttcaagtgcctgcaatgtgacaagacgttcgtggcgtcctgggacctcaagcggcacgcgctggtgcactctggccagcggcccttccgctgtgaggagtgcgggcgagccttcgccgagcgtgccagcctcacgaagcatagccgggtgcactcgggggagcgccccttccactgtaacgcatgtgggaaatcctttgtggtgtcgtcgagcctgaggaagcacgagcggacccatcgaagcagtgaggccgcgggtgtgccccctgcacaggagctggtggtggggttggcgctgcctgtgggcgtggcaggtgagagttcagccgccccggcagcaggggcggggctgggggaccctccagcagggctgctagggctgcccccggagtcaggtggtgtgatggccacacagtggcaggtggtgggcatgacggtggagcatgtggaatgccaagatgctggtgtccgggaggctcctggtcccttggaaggggcaggcgaggcggggggtgaggaggctgacgagaagcccccccagtttgtgtgccgagagtgcaaggagaccttctccacaatgacgctgctgcgtcggcacgagcgctcacacccggagctccggcccttcccctgcacccagtgcggcaagagcttctctgaccgggctgggctgcgcaaacacagccgcactcacagctcagtgcgcccctacacctgcccccattgtcccaaggccttcttgagtgccagcgacttgcgcaagcatgaacgcacccaccctgtgcccatggggacccccacacccctggagcccctggtggctttgctaggaatgcctgaagaggggccggcctgaagcccatgaccccccagcaccacactccgggagcccagcccccatcgggggcttcctgtacctccttttgcctggctctgctctttagactccagatccctacccctcagcaactagctcccctgtcggccagctaagagagctgggacagtggaggctggcagaagctgagacgtgactgtctaggagtaacactcattaaagctttcattttggc

SEQ ID NO: 203406 - DNA, 1951 bp, Homo sapiens
  Payload ID: 20109
  Gene Name: zinc finger protein 669
  Uniprot ID: Q96BR6
  ENST ID: ENST00000343381
  CDS Start-End: 174-1568
gcctggcggttgctttgtctctccttcgccggagccggctcttcctgttagtctccgctgctagttcttggctctgggaggcccaggtggctctgcagcagcctctgccaccctgtgacctgcgagtattgggacatccctagctgacgccaggacacccgggaagccgaggaatggtgagtggactgcgcctggcttcccgaagtggagaagagggctggttgaaacctgctgtggcgcgactcgggcctccacgccatcggctccggaacctgcggaccgagtcgccgtggcgtagccggggctcagtcctcttctgttcagggccgggccgggcggggcgggcagcggaacccctgcatcctgtctgtacctgcgggcgccacttccgccggccggagccctgtcgggaacccctcgcctcccctatccaggactcggtggcttttgaggatgtggctgtgaactttacccaggaggaatgggctttgctagattcttctcagaagaatctctacagagaagtgatgcaggaaacctgcaggaacctggcttctgtaggaagccaatggaaagaccagaatattgaagatcacttcgaaaaacctgggaaagatataagaaatcatatcgtacagagactgtgtgaaagtaaagaagatggtcagtatggagaagttgtcagccaaattccaaatcttgatctgaacgagaacatttctactggattaaaaccatgtgaatgcagtatttgtggaaaagtctttgtacgtcattccctccttaataggcatatcctagctcactcaggatacaaaccatatggagagaagcaatataaatgtgaacagtgtgggaaattcttcgtttctgttccaggtgttagaagacacatgataatgcacagtggaaatccagcttataaatgtacgatatgtgggaaagctttttattttctcaattcagttgaaagacatcagagaactcacacaggagaaaaaccctataaatgtaaacaatgtggtaaagcattcactgtttccggttcttgtctaatacatgaacgaactcacactggagagaaaccctacgaatgtaaggaatgtgggaaaacattcagattttcttgttcttttaagacgcatgaaaggactcacactggagaaagaccctataaatgtaccaaatgtgataaagccttcagctgttccacttcccttcgttaccatggaagcattcatactggagagagaccctatgagtgtaaacaatgtggcaaagcctttagtcgtttgagttccctttgtaaccatagaagtactcataccggagagaaaccctatgaatgtaaacaatgtgatcaagccttcagtcgcctcagttcccttcacctccacgaaagaattcatactggagaaaaaccctatgaatgtaagaaatgcggtaaagcctacactcgttccagtcaccttactcgccatgaaagaagtcatgatatagaggctgggtgtagtgactcagcctataatcccagcactttgggaggccaaggcgtgtggattgcttgagcccaggagttcataaccagcctggattaaaacaatgtgaaacaacctgggcaacatggtgaaaccctgtctttacaaaaaataaaataatgccgggcacggtggcttacgcctgtaatcccagcactttgggaggccgaggcgggtggatcacgaggtcaggagatcgagaccatcctggccaacacggtgaaaccccgtctctactaaaaatacaaaaaattagctgggcgtggtggcagacgcctgtggtcccagttactcgggaggctgaggcaggagaatggcatgaacccgggaggcggaacttgcagtgagccgagatcgcaccactgcacttcagcctgggtgacagagtgagactctgtctcaaaaaataagat

SEQ ID NO: 203407 - DNA, 489 bp, Homo sapiens
  Payload ID: 20109
  Gene Name: zinc finger protein 669
  ENST ID: ENST00000366500
  CDS Start-End: 91-306
caggtggctctgcagcagcctctgccaccctgtgacctgcgagtattgggacatccctagctgacgccaggacacccgggaagccgaggaatggactcggtggcttttgaggatgtggctgtgaactttacccaggaggaatgggctttgctagattcttctcagaagaatctctacagagaagtgatgcaggaaacctgcaggaacctggcttctgtagaaatcatatcgtacagagactgtgtgaaagtaaagaagatggtcagtatggagaagttgtcagccaaattccaaatcttgatctgaacgagaacatttctactggattaaaaccatgtgaatgcagtatttgtggaaaagtctttgtacgtcattccctccttaataggcatatcctagctcactcaggatacaaaccatatggagagaagcaatataaatgtgaacagtgtgggaaattcttcgtttctgttccaggtgttagaagac

SEQ ID NO: 203408 - DNA, 730 bp, Homo sapiens
  Payload ID: 20109
  Gene Name: zinc finger protein 669
  ENST ID: ENST00000366501
  CDS Start-End: 80-265
gcagcagcctctgccaccctgtgacctgcgagtattgggacatccctagctgacgccaggacacccgggaagccgaggaatggactcggtggcttttgaggatgtggctgtgaactttacccaggaggaatgggctttgctagattcttctcagaagaatctctacagagaagtgatgcaggaaacctgcaggaacctggcttctgaagccaatggaaagaccagaatattgaagatcacttcgaaaaacctgggaaagatataagaaatcatatcgtacagagactgtgtgaaagtaaagaagatggtcagtatggagaagttgtcagccaaattccaaatcttgatctgaacgagaacatttctactggattaaaaccatgtgaatgcagtatttgtggaaaagtctttgtacgtcattccctccttaataggcatatcctagctcactcaggatacaaaccatatggagagaagcaatataaatgtgaacagtgtgggaaattcttcgtttctgttccaggtgttagaagacacatgataatgcacagtggaaatccagcttataaatgtacgatatgtgggaaagctttttattttctcaattcagttgaaagacatcagagaactcacacaggagaaaaaccctataaatgtaaacaatgtggtaaagcattcactgtttccggttcttgtctaatacatgaacgaactcacactggagagaaac

SEQ ID NO: 203409 - DNA, 1718 bp, Homo sapiens
  Payload ID: 20109
  Gene Name: zinc finger protein 669
  Uniprot ID: Q96BR6
  ENST ID: ENST00000448299
  CDS Start-End: 170-1306
ggcggttgctttgtctctccttcgccggagccggctcttcctgttagtctccgctgctagttcttggctctgggaggcccaggtggctctgcagcagcctctgccaccctgtgacctgcgagtattgggacatccctagctgacgccaggacacccgggaagccgaggaatggactcggtggcttttgaggatgtggctgtgaactttacccaggaggaatgggctttgctagattcttctcagaagaatctctacagagaagtgatgcaggaaacctgcaggaacctggcttctgtaggaagccaatggaaagaccagaatattgaagatcacttcgaaaaacctgggaaagatataagaaatcatatcgtacagagactgtgtgaaagtaaagaagatggtcagtatggagaagttgtcagccaaattccaaatcttgatctgaacgagaacatttctactggattaaaaccatgtgaatgcagtatttgtggaaaagtctttgtacgtcattccctccttaataggcatatcctagctcactcaggatacaaaccatatggagagaagcaatataaatgtgaacagtgtgggaaattcttcgtttctgttccaggtgttagaagacacatgataatgcacagtggaaatccagcttataaatgtacgatatgtgggaaagctttttattttctcaattcagttgaaagacatcagagaactcacacaggagaaaaaccctataaatgtaaacaatgtggtaaagcattcactgtttccggttcttgtctaatacatgaacgaactcacactggagagaaaccctacgaatgtaaggaatgtgggaaaacattcagattttcttgttcttttaagacgcatgaaaggactcacactggagaaagaccctataaatgtaccaaatgtgataaagccttcagctgttccacttcccttcgttaccatggaagcattcatactggagagagaccctatgagtgtaaacaatgtggcaaagcctttagtcgtttgagttccctttgtaaccatagaagtactcataccggagagaaaccctatgaatgtaaacaatgtgatcaagccttcagtcgcctcagttcccttcacctccacgaaagaattcatactggagaaaaaccctatgaatgtaagaaatgcggtaaagcctacactcgttccagtcaccttactcgccatgaaagaagtcatgatatagaggctgggtgtagtgactcagcctataatcccagcactttgggaggccaaggcgtgtggattgcttgagcccaggagttcataaccagcctggattaaaacaatgtgaaacaacctgggcaacatggtgaaaccctgtctttacaaaaaataaaataatgccgggcacggtggcttacgcctgtaatcccagcactttgggaggccgaggcgggtggatcacgaggtcaggagatcgagaccatcctggccaacacggtgaaaccccgtctctactaaaaatacaaaaaattagctgggcgtggtggcagacgcctgtggtcccagttactcgggaggctgaggcaggagaatggcatgaacccgggaggcggaacttgcagtgagccgagatcgcaccactgcacttcagcctgggtgacagagtgagactctgtctcaaaaaataagataaaataaaataaaaaaataattagctggg

SEQ ID NO: 203410 - DNA, 584 bp, Homo sapiens
  Payload ID: 20109
  Gene Name: zinc finger protein 669
  ENST ID: ENST00000476158
  CDS Start-End: 167-584
ggttgctttgtctctccttcgccggagccggctcttcctgttagtctccgctgctagttcttggctctgggaggcccaggtggctctgcagcagcctctgccaccctgtgacctgcgagtattgggacatccctagctgacgccaggacacccgggaagccgaggaatggtgagtggactgcgcctggcttcccgaagtggagaagagggctggttgaaacctgctgtggcgcgactcgggcctccacgccatcggctccggaacctgcggaccgagtcgccgtggcgtagccggggctcagtcctcttctgttcagggccgggccgggcggggcgggcagcggaacccctgcatcctgtctgtacctgcgggcgccacttccgccggccggagccctgtcgggaacccctcgcctcccctatccaggactcggtggcttttgaggatgtggctgtgaactttacccaggaggaatgggctttgctagattcttctcagaagaatctctacagagaagtgatgcaggaaacctgcaggaacctggcttctgtagaaatcatatcgtacagagactgtgtgaaag

SEQ ID NO: 203411 - DNA, 1994 bp, Homo sapiens
  Payload ID: 20110
  Gene Name: zinc finger protein 670
  Uniprot ID: Q9BS34
  ENST ID: ENST00000366503
  CDS Start-End: 160-1329
gtgttgggcagcgcgaatgtggcgagctcggtgcgtctccgctgctccttccccttatccctgggaggtccaagtggtcccgcggcagcttctgttgctctgggacctgcaggtcccggaaggtccttagggaggaccccagacaccggagactgggaaatggattcagtgtcatttgaagatgtggctgtggcctttactcaggaggagtgggctttgctggatccttctcaaaagaatctctacagagatgtgatgcaagaaatcttcaggaacctggcttctgtaggaaacaaatcagaagaccagaatatccaagatgacttcaaaaatcctgggagaaatctaagcagtcatgtggtagagagactgtttgaaattaaagaaggcagtcaatatggagaaaccttcagccaggattcaaatttgaatctgaataagaaagtttctactggagtaaagccatgtgaatgcagtgtgtgtggaaaagtcttcatatgtcattcagcccttcataggcacatcctgtctcacattggaaacaaactatttgagtgtgaggaatgtccagagaagttatatcattgcaaacaatgtgggaaagcctttatctctctcaccagtgttgacagacacatggtaacacacactagtaatgggccttataagggtccagtgtatgagaagccttttgattttcctagtgtatttcaaatgcctcagagcacttacactggagagaaaacatataaatgtaaacattgtgataaagccttcaattattcaagttatcttcgtgaacatgaaagaactcatactggagagaaaccctatgcatgtaagaaatgtggtaaatcattcactttttccagttctcttcgccaacatgaaagatctcatactggagagaaaccctatgaatgtaaggaatgtggcaaagccttcagtcgttccacttacttgggaatacatgaaagaacgcatactggagaaaaaccctatgaatgtataaaatgtggcaaagcctttagatgttccagagtcctcagagtccatgaaaggactcacagtggagaaaagccctatgaatgtaaacaatgtggtaaagccttcaaatattctagtaacctatgtgagcatgaaagaactcacactggagtgaaaccttatggatgtaaggaatgtggtaagtcgtttacttcttccagtgcccttcgaagccatgaaaggactcatactggagaaaaaccctatgaatgtaagaaatgtggtaaagccttcagttgttccagttcccttcgaaagcatgaaagagcttatatgtggtaaaaaacaacaacaacaaaacacctctgtcaatgtaagaagtgtgttaaagctttcagttattctagtttcattagaacacgtgaaaaaattaaaaactcaaattagagagaaacccaacacatgtaaggaagattagaatgtatgcaattttcctagttcccttctaaaacttagaaggacccgtcctgggaaagaacgtcataaaatacgaaaaatgtgttagaacactttattttcccagccgctttcaaatatatttttatcagtggttcattgttaaagaaggtgtctatactttagattttcagttttttgcagggaatcatggagctgagaatttcacagatactttataagccatagtacatgagcttaataggctgtgttttgtttctcatcagttaacataatttttgtctattcatttaaaaatttgttggatccctagactaagttgaaatgtatttctaatagtaggcaattttaattttcatgtagttgtttaattgttctctaattaatggaccaatgaaaaatgagttcatgtgtgtgtgtgtgtgtgtgtgtgtgtgtgtgtattctacctttttatgggaaaactacttttttgttgtaaagattttcttctgttttctttgctaataaagaattgttattaatttgca

SEQ ID NO: 203412 - DNA, 2431 bp, Homo sapiens
  Payload ID: 20111
  Gene Name: zinc finger protein 671
  Uniprot ID: Q8TAW3
  ENST ID: ENST00000317398
  CDS Start-End: 97-1701
gtagcggacattttgtttctgtcaggctgtccctggccggggttctgtaacgcttgtgtgggccgcaggtggaggtgttgggaaagcgcggaggagatgttgtccccagtgtcccgagacgcgtctgatgctctgcagggacggaagtgcctgcgtccccgatcgagacgcctgccgctcccggcagctgtccgcgcccacggtcctatggcggagctaacggactccgcgcggggctgtgtggtctttgaggatgtgtttgtatacttctctcgggaagaatgggagcttcttgatgatgctcagagacttttgtaccatgatgtgatgctggagaactttgcacttttagcctcactgggaattgcattttccagatcacgtgcagtcatgaaactagagcgaggagaagagccctgggtgtatgaccaggtggatatgacttcagccacagaaagagaggcccagaggggacttagacctggttgttggcatggagtggaggatgaagaggtatcttctgagcagagcatttttgtagcaggagtgtcagaggtcaggactctcatggcagagctggagtctcacccatgtgacatatgtggcccaatattgaaagataccttacacctggctaaataccatgggggaaaagccaggcagaaaccatacttgtgtggggcatgtggaaagcaattctggttcagtacagactttgaccagcaccagaaccagcccaatggagggaaacttttcccaaggaaggagggcagagactctgtgaaaagctgcagagtccatgtgccagagaagaccctcacatgtgggaaaggtaggagagacttttcagccacatctggccttcttcagcatcaggcctctctcagcagcatgaagccccacaagagcactaagcttgtgagtggctttctcatgggacagaggtatcacaggtgtggtgaatgtgggaaagccttcacccgcaaagacacacttgctcggcatcagagaatccacactggagaaaggccttatgagtgtaacgaatgtgggaaattcttcagccaaagctatgacctctttaaacaccagacagttcacactggagaaaggccatacgagtgcagcgaatgtgggaaattctttagacaaatctccggcctgattgagcacaggcgagttcacacgggtgaaagactctatcagtgtggcaaatgtgggaaattttttagcagtaagtctaatctcattcgacaccaggaagttcacacaggagccaggccttatgtatgcagcgaatgtgggaaagagttcagtcggaaacacacacttgttctgcaccaacgaactcacactggagaaaggccttatgagtgcagtgaatgtgggaaggcctttagccaaagctcccaccttaatgtacactggagaattcacagcagtgattatgagtgtagcagatgtggtaaagctttcagctgcatctccaaactcattcagcaccagaaagttcactctggagaaaagccttatgagtgcagcaagtgcgggaaagccttcactcaaagacccaacctcatcaggcactggaaagtccacactggggaaaggccttatgtgtgtagtgagtgcgggagagaattcatccggaaacagacacttgttctgcaccagagggttcatgctggagaaaagctttaagagtgtagcaaatgtgggggaaagtcttaggccaatgcccctgacttactatatggtggggaactagcagtagttaatgagtgcagcagatgcaggaaagccttcccctggaggctgaaccttacccgccattgggaatttcacaccggacacaggccttagcagtctaagcaatgtgctgtctctgttcagcccaacagctcaccctagagtggaactctgggagcagccattgggagggaaccatcagtaagaagtgaaacttcatagatatggacattcccactggggagattccctgtgagtgtcaagtatgtgagatgctttcagcagctgtgttgcactttttaaatggctattggcctttgctggggcaggagccatctgctcctaccatctggcagaatcatactgcgtttaccatttaccccagcatgcttgtgacgggcagacctctcttctctccccagtccctaaaaggtgttgtgagtggtctcacagcccactaggggtcttaatttcctctcttttgatgtaaatggcatggaaataatcagctttgttcaagaggacacagaaggattctgcaaatagcctgcagagacttacctgtgttgattgatttcatatgatgctcgttatggatatatccaatatccaagtcacccagctctggaactgcctgcttcacattgctcatgataataaaggcctgttctttaagccacca

SEQ ID NO: 203413 - DNA, 2379 bp, Homo sapiens
  Payload ID: 20111
  Gene Name: zinc finger protein 671
  ENST ID: ENST00000335820
  CDS Start-End: 47-1717
cgcttgtgtgggccgcaggtggaggtgttgggaaagcgcggaggagatgttgtccccagtgtcccgagacgcgtctgatgctctgcagggacggaagtgcctgcgtccccgatcgagacgcctgccgctcccggcagctgtccgcgcccacggtcctatggcggagctaacggactccgcgcggggctgtgtggtctttgaggatgtgtttgtatacttctctcgggaagaatgggagcttcttgatgatgctcagagacttttgtaccatgatgtgatgctggagaactttgcacttttagcctcactgggaattgcattttccagatcacgtgcagtcatgaaactagagcgaggagaagagccctgggtgtatgaccaggtggatatgacttcagccacagaaagagaggcccagaggggacttagacctggttgttggcatggagtggaggatgaagaggtatcttctgagcagagcatttttgtagcaggagtgtcagaggtcaggactctcatggcagagctggagtctcacccatgtgacatatgtggcccaatattgaaagataccttacacctggctaaataccatgggggaaaagccaggcagaaaccatacttgtgtggggcatgtggaaagcaattctggttcagtacagactttgaccagcaccagaaccagcccaatggagggaaacttttcccaaggaaggagggcagagactctgtgaaaagctgcagagtccatgtgccagagaagaccctcacatgtgggaaaggtaggagagacttttcagccacatctggccttcttcagcatcaggcctctctcagcagcatgaagccccacaagagcactaagcttgtgagtggctttctcatgggacagaggtatcacaggtgtggtgaatgtgggaaagccttcacccgcaaagacacacttgctcggcatcagagaatccacactggagaaaggccttatgagtgtaacgaatgtgggaaattcttcagccaaagctatgacctctttaaacaccagacagttcacactggagaaaggccatacgagtgcagcgaatgtgggaaattctttagacaaatctccggcctgattgagcacaggcgagttcacacgggtgaaagactctatcagtgtggcaaatgtgggaaattttttagcagtaagtctaatctcattcgacaccaggaagttcacacaggagccaggccttatgtatgcagcgaatgtgggaaagagttcagtcggaaacacacacttgttctgcaccaacgaactcacactggagaaaggccttatgagtgcagtgaatgtgggaaggcctttagccaaagctcccaccttaatgtacactggagaattcacagcagtgattatgagtgtagcagatgtggtaaagctttcagctgcatctccaaactcattcagcaccagaaagttcactctggagaaaagccttatgagtgcagcaagtgcgggaaagccttcactcaaagacccaacctcatcaggcactggaaagtccacactggggaaaggccttatgtgtgtagtgagtgcgggagagaattcatccggaaacagacacttgttctgcaccagagggttcatgctggagaaaagcttaagagtgtagcaaatgtgggggaaagtcttaggccaatgcccctgacttactatatggtggggaactagcagtagttaatgagtgcagcagatgcaggaaagccttcccctggaggctgaaccttacccgccattgggaatttcacaccggacacaggccttagcagtctaagcaatgtgctgtctctgttcagcccaacagctcaccctagagtggaactctgggagcagccattgggagggaaccatcagtaagaagtgaaacttcatagatatggacattcccactggggagattccctgtgagtgtcaagtatgtgagatgctttcagcagctgtgttgcactttttaaatggctattggcctttgctggggcaggagccatctgctcctaccatctggcagaatcatactgcgtttaccatttaccccagcatgcttgtgacgggcagacctctcttctctccccagtccctaaaaggtgttgtgagtggtctcacagcccactaggggtcttaatttcctctcttttgatgtaaatggcatggaaataatcagctttgttcaagaggacacagaaggattctgcaaatagcctgcagagacttacctgtgttgattgatttcatatgatgctcgttatggatatatccaatatccaagtcacccagctctggaactgcctgcttcacattgctcatgataataaaggcctgttctttaagccacc

SEQ ID NO: 203414 - DNA, 977 bp, Homo sapiens
  Payload ID: 20111
  Gene Name: zinc finger protein 671
  ENST ID: ENST00000596939
  CDS Start-End: 88-258
attttgtttctgtcaggctgtccctggccggggttctgtaacgcttgtgtgggccgcaggtggaggtgttgggaaagcgcggaggagatgttgtccccagtgtcccgagacgcgtctgatgctctgcagggacggaagtgcctgcgtccccgatcgagacgcctgccgctcccggcagctgtccgcgcccacggtcctatggcggagctaacggactccgcgcgggaattgcattttccagatcacgtgcagtcatgaaactagagcgaggagaagagccctgggtgtatgaccaggtggatatgacttcagccacagaaagagaggcccagaggggacttagacctggtgagtggacatcggggaagggcacgatgtcaaagctgggttcaaaactggcaacattaactgttcacatcagtgtttgtttccagggccagtggccacacagcgtttctatctgtcctttcctgttcttgacacgaagatatatcatttctagtttgttagccccttgccaccctcacctctggccttcaccttacacccatgtttcaccacttctctgtctacattttttggcagtattgacctgcaattaatgttcacaagatgtgcatatattcttaaatagtctttgaacaccagctgctcacttgtagttggattttcctgggactggatacatttttcatagcactcacgagtcactaacagtcaaggccctactggaagccatttgtttggttccattcttatatcctggcccttcattggcactcccccatggtatgacctccagaggctcactacctcaaagccattccttcctcactctgaccatgcctctcattctgaaaacagtttcatgaacttattcctgcatgtgtcaaatgcacatatacaatgaggttgccccttcccacccgtaaatatgcatttaatcagcatttgtgtgttcttcaggttgttggcat

SEQ ID NO: 203415 - DNA, 1932 bp, Homo sapiens
  Payload ID: 20111
  Gene Name: zinc finger protein 671
  ENST ID: ENST00000601584
  CDS Start-End: 95-265
agcggacattttgtttctgtcaggctgtccctggccggggttctgtaacgcttgtgtgggccgcaggtggaggtgttgggaaagcgcggaggagatgttgtccccagtgtcccgagacgcgtctgatgctctgcagggacggaagtgcctgcgtccccgatcgagacgcctgccgctcccggcagctgtccgcgcccacggtcctatggcggagctaacggactccgcgcgggaattgcattttccagatcacgtgcagtcatgaaactagagcgaggagaagagccctgggtgtatgaccaggtggatatgacttcagccacagaaagagaggcccagaggggacttagacctggttgttggcatggagtggaggatgaagaggtatcttctgagcagagcatttttgtagcaggagtgtcagaggtcaggactctcatggcagagctggagtctcacccatgtgacatatgtggcccaatattgaaagataccttacacctggctaaataccatgggggaaaagccaggcagaaaccatacttgtgtggggcatgtggaaagcaattctggttcagtacagactttgaccagcaccagaaccagcccaatggagggaaacttttcccaaggaaggagggcagagactctgtgaaaagctgcagagtccatgtgccagagaagaccctcacatgtgggaaaggtaggagagacttttcagccacatctggccttcttcagcatcaggcctctctcagcagcatgaagccccacaagagcactaagcttgtgagtggctttctcatgggacagaggtatcacaggtgtggtgaatgtgggaaagccttcacccgcaaagacacacttgctcggcatcagagaatccacactggagaaaggccttatgagtgtaacgaatgtgggaaattcttcagccaaagctatgacctctttaaacaccagacagttcacactggagaaaggccatacgagtgcagcgaatgtgggaaattctttagacaaatctccggcctgattgagcacaggcgagttcacacgggtgaaagactctatcagtgtggcaaatgtgggaaattttttagcagtaagtctaatctcattcgacaccaggaagttcacacaggagccaggccttatgtatgcagcgaatgtgggaaagagttcagtcggaaacacacacttgttctgcaccaacgaactcacactggagaaaggccttatgagtgcagtgaatgtgggaaggcctttagccaaagctcccaccttaatgtacactggagaattcacagcagtgattatgagtgtagcagatgtggtaaagctttcagctgcatctccaaactcattcagcaccagaaagttcactctggagaaaagccttatgagtgcagcaagtgcgggaaagccttcactcaaagacccaacctcatcaggcactggaaagtccacactggggaaaggccttatgtgtgtagtgagtgcgggagagaattcatccggaaacagacacttgttctgcaccagagggttcatgctggagaaaagctttaagagtgtagcaaatgtgggggaaagtcttaggccaatgcccctgacttactatatggtggggaactagcagtagttaatgagtgcagcagatgcaggaaagccttcccctggaggctgaaccttacccgccattgggaatttcacaccggacacaggccttagcagtctaagcaatgtgctgtctctgttcagcccaacagctcaccctagagtggaactctgggagcagccattgggagggaaccatcagtaagaagtgaaacttcatagatatggacattcccactggggagattccctgtgagtgtcaagtatgtgagatgctttcagcagctgtgttgcactttttaaatggctatt

SEQ ID NO: 203416 - DNA, 2903 bp, Homo sapiens
  Payload ID: 20111
  Gene Name: zinc finger protein 671
  ENST ID: ENST00000600125
  CDS Start-End: 86-409
tttgtttctgtcaggctgtccctggccggggttctgtaacgcttgtgtgggccgcaggtggaggtgttgggaaagcgcggaggagatgttgtccccagtgtcccgagacgcgtctgatgctctgcagggacggaagtgcctgcgtccccgatcgagacgcctgccgctcccggcagctgtccgcgcccacggtcctatggcggagctaacggactccgcgcgggtgggtgctgcgtcctccgggccctcagtcaccctttctccgactccgaatcgtaaagtgcctgcagcccctgtgtcccaggacagcgacgcactcttggggcggggtcctatctcggtgtgggtgggtgtgggagagttacgggcggaggggacggcgcaggtaaaggctcgggggtgctgctgacccccaaacatttgggagacagggttctcatcaacacagagcagagtttgaggaactgtgactggaatggcaggctgagaagttgtcgcttcattctgagggcgttgagattaactgagggttttgaatagaaggacgtgatcttagctgggattttaagtgtctcgaaatttgctcaggggagaacattagtttggggtggggactgcgaggatggatacgaggagaccggtaaggaggctactgcagtggattccaggaatgctttggtggtggatgtaccaagagtaatggcagggctgtgtggtctttgaggatgtgtttgtatacttctctcgggaagaatgggagcttcttgatgatgctcagagacttttgtaccatgatgtgatgctggagaactttgcacttttagcctcactgggaattgcattttccagatcacgtgcagtcatgaaactagagcgaggagaagagccctgggtgtatgaccaggtggatatgacttcagccacagaaagagaggcccagaggggacttagacctggttgttggcatggagtggaggatgaagaggtatcttctgagcagagcatttttgtagcaggagtgtcagaggtcaggactctcatggcagagctggagtctcacccatgtgacatatgtggcccaatattgaaagataccttacacctggctaaataccatgggggaaaagccaggcagaaaccatacttgtgtggggcatgtggaaagcaattctggttcagtacagactttgaccagcaccagaaccagcccaatggagggaaacttttcccaaggaaggagggcagagactctgtgaaaagctgcagagtccatgtgccagagaagaccctcacatgtgggaaaggtaggagagacttttcagccacatctggccttcttcagcatcaggcctctctcagcagcatgaagccccacaagagcactaagcttgtgagtggctttctcatgggacagaggtatcacaggtgtggtgaatgtgggaaagccttcacccgcaaagacacacttgctcggcatcagagaatccacactggagaaaggccttatgagtgtaacgaatgtgggaaattcttcagccaaagctatgacctctttaaacaccagacagttcacactggagaaaggccatacgagtgcagcgaatgtgggaaattctttagacaaatctccggcctgattgagcacaggcgagttcacacgggtgaaagactctatcagtgtggcaaatgtgggaaattttttagcagtaagtctaatctcattcgacaccaggaagttcacacaggagccaggccttatgtatgcagcgaatgtgggaaagagttcagtcggaaacacacacttgttctgcaccaacgaactcacactggagaaaggccttatgagtgcagtgaatgtgggaaggcctttagccaaagctcccaccttaatgtacactggagaattcacagcagtgattatgagtgtagcagatgtggtaaagctttcagctgcatctccaaactcattcagcaccagaaagttcactctggagaaaagccttatgagtgcagcaagtgcgggaaagccttcactcaaagacccaacctcatcaggcactggaaagtccacactggggaaaggccttatgtgtgtagtgagtgcgggagagaattcatccggaaacagacacttgttctgcaccagagggttcatgctggagaaaagctttaagagtgtagcaaatgtgggggaaagtcttaggccaatgcccctgacttactatatggtggggaactagcagtagttaatgagtgcagcagatgcaggaaagccttcccctggaggctgaaccttacccgccattgggaatttcacaccggacacaggccttagcagtctaagcaatgtgctgtctctgttcagcccaacagctcaccctagagtggaactctgggagcagccattgggagggaaccatcagtaagaagtgaaacttcatagatatggacattcccactggggagattccctgtgagtgtcaagtatgtgagatgctttcagcagctgtgttgcactttttaaatggctattggcctttgctggggcaggagccatctgctcctaccatctggcagaatcatactgcgtttaccatttaccccagcatgcttgtgacgggcagacctctcttctctccccagtccctaaaaggtgttgtgagtggtctcacagcccactaggggtcttaatttcctctcttttgatgtaaatggcatggaaataatcagctttgttcaagaggacacagaaggattctgcaaatagcctgcagagacttacctgtgttgattgatttcatatgatgctcgttatggatatatccaatatccaagtcacccagctctggaactgcctgcttcacattgctcatgataataaaggcctgttctttaagccacca

SEQ ID NO: 203417 - DNA, 2989 bp, Homo sapiens
  Payload ID: 20112
  Gene Name: zinc finger protein 672
  Uniprot ID: Q499Z4
  ENST ID: ENST00000306562
  CDS Start-End: 747-2105
ctgctcgctggcctcccagtcttcccagcaaccggtgacactgcccgcgccagactgaccactagccgacgcgggcgagagggacaggagcgtgacctccccatcccgaggggccggacgctcgggcgcctccccgctccccccactcggaggccgcgcgcgccgttagccccttcctcgctcccccgccccagtcccgcagtccgggaggcgggggtcggcagccggctgagtgggaaccgcgcggtgtctgaggaggcagtcggcgaccggtttccacttcaagcgtgacccttttgcctgtgggatgagctccagcatggggtgaggtacagaagagagacttgaagagcgtgccttgggactcaagcgccaaacctgtaccctagcgagtgtcctactccgcatccgtaatggaaggaaatgcacatcttactccagaggcacaagaggaggacatcccatgcggctactcctgcccagcgtggtggggcagcagaagctccagagcccagacttgcaggctcacggtgcagggtgaacctggccacagctcaccctggaacagccacaatgtctgccccttagagaagaaccctgaaatcagaccagtttttgcggcctccccctttcctctctgttacagtgccctttccaggccttaagagaagtaaaacttagctgcagcgtcaggaggtggaccccagagtgtgagtggcacgcttccctgtgaacccgtcctcaccatgtttgccacatctggggcagtggcagcggggaagccttactcgtgcagcgaatgtggcaagagcttctgctacagctcagtgctgctgcgacatgaacgagctcacggcggtgacggccgcttccgttgcctagaatgcggtgagcgctgtgcacgggctgctgacctccgagcgcacaggcgcacgcatgctggccagaccctctacatctgcagtgagtgcggacaaagcttccgccacagcggccgtcttgacctacacttgggcgcacaccggcagcgatgccgcacttgcccctgccgcacatgcggccggcgcttcccgcacctcccggcgctgctgctacaccggcgccgccagcatctgccagagcggccccgccgctgcccgctgtgcgcccgcaccttccggcagagcgcgctgctcttccaccaggcgcgggcgcaccccttggggacaacctctgaccctgctgccccaccccaccgctgcgcgcagtgcccgcgagccttccgaagcggcgccgggctgcggagtcacgcgcgcatccacgtgtcccggagccccacgcgaccccgtgtctcagacgcccaccagtgtggcgtgtgcggcaagtgctttggcaagagctctacgctgacgcgacacctgcagacgcactcgggggagaaacccttcaagtgcccggagtgcggcaagggcttcctggagagcgccacgctggtgcgccaccagcgcacacacacgggcgagaagccgtacgcatgtggcgactgtggacgctgcttcagcgagagttccacgctgctgcgccatcggcgcagccatcagggcgagcggccacatgcgtgcgccacttgcggcaagggtttcgggcagcgctccgacctggtggtgcaccagcgcatccacacgggcgagaagcccttcgcgtgccccgagtgcggccgccgcttcagcgaccgctcggacctcaccaagcaccggcgcacgcacacgggcgagaagccctaccgctgcgaactgtgcggcaagcggttcacgtgcgtgtccaatctcaacgtgcatcggcgcaaccatgccggccacaagccacacaaatgccccgagtgcagcaaggccttcagcgtcgcctccaagcttgcactgcaccgcaagacgcacctgggcgaacggccagcggagtgcgcagagtgcggcaagtgcttcagccacagccgctcgctgtcacagcatcagcgggcccacacgcgcgcccgcaccgctgccgccgttgccatccagtccgcagtgggcactgccctcgtctttgaggggccggctgaacaggaaaagccagggttctctgtgtcctagttgagggaggcttgctgaggcttctctaaaggtggttgggcaagcacctatatagtatcacggggacagttgaggcaactcgtagatggagatttgggaaaagacgatgtggcctcctacctttccagtttctgttggcagcccttcacgtagcctcctgcctcgcctctacacctactaccctgtcggcccttttgccatgctgtcctcgtataactcggattctctcctcaggtgtaggtgcagggagtcagggaacccttagactcccctgtgtgcaagagcccaggtgttggtgtgtccctttaatgctactgtgctctctggtgtttctgattttcctgcctttattctgtcttctcttgtcctatctcattccagcccacatcttctcctttcctgattacttttgttgtcctgcctcttcaggtaatggtcacagatttggctgtaggcacgttaccagccctgtggcttcttgactcttggttccctgttaactctgtttctgagaaatgtgggtatggaggtgggtgggaaagctcacttccatgaaggatgtctccatgctaggagctgcctgcaccctggcagaggtggccagtcacgtgaaggtgggcagggcccttagcatggccacacatgtccccagggcagatcaaggggcctctcagaaccatgttccccagccaggtgaggaccattttcactgggacccaggccaaaaccatgtgggtgcacaaagccaggcactgccaagtggaacatgaggttatttccaaatcatgggagccaccagcagggagagggcaggatggaaaatcccctggagccggtcaactttttgctcatggctagtgaaataaagttgtttgagtactaga

SEQ ID NO: 203418 - DNA, 583 bp, Homo sapiens
  Payload ID: 20112
  Gene Name: zinc finger protein 672
  ENST ID: ENST00000505503
  CDS Start-End: 573-583
agactgaccactagccgacgcgggcgagagggacaggagcgtgacctccccatcccgaggggccggacgctcgggcgcctccccgctccccccactcggaggccgcgcgcgccgttagccccttcctcgctcccccgccccagtcccgcagtccgggaggcgggggtcggcagccggctgagtgggaaccgcgcggtgtctgaggaggcagtcggcgaccggtttccacttcaagcgtgacccttttgcctgtgggatgagctccagcatggggtgaggtacagaagagagacttgaagagcgtgccttgggactcaagcgccaaacctgtaccctagcgagtgtcctactccgcatccgtaatggaaggaaatgcacatcttactccagaggcacaagaggaggacatcccatgcggctactcctgcccagcgtggtggggcagcagaagctccagagcccagacttgcagtgccctttccaggccttaagagaagtaaaacttagctgcagcgtcaggaggtggaccccagagtgtgagtggcacgcttccctgtgaacccgtcctcaccatgtttgccac

SEQ ID NO: 203419 - DNA, 883 bp, Homo sapiens
  Payload ID: 20112
  Gene Name: zinc finger protein 672
  ENST ID: ENST00000423362
  CDS Start-End: 773-883
ttcccttctttcatcttggagcccacagttcgcgcaagtggagctatggaaggcccatgctgtgctgttctaatcatgtgagggattcttaggggttgagggggaaggactgaaaacggctgcagaccgtttaggatgcctggagtggagacaggagttaagccccttactcagagtcgctcttaagaactgcccagggccgggcacagtggctcatgcctgttatcctagcactttgggaggccaaagtgggaggctctcttgagctcgggagttcaagaccagcctgggcaacatggtttccacttcaagcgtgacccttttgcctgtgggatgagctccagcatggggtgaggtacagaagagagacttgaagagcgtgccttgggactcaagcgccaaacctgtaccctagcgagtgtcctactccgcatccgtaatggaaggaaatgcacatcttactccagaggcacaagaggaggacatcccatgcggctactcctgcccagcgtggtggggcagcagaagctccagagcccagacttgcaggctcacggtgcagggtgaacctggccacagctcaccctggaacagccacaatgtctgccccttagagaagaaccctgaaatcagaccagtttttgcggcctccccctttcctctctgttacagtgccctttccaggccttaagagaagtaaaacttagctgcagcgtcaggaggtggaccccagagtgtgagtggcacgcttccctgtgaacccgtcctcaccatgtttgccacatctggggcagtggcagcggggaagccttactcgtgcagcgaatgtggcaagagcttctgctacagctcagtgctgctgcgacatgaacgagctcacggc

SEQ ID NO: 203420 - DNA, 930 bp, Homo sapiens
  Payload ID: 20112
  Gene Name: zinc finger protein 672
  ENST ID: ENST00000428515
  CDS Start-End: 722-930
ctgagccgacttaagggggcaacggccgccaccgggttctggcagcgttaaacgttccccactacgtttttggtgcccggtctcgccctccaagtcggctggcgccacgggcaaggggctagggtaggctcggggttgggaaggggctcgctcaaagaaagtttgcccagcaacttgtgacgcgcgccgactgaggcgccccaggattggctgcgctgctgtgggccacggaaagcgacctgttcaggtttccacttcaagcgtgacccttttgcctgtgggatgagctccagcatggggtgaggtacagaagagagacttgaagagcgtgccttgggactcaagcgccaaacctgtaccctagcgagtgtcctactccgcatccgtaatggaaggaaatgcacatcttactccagaggcacaagaggaggacatcccatgcggctactcctgcccagcgtggtggggcagcagaagctccagagcccagacttgcaggctcacggtgcagggtgaacctggccacagctcaccctggaacagccacaatgtctgccccttagagaagaaccctgaaatcagaccagtttttgcggcctccccctttcctctctgttacagtgccctttccaggccttaagagaagtaaaacttagctgcagcgtcaggaggtggaccccagagtgtgagtggcacgcttccctgtgaacccgtcctcaccatgtttgccacatctggggcagtggcagcggggaagccttactcgtgcagcgaatgtggcaagagcttctgctacagctcagtgctgctgcgacatgaacgagctcacggcggtgacggccgcttccgttgcctagaatgcggtgagcgctgtgcacgggctgctgacctccgagcgcacaggcgcacgcatgctggccagaccctcta

SEQ ID NO: 203421 - DNA, 2274 bp, Homo sapiens
  Payload ID: 20113
  Gene Name: zinc finger protein 674
  Uniprot ID: Q2M3X9
  ENST ID: ENST00000414387
  CDS Start-End: 141-1868
ggtcagagtgcagacctgagaccactgctcaccgatttcagactccagtttatctgtgcctcggcttccccacttagtcgcagaagacttaggctgaggccccaggaagagatctccatcctttgcaggagcacaacaagatggccatgtcccaggaatcattgaccttcaaggacgtgtttgtggacttcaccctggaggagtggcagcaactggactctgcccagaagaacctctacagggatgtcatgcttgagaactacagccacctggtgtccgtggggcatctagttgggaagccagatgtgatcttcaggttgggaccaggtgacgagtcctggatggcagatggagggaccccggtacggacctgtgcagtctgggaagttgacgagcagatagatcactacaaggaaagccaagacaaatttctgtggcaagctgcattcataggcaaggaaacactgaaggatgaaagtggtcaagaatgtaaaatatgtagaaaaatcatttatctcaacacagactttgtttctgtaaaacaaagactccctaaatattattcatgggaaaggtgttcaaaacatcatttaaactttcttggtcaaaatagaagctatgtaagaaagaaagatgatggatgtaaggcatattggaaagtatgcctccattataatcttcataaagctcaacctgcagagagattttttgaccctaatcaacgagggaaagccctccaccaaaagcaagcccttagaaaaagtcagagaagtcaaactggggagaaactctacaaatgtactgaatgtggaaaagtgtttatccagaaagcaaacttagttgtacatcaaagaactcacaccggagagaaaccttatgaatgctgcgaatgtgcaaaagccttcagccagaagtcaaccctcatagcacaccagagaactcacacaggggagaagccctatgaatgcagtgaatgtggaaaaacctttatccagaagtcaactctgattaaacatcaacgaactcatacaggagagaaaccatttgtatgtgacaaatgtccaaaagcctttaagagttcatatcatcttattagacatgaaaaaacacacattagacaagcattttataaaggtattaaatgtactacgtccagccttatatatcaaagaattcacacaagtgagaaacctcagtgcagtgaacatgggaaagcctctgatgagaagcccagtcccactaaacattggagaactcatacaaaagagaacatttatgagtgtagtaaatgtgggaaaagcttcagaggaaagtcacacctctctgttcatcagagaattcatacaggagagaaaccctatgaatgtagtatatgtgggaagactttcagtggaaagtcacacctctctgtccatcatagaactcatacaggagagaaaccttatgaatgcagaagatgtgggaaagcctttggggagaagtcaacccttattgtacatcagagaatgcatacaggagagaaaccctataaatgcaacgaatgtgggaaagcctttagtgagaagtcaccactgattaaacatcagagaattcatacaggagagagaccctatgaatgcactgactgtaaaaaagccttcagtaggaagtcaactctcatcaaacatcagagaattcatacaggagaaaaaccttacaaatgtagtgaatgtgggaaggccttcagtgtgaaatcaactctcattgtgcatcacagaactcatacaggagagaaaccttatgaatgcagagactgtgggaaagcattcagtgggaagtcaactctcattaaacatcagagaagtcacacaggagataaaaacctatgattatacttgagagtgggataattatactagtagttatttgtcatttgactattactagtctcattatttgtcaaataatcatggcgagtaatcttataaatgtccagaatattggaaattcttcatatgttaatgttcatttaacttaatacaaagtacaaaagtataattccagaggtgtcaataaatgtgatcagttttttcacccagaattcttcacccaggagtgaagaactgtatgtcaaataattcaaaaggggcaaaactgaatgtagttatgtgggaaagccttcagaaataatttaaatggcactgtttatcagagtatgtatgccgaggaaaactaagaatttagtgagcttataaaaccatggtagccaggcgtggtacgtagctcacacctgta

SEQ ID NO: 203422 - DNA, 4073 bp, Homo sapiens
  Payload ID: 20113
  Gene Name: zinc finger protein 674
  Uniprot ID: Q2M3X9
  ENST ID: ENST00000523374
  CDS Start-End: 212-1957
ccggagggtggcgcttcgttcacactggctgttgtcatccgcccctgaggtttcaggctgtcggcagtgaaggtcagagtgcagacctgagaccactgctcaccgatttcagactccagtttatctgtgcctcggcttccccacttagtcgcagaagacttaggctgaggccccaggaagagatctccatcctttgcaggagcacaacaagatggccatgtcccaggaatcattgaccttcaaggacgtgtttgtggacttcaccctggaggagtggcagcaactggactctgcccagaagaacctctacagggatgtcatgcttgagaactacagccacctggtgtccgtggggcatctagttgggaagccagatgtgatcttcaggttgggaccaggtgacgagtcctggatggcagatggagggaccccggtacggacctgtgcaggtgaggacaggccagaagtctgggaagttgacgagcagatagatcactacaaggaaagccaagacaaatttctgtggcaagctgcattcataggcaaggaaacactgaaggatgaaagtggtcaagaatgtaaaatatgtagaaaaatcatttatctcaacacagactttgtttctgtaaaacaaagactccctaaatattattcatgggaaaggtgttcaaaacatcatttaaactttcttggtcaaaatagaagctatgtaagaaagaaagatgatggatgtaaggcatattggaaagtatgcctccattataatcttcataaagctcaacctgcagagagattttttgaccctaatcaacgagggaaagccctccaccaaaagcaagcccttagaaaaagtcagagaagtcaaactggggagaaactctacaaatgtactgaatgtggaaaagtgtttatccagaaagcaaacttagttgtacatcaaagaactcacaccggagagaaaccttatgaatgctgcgaatgtgcaaaagccttcagccagaagtcaaccctcatagcacaccagagaactcacacaggggagaagccctatgaatgcagtgaatgtggaaaaacctttatccagaagtcaactctgattaaacatcaacgaactcatacaggagagaaaccatttgtatgtgacaaatgtccaaaagcctttaagagttcatatcatcttattagacatgaaaaaacacacattagacaagcattttataaaggtattaaatgtactacgtccagccttatatatcaaagaattcacacaagtgagaaacctcagtgcagtgaacatgggaaagcctctgatgagaagcccagtcccactaaacattggagaactcatacaaaagagaacatttatgagtgtagtaaatgtgggaaaagcttcagaggaaagtcacacctctctgttcatcagagaattcatacaggagagaaaccctatgaatgtagtatatgtgggaagactttcagtggaaagtcacacctctctgtccatcatagaactcatacaggagagaaaccttatgaatgcagaagatgtgggaaagcctttggggagaagtcaacccttattgtacatcagagaatgcatacaggagagaaaccctataaatgcaacgaatgtgggaaagcctttagtgagaagtcaccactgattaaacatcagagaattcatacaggagagagaccctatgaatgcactgactgtaaaaaagccttcagtaggaagtcaactctcatcaaacatcagagaattcatacaggagaaaaaccttacaaatgtagtgaatgtgggaaggccttcagtgtgaaatcaactctcattgtgcatcacagaactcatacaggagagaaaccttatgaatgcagagactgtgggaaagcattcagtgggaagtcaactctcattaaacatcagagaagtcacacaggagataaaaacctatgattatacttgagagtgggataattatactagtagttatttgtcatttgactattactagtctcattatttgtcaaataatcatggcgagtaatcttataaatgtccagaatattggaaattcttcatatgttaatgttcatttaacttaatacaaagtacaaaagtataattccagaggtgtcaataaatgtgatcagttttttcacccagaattcttcacccaggagtgaagaactgtatgtcaaataattcaaaaggggcaaaactgaatgtagttatgtgggaaagccttcagaaataatttaaatggcactgtttatcagagtatgtatgccgaggaaaactaagaatttagtgagcttataaaaccatggtagccaggcgtggtacgtagctcacacctgtaatcctagcacttttgggaggctgaggtgggcagattgcttgagctcacaagtttgagaccagcctgggcaacatggcaaaactctgtctctacaaaaaatacaaaagttatctgagtgtagtggtgcatacctttagtcccagctactcaggaggttgaagtaggagggtggcttgagcccaggaggcagaggttgcagtgaactgagatcgtgccactgcactccagcctgggcattatagccagaccttgtcaaataaataaataaacaaacccatggtataaatgagaggaatcatgctctatattcttttattaatagagacagggtcttgctatgttgcccaggctggtcttgaactcgtagcgttaattgatcctcccacctttgcctcccaaagcacttgtattatagatatgagccaccacacttaccatgttctttaccaaacattttgtggaagaggtgtagaggtggcaaacaattataaatttaagatatgttcactgtggagtagagtatgattatttatttatttagagatggagtttcgctcttctcgcccaggctggagtgcagtggcacgatcttggctcactgcagcctctgccttccaggttcaagtgattctcctgcctcagcctcccaagtagctgggattacaggcacccaccaccacacccggctaattctttttttttttttttttttttagtagagacgcagttttgccatgttgggcaggctggtctcgaactcctgacctcaggtaatccgcccgcctcagcctcccaaagtgctgggattataggcgagagccaccacgctcagtgagtatgacatttttaaaagaacagtataaagcataaaatatcccatgtggggcaaactcccagattattttcctaaacaaatagaaaaaatgcttcctgaaatagggtaagagaggatgagtcatcaggatccctgaaacaaagatctcaaacaggagaccttacgtatattattcatcaatatcttcagtgcaaaaatgcaaagccattacagaaagggcacatagtaagcttttacatactttccttaggaacagtgcttagaacttaaaattctccatgttttaataaagagtaataattttatggtgaagcaatataagatttaaaattttcagagtatcttccataacagcagtattatttaaagtagtgaaaaaataagacaatttaatatccaatgatagatgattaaaaattggtatgtcaggtgaaataacatgcaccaattaagactactggcaaatttgggaaaatgttcgtggtaaatcattaggtaaaaaatattataaaacaataaccatatgattaatattgtacaaacaggaagtatatgaaccattatatcagtgattctgggtggttgacatataaaaattttgtgatgagtaaagttatatgcacatataagtataaatttgtatttatttaagtataaatttgtattcacctatttcataggtgagtgtgtgtgtatagataaacacatggaacaaaaagttaggtatatctgtgtagtgtggagggaaaaagctaggaaagaaatacaccaaattattaagtaaattggcatttgaatgtggggattattgatgtgtaaaaatttttttgattgtagtctccagaaatcaccaataaagtatatcgtttaaagtg

SEQ ID NO: 203423 - DNA, 493 bp, Homo sapiens
  Payload ID: 20113
  Gene Name: zinc finger protein 674
  ENST ID: ENST00000518708
  CDS Start-End: 195-493
gttcacactggctgttgtcatccgcccctgaggtttcaggctgtcggcagtgaaggtcagagtgcagacctgagaccactgctcaccgatttcagactccagtttatctgtgcctcggcttccccacttagtcgcagaagacttaggctgaggccccaggaagagatctccatcctttgcaggagcacaacaagatggccatgtcccaggaatcattgaccttcaaggacgtgtttgtggacttcaccctggaggagtggcagcaactggactctgcccagaagaacctctacagggatgtcatgcttgagaactacagccacctggtgtccgtggggcatctagttgggaagccagatgtgatcttcaggttgggaccaggtgacgagtcctggatggcagatggagggaccccggtacggacctgtgcagtagagatggggtttctccatgttcatcaggctggtctcgaactcccagcctcaggtgatct

SEQ ID NO: 203424 - DNA, 2301 bp, Homo sapiens
  Payload ID: 20114
  Gene Name: zinc finger protein 675
  Uniprot ID: Q8TD23
  ENST ID: ENST00000359788
  CDS Start-End: 170-1876
gcttccgggatttggcggcgcctttgtctctcgctgcagccggagctccaggtctcgctttcattgctctgtgtcctctgctcctagaggtccagcctctgtgggcctgtgacctgcagaaattgagagatccacagctaagactccaggaccccctggaagcctagaaatgggactgttgacatttagggatgtggccatagaattctctctggaagaatggcaatgcctggacactgcacagcggaatttatataaaaatgtgattttagagaactacagaaacctggtcttcctgggtattgctgtctctaagcaagacctgatcacctgtctggagcaagaaaaagagcctttgactgtgaagagacatgagatggtgaatgaacccccagtaatgtgttctcattttgcccaagagttttggccagagcagaacataaaagattcttttgaaaaagtgacactgagaagatatgaaaaatgtggaaatgataattttcagttaaaaggctgtaaaagtgtggatgaatgtaagttgcacaagggaggttataatggacttaaccaatgtttaccaactatgcagagcaaaatgtttcaatgtgataaatatgtgaaagtctttaataaattttcacattcagatagacataagataaaacatatggaaaataaacctttcaaatgtaaagaatgtggcagatcattttgcatgctttcacacctaactcgacatgaaagaaattataccaaggtgaatttctgcaaatgtgaagaatgtgaaaaagctgttaaccaatcttcaaagcttactaaacataaaagaatttatacttgtgagaaactctacaaatgtcaagaatgtgacagaacttttaaccaattctcaaaccttactgaatataaaaaagattatgctcgagagaaaccatacaaatgtgaagaatgtggcaaagcctttaaccagtcctcacaccttactacacataagataattcatacaggagagaaaccctacaaatgtgaagaatgtggcaaagcctttaaccagttctcaaatcttactacacataaaaaaattcatactggagagcaaccctacatatgtgaagaatgtggcaaggcttttacccaatcctcaacccttactacacataagagaattcatactggagaaaaaccctacaaatgtgaagaatgtggaaaagcttttaaccgatcctcaaaacttactgaacataaaaacattcatactggagagcaaccctacaaatgtgaggaatgcggcaaagcttttaaccgatcctcaaatcttacggaacataggaaaattcataccgaagagaaaccctacaaatgtaaagaatgtggcaaagcttttaaacactcctcagcccttactacacataagagaattcacactggagagaaaccctacaaatgtgaagaatgtggcaaagcttttaaccgatcctcaaaacttactgaacataagaaacttcatactggaaagaaaccctacaaatgtgaagaatgtggcaaagcttttatccaatcctcaaaacttactgaacataagaaaattcattctggagagataccctacaagtgtgaagaatgtggcaaagcttttaaacactcctcatcccttactacacataaaagaattcatactggggagaaaccctacaaatgtgaagaatgtggcaaagcttttagccgatcctcaaaacttactgaacataagataattcatactggagagaaaccctataaatgtgagagatgtgacaaagcttttaaccaatctgcaaaccttactaaacataaaaaaatacatactggagagaaactacagaactggaatgtgtgataatgattttgacaacacctcaaatttttctaaatataaaggaaatcatactggtgaaaaattctagaaatgtaaagaatgtgtcaaagactttaaatggttttcacacttcattgtatgtaagataattcatactggagaaaactacaagtgtgaagaatttggcaatactgttaattaaggctcaaaccttattgcacaggaaagcgtttatacttaagaaaaattgtacaaatataaagagtgtaaaatagccattaatatctgttgacatcttaatatcagaatgttggtacttaataaaagcattataaatgcaattactgtctaaagactttaagaaaatataagcctttaaagtgaagaagagtattcgttttgaagacaaagattacaaacataaagagggttgtagtacatttact

SEQ ID NO: 203425 - DNA, 592 bp, Homo sapiens
  Payload ID: 20114
  Gene Name: zinc finger protein 675
  ENST ID: ENST00000599168
  CDS Start-End: 188-421
gctggagcagacaagatggcttccgggatttggcggcgcctttgtctctcgctgcagccggagctccaggtctcgctttcattgctctgtgtcctctgctcctagaggtccagcctctgtgggcctgtgacctgcagaaattgagagatccacagctaagactccaggaccccctggaagcctagaaatgggactgttgacatttagggatgtggccatagaattctctctggaagaatggcaatgcctggacactgcacagcggaatttatataaaaatgtgattttagagaactacagaaacctggtcttcctgggtattgctgtctctaagcaagacctgatcacctgtctggagcaagaaaaagagcctttgactgtgaagagacatgagatggtgaatgaacccccaggtaagtgagaatgaaagtgaatacaacaggtgacactgatgagaggtccaaaggtcaaagagaaagccagtccttaaaatgtgatttgggaagccgtgttttaaaggaaataatttctggaaagcctgagtattttatgctctcacatttgagcattttctgtcttatgcttttaaatt

SEQ ID NO: 203426 - DNA, 1444 bp, Homo sapiens
  Payload ID: 20114
  Gene Name: zinc finger protein 675
  ENST ID: ENST00000601935
  CDS Start-End: 165-518
cgggatttggcggcgcctttgtctctcgctgcagccggagctccaggtctcgctttcattgctctgtgtcctctgctcctagaggtccagcctctgtgggcctgtgacctgcagaaattgagagatccacagctaagactccaggaccccctggaagcctagaaatgggactgttgacatttagggatgtggccatagaattctctctggaagaatggcaatgcctggacactgcacagcggaatttatataaaaatgtgattttagagaactacagaaacctggtcttcctgggtattgctgtctctaagcaagacctgatcacctgtctggagcaagaaaaagagcctttgactgtgaagagacatgagatggtgaatgaacccccaggatctgtgggacagacccagcaggtggtgccccatgtaagaagcaatgaaatgcatcatgatggaaccctcaaaaacgaaagtgaagttactgcacaccccttaggtcctctttggattccagcatgatgcatcaaaccttaccacggcatgactagggcccaacctgctaccagaaataaaggaaatgacgatgcagaacccacaaccctggatgatgtggcttccttggatgacacaggccccagacattacctggggaatgctgaagaacacaactcaggaggctgaacaaatctgcttcagacacagataccattcaatccatataatttgttctttgctatgctttttattccacattgcaactcttatagaatactgattcttcttattctctctttttgcctgcaacccacacctgctataaactattgggcccatcttctagatctgcctttcttacggcattttacttgggaaggtacccccttctcagcctctgacaacgtgaccaattggctgggaggtattgacttacccccggtggggtccctcagtaatggcacacattggactcaggtgccaagtaacattacatatcaatccttgattggaaaagaataatattgattatactcatgtttgtcttatgttatttactggttctagggtgcaaagctggaacacaaactgtaaccattgcaccagtcaaacctgtcgctgctcagatctgtatgcttcaatcaacaaaacctgatgcaaaaaaacagaaaaaggggagatgtgggagattggtcagagtggtggaaaaaggatagggaaagaacgcaaattttctgaaatgttggaaggtcctgcagagctccaggggagaatagctgaaggcagctgttctataaccctgaggcagagagcaagcagtaggtacaagggagtgtggaagaatttatcttaaacaggcttatttacttatgttgatcaggaactgacctttgatcatttgcgtgtgtgacattccctgaaaggggaacaataaatgttaattacctgca

SEQ ID NO: 203427 - DNA, 595 bp, Homo sapiens
  Payload ID: 20114
  Gene Name: zinc finger protein 675
  ENST ID: ENST00000597074
  CDS Start-End: 108-374
attgctctgtgtcctctgctcctagaggtccagcctctgtgggcctgtgacctgcagaaattgagagatccacagctaagactccaggaccccctggaagcctagaaatgggactgttgacatttagggatgtggccatagaattctctctggaagaatggcaatgcctggacactgcacagcggaatttatataaaaatgtgattttagagaactacagaaacctggtcttcctgggtattgctgtctctaagcaagacctgatcacctgtctggagcaagaaaaagagcctttgactgtgaagagacatgagatggtgaatgaacccccagccgttgacaaacacccttgcactttctatgagtgtgactaattaagatatctcacataagtggaatcatatagtatccattttgttactggcttacttcagtaatgtgttctcattttgcccaagagttttggccagagcagaacataaaagattcttttgaaaaagtgacactgagaagatatgaaaaatgtggaaatgataattttcagttaaaaggctgtaaaagtgtggatgaatgtaagttgcacaagggaggttat

SEQ ID NO: 203428 - DNA, 543 bp, Homo sapiens
  Payload ID: 20114
  Gene Name: zinc finger protein 675
  ENST ID: ENST00000600313
  CDS Start-End: 180-536
agacaagatggcttccgggatttggcggcgcctttgtctctcgctgcagccggagctccaggtctcgctttcattgctctgtgtcctctgctcctagaggtccagcctctgtgggcctgtgacctgcagaaattgagagatccacagctaagactccaggaccccctggaagcctagaaatgggactgttgacatttagggatgtggccatagaattctctctggaagaatggcaatgcctggacactgcacagcggaatttatataaaaatgtgattttagagaactacagaaacctggtcttcctgggtattgctgtctctaagcaagacctgatcacctgtctggagcaagaaaaagagcctttgactgtgaagagacatgagatggtgaatgaacccccaggtctccctctgatgccgagccgaagctggactgtactgctgccatctctgctcactgcaacctccctgcctgattctcctgcctcagcctgccgagtgcctgcgattgcaggtgcgcgcagccatgcctgactggttt

SEQ ID NO: 203429 - DNA, 721 bp, Homo sapiens
  Payload ID: 20114
  Gene Name: zinc finger protein 675
  ENST ID: ENST00000599535
  CDS Start-End: 408-721
gcactccagcctggttaacaagaccgaaactccgtcttaaaaaatatataaataaataagttaaataaataaataaattatggggatcaccacaaaaatattggagaatttaatcaaagagtgattcaaaaattgtggagcattcagctgtggtttggagcttgtgactttatgagagcagcttgaaggaaagacttttaaagggactgttgacatttagggatgtggccatagaattctctctggaagaatggcaatgcctggacactgcacagcggaatttatataaaaatgtgattttagagaactacagaaacctggtcttcctgggtattgctgtctctaagcaagacctgatcacctgtctggagcaagaaaaagagcctttgactgtgaagagacatgagatggtgaatgaacccccagtaatgtgttctcattttgcccaagagttttggccagagcagaacataaaagattcttttgaaaaagtgacactgagaagatatgaaaaatgtggaaatgataattttcagttaaaaggctgtaaaagtgtggatgaatgtaagttgcacaagggaggttataatggacttaaccaatgtttaccaactatgcagagcaaaatgtttcaatgtgataaatatgtgaaagtctttaataaattttcacattcagatagacataagataaaacatatggaaaataaacctttcaaatg

SEQ ID NO: 203430 - DNA, 669 bp, Homo sapiens
  Payload ID: 20114
  Gene Name: zinc finger protein 675
  ENST ID: ENST00000601010
  CDS Start-End: 156-461
gcggcgcctttgtctctcgctgcagccggagctccaggtctcgctttcattgctctgtgtcctctgctcctagaggtccagcctctgtgggcctgtgacctgcagaaattgagagatccacagctaagactccaggaccccctggaagcctagaaatgggactgttgacatttagggatgtggccatagaattctctctggaagaatggcaatgcctggacactgcacagcggaatttatataaaaatgtgattttagagaactacagaaacctggtcttcctgggtattgctgtctctaagcaagacctgatcacctgtctggagcaagaaaaagagcctttgactgtgaagagacatgagatggtgaatgaacccccagagtctcgccctgtcgtccagcctgaagttcagtggtacaatctctgcttactgcaacctccacctcccaggttcaagtgattctcctgtctcagcctcctgagtagctgggactataggcacatgccaccatgcctgactaatttttgtacttttagtagagatggggtttcaccatgttggccaagctggtcttgaactcctgacctcgtgatccatcttccttggcctcccaaagttctggtacaggtgtgagccacagagcctggcccaaaattgtctttgtttt

SEQ ID NO: 203431 - DNA, 581 bp, Homo sapiens
  Payload ID: 20114
  Gene Name: zinc finger protein 675
  ENST ID: ENST00000596211
  CDS Start-End: 180-419
agacaagatggcttccgggatttggcggcgcctttgtctctcgctgcagccggagctccaggtctcgctttcattgctctgtgtcctctgctcctagaggtccagcctctgtgggcctgtgacctgcagaaattgagagatccacagctaagactccaggaccccctggaagcctagaaatgggactgttgacatttagggatgtggccatagaattctctctggaagaatggcaatgcctggacactgcacagcggaatttatataaaaatgtgattttagagaactacagaaacctggtcttcctgggtattgctgtctctaagcaagacctgatcacctgtctggagcaagaaaaagagcctttgactgtgaagagacatgagatggtgaatgaacccccaggccaaaagcaatagccgatttggataccatcaagacacctgaaaccttatcatgagccagatgccaaggaagagactctgggaggatcccaaggaccccctggttgcagccatgtcaagactgacactgagaaggaccccaactgtcatgagcaacacccattgaacacagccacc

SEQ ID NO: 203432 - DNA, 2944 bp, Homo sapiens
  Payload ID: 20115
  Gene Name: zinc finger protein 676
  Uniprot ID: Q8N7Q3
  ENST ID: ENST00000395385
  CDS Start-End: 319-2085
attacatatacacagatgttatggatcttataccactttcttttctcagagttagagaatacattagtgaacatttctgtgttgaaaactattttattgaataatttcagtcattcatataagtcagaaccagctctctctactctctccattttaccttgagtcacattaaaagttctgcccatgaccaattggtaaatatatgtgtttgtgtgtgttttccagggagcattgacatttagggatgtggccatagaattctctctggaggagtggcaatgcctggattctacacagcagaatttatataggaatgtgatgttagagaactacagaaacctggtcttcctgggtattgctgcctttaagccagacctgatcatttttctggagcaaggaaaagagccctggaatatgaagagacatgagatggtggaagaacccccagttatatgttctcatttttcccaagagttttggccagagcaaggcatagaagattctttccaaaaaatgatattgagaagatatgacaaatgtggacatgagaatttacacttaaaaattagttgtaccaatgtggatgagtgtaacgtgcacaaagaaggttataataaacttaaccagagtttaacaactacacagagcaaagtatttcaatgtggcaaatatgcaaacgtctttcataaatgttcaaattcaaacagacataagataaggcatactggagagaaaggtttgaaatgtaaagaatatgtcagatcattttgcatgctttcacacctatctcaacatgaaagaatttatactagagagaattcctacaaatgtgaagaaaatggcaaagcttttaactggtcctcaacccttacttattataagagtattcatactggagagaaaccctacaaatgtgaagaatgtggcaaagcctttagtaagttctcaatccttactaaacataaggtaattcatactggagagaaaccctacaaatgtgaagaatgtggcaaagcttttaatcgatcctcaatccttactaaacataagataattcatactggagagaaaccctacaaatgtgaagaatgtggcaaaggatttagtagcgtctcaacccttaatacacataaggcaattcatgctgaagagaagccctacaaatgtgaagaatgtggcaaagcttccaactcgtcctcaaagctcatggaacataagagaattcatactggagagaaaccctacaagtgtgaagaatgtggcaaagccttcagctggtcctcaagccttactgaacacaagagaattcatgctggagagaaaccctacaaatgtgaagaatgcgggaaagcttttaatcgatcctcaatccttactaaacataagattattcatactggagagaaaccctacaaatgtgaaggatgtggcaaagcctttagtaaggtctcaacccttaatacacataaggcaattcatgctgaagagaagccctacaaatgtgaagaatgtggcaaagcttccaactcatcctcaaagctcatggaacataagagaattcatactggagagaaaccctacaagtgtgaagaatgtggcaaagccttcagctggtcctcaagccttactgaacacaagagaattcatgctggagagaaaccctacaaatgtgaagaatgtggcaaagccttcacctggtcctcaagctttactaaacacaagagaattcatgctgcagagaaaccttacaaatgtgaagaatgtggcaaaggctttagtacgttctcaatccttactaaacataagataattcatactggagagaaacgctacaaatgtgaagaatgtggcaaagccttcagctggtcctcgatccttactgaacataagataattcatactggagagaaaccctacaaatgtgaagaatgtggcaaagccttcagcagatcctcaagccttactagacacaagagaattcatactggagagaaaccctacaaatgtgaagaatgtggcaaagcttttaagtcatcctcaactgttagttatcataagaaaattcatactggagagaatccctaaaaatgtgaagaatgtggtaaatccttcagctgattctcagtctagtaaacataagaaaattcatactggagagaaaatctacaaaggtgaagaatgtggcaaagcttttaaacagtcctcaatctttattacacataagaaaattcatgctggagagaaacactacaaacgtgaagaatgtgacaaaggcttcaaccggtcctcaaaccttgtggaacataagagaattcatactggagagaaaccctacaaatgcgaagaatgtgataaagacttcaactgttcctcacaccttactactcataaaagaattcatactggaggaaaagccctacaaatgtgaaaaacgtggcaaagcttttcattagttctcaacccttactgaacataagggaatttatacaggagggaaaccctacaaatgtgaagaatgtggcaagccttttagctgttcctcaatccttactaaacattcatgtaattcatactggagggaattcctataattgtgtggaatgtggcaaagcctttaaccagtccttaaggcttactacatataagacaactcatactggagagaaaccatgcatgtgtgaagaatgtgggaaagcctctaacagatcctcaattcttaagaaacataggctaattcatacatgagagactctacaaacctgaaagatgtgacaatgcttttggcaacacctcagacttttctgaatataaaagaaatcatatgaatgagaaatcctagaaatgtgaagaatgtgacaaagcctttaaatggctgtcacacttgattgtaggtaagataatatactggagaaaactactagaataaacaatgtggcacacattt

SEQ ID NO: 203433 - DNA, 2944 bp, Homo sapiens; identical to SEQ ID NO: 203432
  Payload ID: 20115
  Gene Name: zinc finger protein 676
  Uniprot ID: Q8N7Q3
  ENST ID: ENST00000397121
  CDS Start-End: 319-2085

SEQ ID NO: 203434 - DNA, 1848 bp, Homo sapiens
  Payload ID: 20115
  Gene Name: zinc finger protein 676
  ENST ID: ENST00000621741
  CDS Start-End: 70-1776
gtggccctatgacctgcaggtattgggagatccacaactaagtcgccaggaccccctggaagcctagaaatggacaacccgaggtatggaatgcctttcaggagagcaggtgaatgccctggggctgagaggcatctactggtgccctgtttttttggaaagggagcattgacatttagggatgtggccatagaattctctctggaggagtggcaatgcctggattctacacagcagaatttatataggaatgtgatgttagagaactacagaaacctggtcttcctgggtattgctgcctttaagccagacctgatcatttttctggagcaaggaaaagagccctggaatatgaagagacatgagatggtggaagaacccccagttatatgttctcatttttcccaagagttttggccagagcaaggcatagaagattctttccaaaaaatgatattgagaagatatgacaaatgtggacatgagaatttacacttaaaaattagttgtaccaatgtggatgagtgtaacgtgcacaaagaaggttataataaacttaaccagagtttaacaactacacagagcaaagtatttcaatgtggcaaatatgcaaacgtctttcataaatgttcaaattcaaacagacataagataaggcatactggagagaaaggtttgaaatgtaaagaatatgtcagatcattttgcatgctttcacacctatctcaacatgaaagaatttatactagagagaattcctacaaatgtgaagaaaatggcaaagcttttaactggtcctcaacccttacttattataagagtattcatactggagagaaaccctacaaatgtgaagaatgtggcaaagcctttagtaagttctcaatccttactaaacataaggtaattcatactggagagaaaccctacaaatgtgaagaatgtggcaaagcttttaatcgatcctcaatccttactaaacataagataattcatactggagagaaaccctacaaatgtgaagaatgtggcaaaggatttagtagcgtctcaacccttaatacacataagagaattcatactggagagaaaccctacaagtgtgaagaatgtggcaaagccttcagctggtcctcaagccttactgaacacaagagaattcatgctggagagaaaccctacaaatgtgaagaatgcgggaaagcttttaatcgatcctcaatccttactaaacataagattattcatactggagagaaaccctacaaatgtgaaggatgtggcaaagcctttagtaaggtctcaacccttaatacacataagagaattcatactggagagaaaccctacaagtgtgaagaatgtggcaaagccttcagctggtcctcaagccttactgaacacaagagaattcatgctggagagaaaccctacaaatgtgaagaatgtggcaaagccttcacctggtcctcaagctttactaaacacaagagaattcatgctgcagagaaaccttacaaatgtgaagaatgtggcaaaggctttagtacgttctcaatccttactaaacataagataattcatactggagagaaacgctacaaatgtgaagaatgtggcaaagccttcagctggtcctcgatccttactgaacataagataattcatactggagagaaaccctacaaatgtgaagaatgtggcaaagccttcagcagatcctcaagccttactacacaagagaattcatactggagagaaaccctacaaatgtgaagaatgtggcaaagcttttaagtcatcctcaactgttagttatcataagaaaattcatactggagagaatcc

SEQ ID NO: 203435 - DNA, 3422 bp, Homo sapiens
  Payload ID: 20116
  Gene Name: zinc finger protein 677
  Uniprot ID: Q86XU0
  ENST ID: ENST00000333952
  CDS Start-End: 81-1835
taaacaacatatttttgacatacagactgacttacctgagaaagaaactcagaggaagaggaaagaaagaagaggagggaatggctctttctcagggactgtttacattcaaggatgtggccatagaattctctcaagaggagtgggagtgcctggaccctgcccagagggccttgtacagggacgtgatgttggagaactacaggaacctgctttctctcgatgaggataacatccctccagaagatgatatttctgttggatttacaagcaagggattatcaccaaaggaaaataataaagaggaattataccatctggtgatattagaaagaaaggaaagccatggcatcaacaattttgacctcaaggaagtctgggaaaatatgcctaagtttgacagcctgtgggactatgatgtaaaaaattacaaaggaatgcctttgacctgtaacaaaaatctcactcacagaaaagatcaacaacataataaatcctcaatacatttctctttaaagcagagtgtttctataagagatagtgcacaccagtatttcatccatgacaagccatttataaggaatttgttaaaactgaaaaataacataaggtatgccggaaacaaatacgtgaagtgttttgaaaataaaattggattaagcttacaggcacagctggctgaactacagagatttcaaactggggagaaaatgtatgaatgtaatccagttgagaagtctatcaatagttcctcagtttcaccacttcctccttgtgtcaaaaacatttgtaataaatataggaagattttgaaataccctttattacatacacagtatgggagaacacacattagagaaaaatcatacaagtgtaatgactgtggaaaggcttttagcaaaagttcgaacctcactaatcatcagagaattcactctggacagagaccttacaaatgtaacgagtgtggcaaagcctttaaccagtgttcgaacctcactaggcatcagagagtccatacaggagagaaaccatatcaatgtaatatatgtggcaaggtctgtagtcaaaattcaaatcttgcaagtcatcagaggatgcatactggagagaaaccttacaaatgtaatgaatgtggtaaggcatttatccagcgttcacacctttggggtcatgaaagaattcatactggagagaaaccttacaaatgtaatgaatgtgacaaagcctttgctgaacgttcaagccttacccaacataagagaatccatactggagagaagccttacatatgtaatgagtgtggcaaagcttttaagcagtgctcacatctcactaggcatcagaatatacatcctggagagaaaccacacaaatgtaatgtgtgtggcagggcttttatccaaagttcaagtcttgtggaacatcagagaattcacactggagaaaaaccttacaaatgtaataaatgtgataaagcttttatcaaacgttcacacctttggggtcatcagagaactcatactggagagaaaccttacaaatgtactgaatgtggcaaagcctttactgaacgttcaaatcttactcagcataagaaaatccatactggagagaaaccttacaaatgtactgaatgtggcaaagcttttacccaatttgcaaacctcactagacaccagaaaatacacattgaaaagaaacattgtaaacataatatacatggtaatgctttattccaaagttcaaaccttggagatcatcaaaaaagttataatagagaaaaacatatcaaatataatgagacaaaaattaagtattcaagctgtacctagcatcaggggctccattgtgaaaagaaaccatataaaacgaaaatgtggtaaagcctttagctatggcttatgtctcacttgataccagaatatacatctttgagataaaccacacaaagataacatgtatggcaaggcttatccaaagttcaagccttgtggaacatcatagaattcttactgtagagaagccttacaaatataatgaatgtgaacagctttataaaaatatttaccctattatggttataacagaagacattcaggatggaaaccatacaaatgtggcaagtcctttaagcaatgttctgacttcaggatacaccattcatattggagagaagcattacaagtgaaggtggtaaattattttaaatttctcaatggaaattcatccttatatgcaagcattttgtcatacaaaaattcaggctagagggaactaagtcttttttccttcttgaagattaagtgattgatgttaaattcacagacaattttaaaaagtcacaaactcatggtgtgtgtcagaggagcaaggacatctgtggaaagatgtaacttcagtgttaaaaattttttattcagttatttcatatttttaaaagtatgaaatctgttgctgttaaatcttcatggcatgcttttcatttatcatgattgtctcaaggaatggatgtaagatggaagggactacttccttaggtgtggcttctttatattactgaaacctggaaaaagcaagaacactaattttttctttttttggagacagagtcttgctctgtcacccaggctggagtgcagtggcaccatctcagctcactgcaacctctgtctcccgggttcaagcaattctcctgcctcagcctcacgagtagctgggattacaggcatgcgccatcatgcctggctagttttttgtttttttgtttttgtatttttagtagagacagagtttcgccatgttggccaggctgatcttgaactcctgacctcaggtgatccacctgccttggcctcccaaagtgctgggattacaggcatgagccaccgtgcccagccaagaacactaatatacaatatactataagagcatgggggtttgtgccagaagagaggtaaaactattgtctaacatatatgctttatgtggtcaggaccccttagaattgttgatgtgactggggacctttgtcgattataggagagattggttacagtacaagatgaccatgaaacaagaagagtagggtgggacattgagagattttcatggaagtgaaatggtcggttactagagactgcatatgtggtagaaagaaatggagggggaatgatagtcaccctctcttgaaaggtagttactgttgcatatcacagattattgaacatagataggtcttatttttggaaactgaagagagaatggttaccatagaggacagttccatcaaaagaaccagagtagtgttcttataggggattcacatttggcccctgagattgcatttgataccattttatttagaatatattatacttcttatgtcttaattagtaaaatataatcatttttagtaaccc

SEQ ID NO: 203436 - DNA, 3497 bp, Homo sapiens
  Payload ID: 20116
  Gene Name: zinc finger protein 677
  Uniprot ID: Q86XU0
  ENST ID: ENST00000598513
  CDS Start-End: 152-1906
ctcgcggggctactggcgctctcggcccacacaatatgacctcggggaggatgcgaggaagatgaactgtgatgatccacttcttcttaatgaatgactgacttacctgagaaagaaactcagaggaagaggaaagaaagaagaggagggaatggctctttctcagggactgtttacattcaaggatgtggccatagaattctctcaagaggagtgggagtgcctggaccctgcccagagggccttgtacagggacgtgatgttggagaactacaggaacctgctttctctcgatgaggataacatccctccagaagatgatatttctgttggatttacaagcaagggattatcaccaaaggaaaataataaagaggaattataccatctggtgatattagaaagaaaggaaagccatggcatcaacaattttgacctcaaggaagtctgggaaaatatgcctaagtttgacagcctgtgggactatgatgtaaaaaattacaaaggaatgcctttgacctgtaacaaaaatctcactcacagaaaagatcaacaacataataaatcctcaatacatttctctttaaagcagagtgtttctataagagatagtgcacaccagtatttcatccatgacaagccatttataaggaatttgttaaaactgaaaaataacataaggtatgccggaaacaaatacgtgaagtgttttgaaaataaaattggattaagcttacaggcacagctggctgaactacagagatttcaaactggggagaaaatgtatgaatgtaatccagttgagaagtctatcaatagttcctcagtttcaccacttcctccttgtgtcaaaaacatttgtaataaatataggaagattttgaaataccctttattacatacacagtatgggagaacacacattagagaaaaatcatacaagtgtaatgactgtggaaaggcttttagcaaaagttcgaacctcactaatcatcagagaattcactctggacagagaccttacaaatgtaacgagtgtggcaaagcctttaaccagtgttcgaacctcactaggcatcagagagtccatacaggagagaaaccatatcaatgtaatatatgtggcaaggtctgtagtcaaaattcaaatcttgcaagtcatcagaggatgcatactggagagaaaccttacaaatgtaatgaatgtggtaaggcatttatccagcgttcacacctttggggtcatgaaagaattcatactggagagaaaccttacaaatgtaatgaatgtgacaaagcctttgctgaacgttcaagccttacccaacataagagaatccatactggagagaagccttacatatgtaatgagtgtggcaaagcttttaagcagtgctcacatctcactaggcatcagaatatacatcctggagagaaaccacacaaatgtaatgtgtgtggcagggcttttatccaaagttcaagtcttgtggaacatcagagaattcacactggagaaaaaccttacaaatgtaataaatgtgataaagcttttatcaaacgttcacacctttggggtcatcagagaactcatactggagagaaaccttacaaatgtactgaatgtggcaaagcctttactgaacgttcaaatcttactcagcataagaaaatccatactggagagaaaccttacaaatgtactgaatgtggcaaagcttttacccaatttgcaaacctcactagacaccagaaaatacacattgaaaagaaacattgtaaacataatatacatggtaatgctttattccaaagttcaaaccttggagatcatcaaaaaagttataatagagaaaaacatatcaaatataatgagacaaaaattaagtattcaagctgtacctagcatcaggggctccattgtgaaaagaaaccatataaaacgaaaatgtggtaaagcctttagctatggcttatgtctcacttgataccagaatatacatctttgagataaaccacacaaagataacatgtatggcaaggcttatccaaagttcaagccttgtggaacatcatagaattcttactgtagagaagccttacaaatataatgaatgtgaacagctttataaaaatatttaccctattatggttataacagaagacattcaggatggaaaccatacaaatgtggcaagtcctttaagcaatgttctgacttcaggatacaccattcatattggagagaagcattacaagtgaaggtggtaaattattttaaatttctcaatggaaattcatccttatatgcaagcattttgtcatacaaaaattcaggctagagggaactaagtcttttttccttcttgaagattaagtgattgatgttaaattcacagacaattttaaaaagtcacaaactcatggtgtgtgtcagaggagcaaggacatctgtggaaagatgtaacttcagtgttaaaaattttttattcagttatttcatatttttaaaagtatgaaatctgttgctgttaaatcttcatggcatgcttttcatttatcatgattgtctcaaggaatggatgtaagatggaagggactacttccttaggtgtggcttctttatattactgaaacctggaaaaagcaagaacactaattttttctttttttggagacagagtcttgctctgtcacccaggctggagtgcagtggcaccatctcagctcactgcaacctctgtctcccgggttcaagcaattctcctgcctcagcctcacgagtagctgggattacaggcatgcgccatcatgcctggctagttttttgtttttttgtttttgtatttttagtagagacagagtttcgccatgttggccaggctgatcttgaactcctgacctcaggtgatccacctgccttggcctcccaaagtgctgggattacaggcatgagccaccgtgcccagccaagaacactaatatacaatatactataagagcatgggggtttgtgccagaagagaggtaaaactattgtctaacatatatgctttatgtggtcaggaccccttagaattgttgatgtgactggggacctttgtcgattataggagagattggttacagtacaagatgaccatgaaacaagaagagtagggtgggacattgagagattttcatggaagtgaaatggtcggttactagagactgcatatgtggtagaaagaaatggagggggaatgatagtcaccctctcttgaaaggtagttactgttgcatatcacagattattgaacatagataggtcttatttttggaaactgaagagagaatggttaccatagaggacagttccatcaaaagaaccagagtagtgttcttataggggattcacatttggcccctgagattgcatttgataccattttatttagaatatattatacttcttatgtcttaattagtaaaatataatcatttttagtaaccctgaa

SEQ ID NO: 203437 - DNA, 796 bp, Homo sapiens
  Payload ID: 20116
  Gene Name: zinc finger protein 677
  ENST ID: ENST00000599012
  CDS Start-End: 154-387
atctcgcggggctactggcgctctcggcccacacaatatgacctcggggaggatgcgaggaagatgaactgtgatgatccacttcttcttaatgaatgactgacttacctgagaaagaaactcagaggaagaggaaagaaagaagaggagggaatggctctttctcagggactgtttacattcaaggatgtggccatagaattctctcaagaggagtgggagtgcctggaccctgcccagagggccttgtacagggacgtgatgttggagaactacaggaacctgctttctctcgatgaggataacatccctccagaagatggcgatggacaacttttggtggactctcccatggaagaggtttccttggtgacagaacattcttgaaagagaacattaattaatctgtcacagtatcattctgctacatagaggtgcctcttgaagccactgagtagagtagcctgcatgtcccagtatgctgagagagaatcaggacagccggagggataagtgcttctgaccttctggtttctgtggagtttccagtgtctcccaagggcagtgtgacaacgctggttagatatatgctgatcatcctcttggagccagcagtacaaggtgtaggagtttctcctgggaagagcattctccaagttctcaacctcatatctgcgaacatgttgaccaaactgttgctcataccacattattcatcccatacgtgcagttgtacatttttcttcagtatgatttttatgcctttattgagggagcttacaaagttgaattaggc

SEQ ID NO: 203438 - DNA, 701 bp, Homo sapiens
  Payload ID: 20116
  Gene Name: zinc finger protein 677
  ENST ID: ENST00000598806
  CDS Start-End: 173-388
cctgccgacccggaagcggatctcgcggggctactggcgctctcggcccacacaatatgacctcggggaggatgcgaggaagatgaactgtgatgatccacttcttcttaatgaatgactgacttacctgagaaagaaactcagaggaagaggaaagaaagaagaggagggaatggctctttctcagggactgtttacattcaaggatgtggccatagaattctctcaagaggagtgggagtgcctggaccctgcccagagggccttgtacagggacgtgatgttggagaactacaggaacctgctttctctcgatgaggataacatccctccagaagatggttctcaccttgcagcctgtggacagagcacactgcctcttccttagaatcctacaaaatccgacccttttattttactcccgtaccttttatttctctcccttttctagctttctactctatccgggaacttagggagaccttagtcttcctgattccatattcttctaagatttgcctctgaaagttgcttttgaaatacacattccggatgggcgtggtgcctcacgcctataatcccagcactttgggaggccgaggtgggcagatcacctgaggtcgggagttcgagaccagcctgactaacatggaaaaaccccgtctctactaaaaatacaaaaattagccgggtgtgttggc

SEQ ID NO: 203439 - DNA, 719 bp, Homo sapiens
  Payload ID: 20116
  Gene Name: zinc finger protein 677
  ENST ID: ENST00000601828
  CDS Start-End: 140-346
ctggcgctctcggcccacacaatatgacctcggggaggatgcgaggaagatgaactgtgatgatccacttcttcttaatgaatgactgacttacctgagaaagaaactcagaggaagaggaaagaaagaagaggagggaatggctctttctcagggactgtttacattcaaggatgtggccatagaattctctcaagaggagtgggagtgcctggaccctgcccagagggccttgtacagggacgtgatgttggagaactacaggaacctgctttctctcgatgaggataacatccctccagaagatggtaaccacccttgtacatctttacatttttccttgtgagtctcttgggaggccctgatgtgcttgtctgaatccgatccctgttctaaaaggggagattgaaactttttgattgagagtggaaaggcttcataatgtagcatatagactttaaacttcccctttcttcagaagttctgcgcataatcaggtttgacgagtggtggttccagaatatcagtacttacaaaaccttatggaaaacgttttaaagtgtctggtatcatggttttatccctgtgcctttgattcagtagttttttcagagtctgcatatttaaaataatccctaagcattcagaagaaggcagtccgttgactaatttatgaaattgttttgggaaatagttttgcagacccatgtgtaatgtcc

SEQ ID NO: 203440 - DNA, 935 bp, Homo sapiens
  Payload ID: 20116
  Gene Name: zinc finger protein 677
  ENST ID: ENST00000594681
  CDS Start-End: 360-602
gagtctccgtctttcgggttcaagcctgcgcctcgcgggccacaggttcccacgctccgctgtcgggttttggggtcgccctgtaggttaaaaccccgaacctgctcattcctctcgcggcgtggccctaagacgttcccagtcccgtcgctccgagagggtctagagatctgcgtccatttcggattaaaatcgttctgaagtgggtactggccccgacctttttgctttagcccacacaatatgacctcggggaggatgcgaggaagatgaactgtgatgatccacttcttcttaatgaatgactgacttacctgagaaagaaactcagaggaagaggaaagaaagaagaggagggaatggctctttctcagggactgtttacattcaaggatgtggccatagaattctctcaagaggagtgggagtgcctggaccctgcccagagggccttgtacagggacgtgatgttggagaactacaggaacctgctttctctcgatgaggataacatccctccagaagatgctttctactctatccgggaacttagggagaccttagtcttcctgattccatattcttctaagatttgcctctgaaagttgcttttgaaatacacattccggatgggcgtggtgcctcacgcctataatcccagcactttgggaggccgaggtgggcagatcacctgaggtcgggagttcgagaccagcctgactaacatggaaaaaccccgtctctactaaaaatacaaaaattagccgggtgtgttggcgcatgcctgtaataccagctgctcgggaggctgaggcaggagagttgcttgaacccgagaggcagaggttgtggtgagccgagatcacgccattgcactccagcctgggcaacaagagcaaaactccatctcgaaaaaaaaaaaaagaaaaagaaaa

SEQ ID NO: 203441 - DNA, 622 bp, Homo sapiens
  Payload ID: 20116
  Gene Name: zinc finger protein 677
  ENST ID: ENST00000594517
  CDS Start-End: 186-622
cccgtcgctccgagagggtctagagatctgcgtccatttcggattaaaatcgttctgaacccacacaatatgacctcggggaggatgcgaggaagatgaactgtgatgatccacttcttcttaatgaatgactgacttacctgagaaagaaactcagaggaagaggaaagaaagaagaggagggaatggctctttctcagggactgtttacattcaaggatgtggccatagaattctctcaagaggagtgggagtgcctggaccctgcccagagggccttgtacagggacgtgatgttggagaactacaggaacctgctttctctcgatgaggataacatccctccagaagatgatatttctgttggatttacaagcaagggattatcaccaaaggaaaataataaagaggaattataccatctggtgatattagaaagaaaggaaagccatggcatcaacaattttgacctcaaggaagtctgggaaaatatgcctaagtttgacagcctgtgggactatgatgtaaaaaattacaaaggaatgcctttgacctgtaacaaaaatctcactcacagaaaagatcaacaacataataaatcctcaatacatttctctttaaa

SEQ ID NO: 203442 - DNA, 706 bp, Homo sapiens
  Payload ID: 20116
  Gene Name: zinc finger protein 677
  ENST ID: ENST00000601413
  CDS Start-End: 350-556
ctttcgggttcaagcctgcgcctcgcgggccacaggttcccacgctccgctgtcgggttttggggtcgccctgtaggttaaaaccccgaacctgctcattcctctcgcggcgtggccctaagacgttcccagtcccgtcgctccgagagggtctagagatctgcgtccatttcggattaaaatcgttctgaagtgggtactggccccgacctttttgctttagcccacacaatatgacctcggggaggatgcgaggaagatgaactgtgatgatccacttcttcttaatgaatgactgacttacctgagaaagaaactcagaggaagaggaaagaaagaagaggagggaatggctctttctcagggactgtttacattcaaggatgtggccatagaattctctcaagaggagtgggagtgcctggaccctgcccagagggccttgtacagggacgtgatgttggagaactacaggaacctgctttctctcgatgaggataacatccctccagaagatggtaaccacccttgtacatctttacatttttccttgtgagtctcttgggaggccctgatgtgcttgtctgaatccgatccctgttctaaaaggggagattgaaactttttgattgagagtggaaaggcttcataatgtagcatatagactttaaacttcccctttcttcagaagttctgcgcataatca

SEQ ID NO: 203443 - DNA, 8556 bp, Homo sapiens
  Payload ID: 20117
  Gene Name: zinc finger protein 678
  Uniprot ID: Q5SXM1
  ENST ID: ENST00000343776
  CDS Start-End: 346-1923
gatctggcggggcctttgtcttgtgctccagctggagctttggtcccgtattctcggctatttatccccagctgcgggaggccctggtgactctgctgctgcagtgtctggtttccctgtgacctgcaggtactgggagttacatagctaagatgccaggacaccccgaaagccggaaaacgggactactggcattcagtgatgtggtcatagaattctctccagaggagtgggcatgcctggaccctgcccagcgaaatttgtatagggatgtgatgttcgagaactacagaaacctggtctccctgggacttccaggactatgttaaaatagaagcattgataatgggcacaatatcactttgcattggtgtctgtgcatttgaaggagcaaacacctctaccagtttttataaactggtttatacagctattttatcttattccattcaagaccttttgccagagcaggatatgaaagatttatgccaaaaagtgacactgacaagacatagaagctggggccttgacaatttgcacttagtgaaagactggagaactgtgaatgaaggtaaggggcagaaagaatattgcaatagacttactcaatgttcatcaactaaaagcaaaatctttcaatgtattgaatgtggcagaaattttagctggaggtcaatccttactgaacataagagaattcatactggagagaagccatacaaatgtgaagaatgtggcaaagttttcaatcgatgttcaaacctaacaaaacataaaagaattcatactggagagaaaccctacaaatgtgacgaatgtggcaaagtttttaattggtggtcacaactaactaaccataagaaaattcatactggagagaaaccctacaaatgtgatgaatgtgacaaagtttttaattggtggtcacaactaactagccataagaaaattcatagtggagagaaaccatacccatgtgaagaatgtggcaaagcctttacccagttctcaaaccttacacaacataagagaattcatactggagagaaaccctacaaatgcaaagaatgttgcaaagcctttaacaagttctcaaaccttactcaacataagagaattcatactggagagaaaccttacaagtgtgaagaatgtggcaacgtttttaatgagtgctcacacctaactagacataggagaattcatactggagagaaaccctacaaatgtgaagaatgtggcaaagcctttacacagtttgcaagccttactcgtcataaaagaattcatactggagaaaaaccctaccaatgtgaagaatgtggcaaaacttttaatcggtgttcacacctaagtagccataagagaattcatactggagagaaaccctacaaatgtgaagaatgtggcagaacctttactcaattctcaaacctcactcagcataaaagaattcatactggagagaaaccctacaaatgcaaagaatgtggcaaagcgtttaacaagttctcaagccttactcaacataggagaattcatactggagtgaaaccctacaaatgtgaagaatgtgggaaagtttttaaacagtgctctcacctaactagccataagagaattcatactggagagaaaccctacaaatgtaaagaatgtggcaaagctttttaccaatcctcaatccttagtaagcataagagaattcatactgaagagaaaccctacaaatgtgaagaatgtggcaaagcctttaaccagttctcaagccttactcgtcataaaagaattcatactggagagaaacgctacaaatgtaaagaatgtggaaaaggtttttaccaatcctcaatccatagtaagtataagagaatttatactggagaggaacctgacaaatgtaaaaaatgtggcagtctttaaaaactgcttcattatacatggcttcactaatttcatactgaataaaagtggtatgagcataatgactgtttaaggatgtttcacaaaatgtaagcttcagagtgcacaacactatactgaatgaaatttataaatataaaagattacaatatctttatttcaaagatcttcctgtaaacagaatctgtactagaggaaaaacccttaaacaattattcagactttattcaactttagaggattttacgggggcaaaaaacctcctacaaatgtggaaaaacattttttcaagatatatgccttagaaaacaccagagtttatagtatagtagaatatattttacagatacagtgaatacaaacaaatgtccaaaattaagtctaaataaaacattacataatttactgtagaaagtactaaggcactaacagtttcagatgttactttaaagcagtgttgattgtcgagaataattcaaagttaaaatagataatttagttgtatgtaaatttaaatgaatcaagagatgatgtctttttgaagcacagttacattcatgttatacttttttgcattaaaagtttttatatttttgattatatattttaatattgatataattcatatctcaaataacttgatttttattatatttattgtttatgttaaagtatgtggtcagttgttgctgcataagagctatgagaagttcttctatattagatgaccatcatttatatgctttttcatgaatgattaagggcaccgaaatgtaacatttataaggaaaatctaagtagaaatgctttttgttgatgtataacagtgttttaagtaacacattaggtattcagagaagtattttgcattatagtaatagggaaacattttgaatttcagtagtaaattgttttatgagttgcacattaagataatacagtagcttttgaaatgttatttttagaatgcaatttcttttcataaaacaaaattatttttaatgtgttaagaatattttgcattgaatgaagtatatcttgccacaataattaacctataccaccttacccaaagttgtaggtaacagatagtaacaatacactactgggtaacagtgaaaggacacctctagtaatctcttttcccagtggcttttaatttcaaacaacttggggaggttttttttatgtgatatgctttggtttttttgtgccttacctcatgttgaaatgtgttcccccatgttggaggcggggtctagtggaaggtgtttaggtcatgggtgtagattactcatgaatggattggtgttcttaccactgcagttagtgtgttctctgttagttcatgtgaaagctggttgttaaaaacaaaaacaaacaaacaaaaaactgatattcctcttgctttgtcttttgccatgatacccctttgccttttattatgcataaaagcttcctgaggcctcatcagaagttaagcagatgttgatgtcatgcttgtatagccaacagaactgaggctaataaacctcttttctgtattaatttgccagtgttaagtattcccttctagcagcacaaaatggactaacatcccataggttatatttttatttttttcttttgtaaatactggacaatgatactcttatataatcttcagtataaccattataattgcccactataaaggagtataatgaaaggccatgtattttgaatcacgaatgactatttacaaaatgtcatactacgtttttctttgagcctgtgacccctctggcctgtaaaaacacatacatacatttagttttgattaacatggagttaattttataagtctgtcactctaaacataagtgttagctttaagagaattacagagcatgtaattgtgtttgagtgtaggtgtgtacttttttgagaagaaaacaaaaatattggaacaaaatataatttaaaaagtattggtaatttactagcaaactaggaatctcaaagattctgaaagtaaatatttattctctgctttgtattgaatttacttctgtaaaatcttatggctgctggctcagaatcttctcatgcaaatcctgtttttttcttgtctgttgatcatactaaacctaatgtatagttttctcattccaaagttcatgaaattttctctatattcctgagaaattctaagaataactttcataaaatgtattgatgttcacaagataattttaagatgtaattctacaatatgtgtgttactacattttatttaattagtatattttatttttgtatttcaattggagaaccctattttggccaatttttacttggtttttgtttccattttaatattttacataattgaatttttttcactttattgagccattttgtttagatgtacactgggaaggcttcataattcacaaagttgttttgacatataaatgaggtgaacaaacacaggaaagtgctaggtttcctgggggtataatagatgctctataattagcagtaaatattcttgtttaagtcactttttggctacaagtaagagattagaaatattcagcataaagagatggcattaactctgcatgtaaagaaaacacatgtatacccaggctgtacaactgcctctgaaattaagaggaattgtgtttatttcatagttatctctggtacttcactgttattttattttcacccccaactatgcgtcaatcatagccctttcccttctttgcttattatggctacagatttctcactgttctctgcagcccatgtaatttcatacagtattttgtaggttgtgataaggaatttgaaatttttaatatagtgaaaaattggatttaactggagagtttgaggacatttttaagttagaaatgcaccatttgaatcatttaattggcataattgggatgtactctacacagtttataggattaaattactgagttagtaatgtttgtatgaaagaaatgttattagattctaccacaaaatatagtaaacatgaaatcagttagaataggtaaagcattaataatggtaggctatatatcataatcactatataaagaaacatcagaatttggaaaccccttaagcaaaaatatatcttagaaatcttaaggacacttaatggcaagcaaaaaagtttaaatttagttttttataaattacatatagcacaatttatgtgtacatgtagaatcttttagtttttagtgtttatgtaatatattagacaataataaacatttacatttatgtttacatttatatttaatttttcaaatttaatttaaatttctaaatgcttctgtggatttaaattttggaataatcttttcttccccattgatactggaatcttgggaagtttcttactcatatcacaatatgttttatttaaatggatgcagcttacattgcagagtttatataaataatcacataacaagccaattccttagtcattttctgtattaaaaaactcagagatctagagagcttttggattgaaatatttccttggtgattttggatgcaaacctgatttctgtgttcacaccatggccagagatgggactgttagcaccacctgcttctttaatgtcgtccatatgatcagcatcagcaccagaaactccaggtgtcccaaacttaaagtgaaagccatagagtcctttggtgactcccatgttctgtgctggttctagaacatgctggtaaatatcagagtttctatgcttatggctgataagtagacatttttaaaaatcataaaaactgtattttctatatagttcagctaagtttatgaaaaagatgcagactcagtatttggagcattgctatcgctccatgatgtgtttaaaaattatttttaaattgacaaaattttatatctacatatatatatatcttgtaacacatgatgtttgaaatgcttaattctagccaattaaaaatgctttacctcaatagttatttttattgtgagaaaggtcaacatggtcttggcacttaaaaaaaaaaaaacaatatattctcaataactgtattcactctgcactacaataggtctcttgaactaattcctcctagctaacaggcattgtttatcatttaacagataattctctaagcccccttctcctaaaacttcagcatctcttaaccttctttctagtctctacttttatgagatcaacttgtttagattccacgtgagtgagaccatgaggtattcatctttctgtgttctgctccattggtctatttatctgtttttaatgccagtattggactgtttcagttactgtagctttgcagtatatttgactgtcaagtagtgcagtgcttccaaccttcagagtcttttactgtactatatgaatttttgtgttttttttgtgaaaaattttattgatattttgatagacattatgttaaatatatacatcattttgtgtaacatagactttttagcaatattaatttggccaatttatgaataagggataacttttcatttatttatgtttaattttatacctcagttttctttagcttttaatgtagagatctttaacatttttgaataattttatttggaagtaaactttctgtaactattgcaggtgtcaattgttttctttatttctttttcagatagtttgttgttagtgtatagaaatgctactgacccttatatcttgattttgtatcctgcaactttagtgaatttattctaagtatttttaaagttttctatttataagactatgatatctgcaaacagggacaattattttctttctttccaatttggttgtctttggttttgttttctaatttctctggcctggaaattcagtagcatgttaaataagagtgatgaagttagatatatttgccttactataactcttagaaaaaaggcttacaacttttgaaggtttagcatgatgtcagatgtccatttgtcatatatggcctttattggcttgaggtatgtatgttctatatgtaatttgttttgagattttgtcataaagtaatgttgaattttctaaaattctttttctgcattcacttaaaagttataattggttctgagatccttcatctttctcagaatctaggaggatgcatctgtacctagaggaggacacaaaggcatcatatgttacattctcgtgacatataatgtctactgcttataatgtctactgtgagtttctgactccccaaatgaaattgaggcccagaaactttcaactgctttgttcgttgaataatgccaagtgtctggaaatgtgactattcagattaaatgcttaatgtgtgtgtgttgactaaataaatctcaaccagaaccttctcagatattttgttgaacgtgggacctttgtttttttttgttgttttgttttgttttgtttttgttgttgttgttgttgttgtttaccagcaggggacccctgttttgtctatgtcaagaacaaagaccaggcaaaagaaatgtcaagccgcatttacaaatgcaaaaatggacttgtttttgatatgcttttcccaacaataagggacatgagtcattggggcatgttacagagagtttcagtaaaattcagaaaaaaataataaatatgaacagccacagcatgcccagaagcctttttatggagccaggcatggttgacctgctttccatgtctcaaaacattagtccctacaagaaccctatgaggtttatcttcttttcacccattttgagagaagaaaagttcagctcagagagctgcaggaacattggggacatctccaagtcacagccaataggtggcagtcatcagtgtgtcttggaagggacaaacattgagcttctgaacagctactccagaaactatggtgctgtggtgaagtcctggttaggagcctaggaaaatggtgaaggaaaagatggtcccagcctgcaaagctgaagtcaggaacccaccaggatctcccttctccctagcctggtggtccacatcatgcagatttactctagattcagcttagactcatttttatactactcgggggacaaggagggaactacagtcagtaacagcagcatgagcctcaggtgctttggggattgaaattcagaccaggaaattccaatacatcagtgcatgtggaggacatgagtatttaaggagaaggttctaggcttccgaagtaaaattggatgtggaggttggggattgattcaaacattaatactttcaagcgtttctatggtatttgtcagctgtggagcaacagcacacatctgtattaatagcctgtgttaagagattactgtgaatcctgaaaaacatcctcattgtagagatgagaaaacacaggcttttgcacatccaatgtctccttaaagcatgtggttcagaattgagaacgtgcagagtgagagtggtatgaattttcctgtaagctacctgaagttctgtttgctgtcatgtggaagaaaagagccttggagaagttttatttttttctgtttggaaagaatacacagagcaagatgatttacaataaaccttttgacctaacgca

SEQ ID NO: 203444 - DNA, 798 bp, Homo sapiens
  Payload ID: 20117
  Gene Name: zinc finger protein 678
  ENST ID: ENST00000440339
  CDS Start-End: 116-798
ctttggtcccgtattctcggctatttatccccagctgcgggaggccctggtgactctgctgctgcagtgtctggtttccctgtgacctgcaggtactgggagttacatagctaagatgccaggacaccccgaaagccggaaaacgagacgcattctcactatgttgcccaggctggtcttgaactccttccctcaagtgattcttctgcctaatcctcccaaagttcttagattacagggactactggcattcagtgatgtggtcatagaattctctccagaggagtgggcatgcctggaccctgcccagcgaaatttgtatagggatgtgatgttcgagaactacagaaacctggtctccctggctattttatcttattccattcaagaccttttgccagagcaggatatgaaagatttatgccaaaaagtgacactgacaagacatagaagctggggccttgacaatttgcacttagtgaaagactggagaactgtgaatgaaggtaaggggcagaaagaatattgcaatagacttactcaatgttcatcaactaaaagcaaaatctttcaatgtattgaatgtggcagaaattttagctggaggtcaatccttactgaacataagagaattcatactggagagaagccatacaaatgtgaagaatgtggcaaagttttcaatcgatgttcaaacctaacaaaacataaaagaattcatactggagagaaaccctacaaatgtgacgaatgtggcaaagtttttaattggtggtcacaactaactaaccataagaa

SEQ ID NO: 203445 - DNA, 8212 bp, Homo sapiens
  Payload ID: 20117
  Gene Name: zinc finger protein 678
  Uniprot ID: Q5SXM1
  ENST ID: ENST00000397097
  CDS Start-End: 1-1578
atgggcacaatatcactttgcattggtgtctgtgcatttgaaggagcaaacacctctaccagtttttataaactggtttatacagctattttatcttattccattcaagaccttttgccagagcaggatatgaaagatttatgccaaaaagtgacactgacaagacatagaagctggggccttgacaatttgcacttagtgaaagactggagaactgtgaatgaaggtaaggggcagaaagaatattgcaatagacttactcaatgttcatcaactaaaagcaaaatctttcaatgtattgaatgtggcagaaattttagctggaggtcaatccttactgaacataagagaattcatactggagagaagccatacaaatgtgaagaatgtggcaaagttttcaatcgatgttcaaacctaacaaaacataaaagaattcatactggagagaaaccctacaaatgtgacgaatgtggcaaagtttttaattggtggtcacaactaactaaccataagaaaattcatactggagagaaaccctacaaatgtgatgaatgtgacaaagtttttaattggtggtcacaactaactagccataagaaaattcatagtggagagaaaccatacccatgtgaagaatgtggcaaagcctttacccagttctcaaaccttacacaacataagagaattcatactggagagaaaccctacaaatgcaaagaatgttgcaaagcctttaacaagttctcaaaccttactcaacataagagaattcatactggagagaaaccttacaagtgtgaagaatgtggcaacgtttttaatgagtgctcacacctaactagacataggagaattcatactggagagaaaccctacaaatgtgaagaatgtggcaaagcctttacacagtttgcaagccttactcgtcataaaagaattcatactggagaaaaaccctaccaatgtgaagaatgtggcaaaacttttaatcggtgttcacacctaagtagccataagagaattcatactggagagaaaccctacaaatgtgaagaatgtggcagaacctttactcaattctcaaacctcactcagcataaaagaattcatactggagagaaaccctacaaatgcaaagaatgtggcaaagcgtttaacaagttctcaagccttactcaacataggagaattcatactggagtgaaaccctacaaatgtgaagaatgtgggaaagtttttaaacagtgctctcacctaactagccataagagaattcatactggagagaaaccctacaaatgtaaagaatgtggcaaagctttttaccaatcctcaatccttagtaagcataagagaattcatactgaagagaaaccctacaaatgtgaagaatgtggcaaagcctttaaccagttctcaagccttactcgtcataaaagaattcatactggagagaaacgctacaaatgtaaagaatgtggaaaaggtttttaccaatcctcaatccatagtaagtataagagaatttatactggagaggaacctgacaaatgtaaaaaatgtggcagtctttaaaaactgcttcattatacatggcttcactaatttcatactgaataaaagtggtatgagcataatgactgtttaaggatgtttcacaaaatgtaagcttcagagtgcacaacactatactgaatgaaatttataaatataaaagattacaatatctttatttcaaagatcttcctgtaaacagaatctgtactagaggaaaaacccttaaacaattattcagactttattcaactttagaggattttacgggggcaaaaaacctcctacaaatgtggaaaaacattttttcaagatatatgccttagaaaacaccagagtttatagtatagtagaatatattttacagatacagtgaatacaaacaaatgtccaaaattaagtctaaataaaacattacataatttactgtagaaagtactaaggcactaacagtttcagatgttactttaaagcagtgttgattgtcgagaataattcaaagttaaaatagataatttagttgtatgtaaatttaaatgaatcaagagatgatgtctttttgaagcacagttacattcatgttatacttttttgcattaaaagtttttatatttttgattatatattttaatattgatataattcatatctcaaataacttgatttttattatatttattgtttatgttaaagtatgtggtcagttgttgctgcataagagctatgagaagttcttctatattagatgaccatcatttatatgctttttcatgaatgattaagggcaccgaaatgtaacatttataaggaaaatctaagtagaaatgctttttgttgatgtataacagtgttttaagtaacacattaggtattcagagaagtattttgcattatagtaatagggaaacattttgaatttcagtagtaaattgttttatgagttgcacattaagataatacagtagcttttgaaatgttatttttagaatgcaatttcttttcataaaacaaaattatttttaatgtgttaagaatattttgcattgaatgaagtatatcttgccacaataattaacctataccaccttacccaaagttgtaggtaacagatagtaacaatacactactgggtaacagtgaaaggacacctctagtaatctcttttcccagtggcttttaatttcaaacaacttggggaggttttttttatgtgatatgctttggtttttttgtgccttacctcatgttgaaatgtgttcccccatgttggaggcggggtctagtggaaggtgtttaggtcatgggtgtagattactcatgaatggattggtgttcttaccactgcagttagtgtgttctctgttagttcatgtgaaagctggttgttaaaaacaaaaacaaacaaacaaaaaactgatattcctcttgctttgtcttttgccatgatacccctttgccttttattatgcataaaagcttcctgaggcctcatcagaagttaagcagatgttgatgtcatgcttgtatagccaacagaactgaggctaataaacctcttttctgtattaatttgccagtgttaagtattcccttctagcagcacaaaatggactaacatcccataggttatatttttatttttttcttttgtaaatactggacaatgatactcttatataatcttcagtataaccattataattgcccactataaaggagtataatgaaaggccatgtattttgaatcacgaatgactatttacaaaatgtcatactacgtttttctttgagcctgtgacccctctggcctgtaaaaacacatacatacatttagttttgattaacatggagttaattttataagtctgtcactctaaacataagtgttagctttaagagaattacagagcatgtaattgtgtttgagtgtaggtgtgtacttttttgagaagaaaacaaaaatattggaacaaaatataatttaaaaagtattggtaatttactagcaaactaggaatctcaaagattctgaaagtaaatatttattctctgctttgtattgaatttacttctgtaaaatcttatggctgctggctcagaatcttctcatgcaaatcctgtttttttcttgtctgttgatcatactaaacctaatgtatagttttctcattccaaagttcatgaaattttctctatattcctgagaaattctaagaataactttcataaaatgtattgatgttcacaagataattttaagatgtaattctacaatatgtgtgttactacattttatttaattagtatattttatttttgtatttcaattggagaaccctattttggccaatttttacttggtttttgtttccattttaatattttacataattgaatttttttcactttattgagccattttgtttagatgtacactgggaaggcttcataattcacaaagttgttttgacatataaatgaggtgaacaaacacaggaaagtgctaggtttcctgggggtataatagatgctctataattagcagtaaatattcttgtttaagtcactttttggctacaagtaagagattagaaatattcagcataaagagatggcattaactctgcatgtaaagaaaacacatgtatacccaggctgtacaactgcctctgaaattaagaggaattgtgtttatttcatagttatctctggtacttcactgttattttattttcacccccaactatgcgtcaatcatagccctttcccttctttgcttattatggctacagatttctcactgttctctgcagcccatgtaatttcatacagtattttgtaggttgtgataaggaatttgaaatttttaatatagtgaaaaattggatttaactggagagtttgaggacatttttaagttagaaatgcaccatttgaatcatttaattggcataattgggatgtactctacacagtttataggattaaattactgagttagtaatgtttgtatgaaagaaatgttattagattctaccacaaaatatagtaaacatgaaatcagttagaataggtaaagcattaataatggtaggctatatatcataatcactatataaagaaacatcagaatttggaaaccccttaagcaaaaatatatcttagaaatcttaaggacacttaatggcaagcaaaaaagtttaaatttagttttttataaattacatatagcacaatttatgtgtacatgtagaatcttttagtttttagtgtttatgtaatatattagacaataataaacatttacatttatgtttacatttatatttaatttttcaaatttaatttaaatttctaaatgcttctgtggatttaaattttggaataatcttttcttccccattgatactggaatcttgggaagtttcttactcatatcacaatatgttttatttaaatggatgcagcttacattgcagagtttatataaataatcacataacaagccaattccttagtcattttctgtattaaaaaactcagagatctagagagcttttggattgaaatatttccttggtgattttggatgcaaacctgatttctgtgttcacaccatggccagagatgggactgttagcaccacctgcttctttaatgtcgtccatatgatcagcatcagcaccagaaactccaggtgtcccaaacttaaagtgaaagccatagagtcctttggtgactcccatgttctgtgctggttctagaacatgctggtaaatatcagagtttctatgcttatggctgataagtagacatttttaaaaatcataaaaactgtattttctatatagttcagctaagtttatgaaaaagatgcagactcagtatttggagcattgctatcgctccatgatgtgtttaaaaattatttttaaattgacaaaattttatatctacatatatatatatcttgtaacacatgatgtttgaaatgcttaattctagccaattaaaaatgctttacctcaatagttatttttattgtgagaaaggtcaacatggtcttggcacttaaaaaaaaaaaaacaatatattctcaataactgtattcactctgcactacaataggtctcttgaactaattcctcctagctaacaggcattgtttatcatttaacagataattctctaagcccccttctcctaaaacttcagcatctcttaaccttctttctagtctctacttttatgagatcaacttgtttagattccacgtgagtgagaccatgaggtattcatctttctgtgttctgctccattggtctatttatctgtttttaatgccagtattggactgtttcagttactgtagctttgcagtatatttgactgtcaagtagtgcagtgcttccaaccttcagagtcttttactgtactatatgaatttttgtgttttttttgtgaaaaattttattgatattttgatagacattatgttaaatatatacatcattttgtgtaacatagactttttagcaatattaatttggccaatttatgaataagggataacttttcatttatttatgtttaattttatacctcagttttctttagcttttaatgtagagatctttaacatttttgaataattttatttggaagtaaactttctgtaactattgcaggtgtcaattgttttctttatttctttttcagatagtttgttgttagtgtatagaaatgctactgacccttatatcttgattttgtatcctgcaactttagtgaatttattctaagtatttttaaagttttctatttataagactatgatatctgcaaacagggacaattattttctttctttccaatttggttgtctttggttttgttttctaatttctctggcctggaaattcagtagcatgttaaataagagtgatgaagttagatatatttgccttactataactcttagaaaaaaggcttacaacttttgaaggtttagcatgatgtcagatgtccatttgtcatatatggcctttattggcttgaggtatgtatgttctatatgtaatttgttttgagattttgtcataaagtaatgttgaattttctaaaattctttttctgcattcacttaaaagttataattggttctgagatccttcatctttctcagaatctaggaggatgcatctgtacctagaggaggacacaaaggcatcatatgttacattctcgtgacatataatgtctactgcttataatgtctactgtgagtttctgactccccaaatgaaattgaggcccagaaactttcaactgctttgttcgttgaataatgccaagtgtctggaaatgtgactattcagattaaatgcttaatgtgtgtgtgttgactaaataaatctcaaccagaaccttctcagatattttgttgaacgtgggacctttgtttttttttgttgttttgttttgttttgtttttgttgttgttgttgttgttgtttaccagcaggggacccctgttttgtctatgtcaagaacaaagaccaggcaaaagaaatgtcaagccgcatttacaaatgcaaaaatggacttgtttttgatatgcttttcccaacaataagggacatgagtcattggggcatgttacagagagtttcagtaaaattcagaaaaaaataataaatatgaacagccacagcatgcccagaagcctttttatggagccaggcatggttgacctgctttccatgtctcaaaacattagtccctacaagaaccctatgaggtttatcttcttttcacccattttgagagaagaaaagttcagctcagagagctgcaggaacattggggacatctccaagtcacagccaataggtggcagtcatcagtgtgtcttggaagggacaaacattgagcttctgaacagctactccagaaactatggtgctgtggtgaagtcctggttaggagcctaggaaaatggtgaaggaaaagatggtcccagcctgcaaagctgaagtcaggaacccaccaggatctcccttctccctagcctggtggtccacatcatgcagatttactctagattcagcttagactcatttttatactactcgggggacaaggagggaactacagtcagtaacagcagcatgagcctcaggtgctttggggattgaaattcagaccaggaaattccaatacatcagtgcatgtggaggacatgagtatttaaggagaaggttctaggcttccgaagtaaaattggatgtggaggttggggattgattcaaacattaatactttcaagcgtttctatggtatttgtcagctgtggagcaacagcacacatctgtattaatagcctgtgttaagagattactgtgaatcctgaaaaacatcctcattgtagagatgagaaaacacaggcttttgcacatccaatgtctccttaaagcatgtggttcagaattgagaacgtgcagagtgagagtggtatgaattttcctgtaagctacctgaagttctgtttgctgtcatgtggaagaaaagagccttggagaagttttatttttttctgtttggaaagaatacacagagcaagatgatttacaataaaccttttgacctaacgcac

SEQ ID NO: 203446 - DNA, 929 bp, Homo sapiens
  Payload ID: 20117
  Gene Name: zinc finger protein 678
  ENST ID: ENST00000608949
  CDS Start-End: 439-669
gatctggcggggcctttgtcttgtgctccagctggagctttggtcccgtattctcggctatttatccccagctgcgggaggccctggtgactctgctgctgcagtgtctggtttccctgtgacctgcaggtactgggagttacatagctaagatgccaggacaccccgaaagccggaaaacgagacgcattctcactatgttgcccaggctggtcttgaactccttccctcaagtgattcttctgcctaatcctcccaaagttcttagattacagggactactggcattcagtgatgtggtcatagaattctctccagaggagtgggcatgcctggaccctgcccagcgaaatttgtatagggatgtgatgttcgagaactacagaaacctggtctccctgggacttccaggactatgttaaaatagaagcattgataatgggcacaatatcactttgcattggtgtctgtgcatttgaaggagcaaacacctctaccagtttttataaactggtttatacagctattttatcttattccattcaagaccttttgccagagcaggatatgaaagatttatgccaaaaagtgacactgacaagacatagaagctggggccttgacaatttgcacttagtgaaagactggagaactgtgaatgaaggttaaaaggactactgactcaaactctgcctcttgagttcatggttcaccacttccagcctggtgacttggtgctgattaaaacttggaaagaagacaagctccacccaagttgggaagctccctatcaagtgctcctgaccactaagatggctggatgtgcaaacagctgaacaaaggtggactcactacactcaagtcaagggactggtaaaagggaccccagaaggcaaggaaaaagaccagtggaaagtgcatgggtcacc

SEQ ID NO: 203447 - DNA, 1297 bp, Homo sapiens
  Payload ID: 20118
  Gene Name: zinc finger protein 679
  Uniprot ID: Q8IYX0
  ENST ID: ENST00000255746
  CDS Start-End: 1-1236
atggctaaaagaccgggatcccctggaagccgagaaatgggactgttgacattcagagatgtagtcatagaattctctctggaggagtggcaatgcctggatcacgctcagcagaatttatatagagatgtgatgttagagaactacagaaacctggtctccctgggtattgctgtctctaagccagacttgatcacctgtctggagcaaaataaagagccttggaatataaagagaaatgagatggtaaccaaacacccagttatgtgttctcatttcacccaagaccttccgccagagctaggcataaaagattcactccaaaaagtaataccaagaagatatggaaaaagtggacatgacaatttacaagtaaaaacatgtaaaagcatgggtgagtgtgaggtgcaaaaaggaggttgtaatgaagttaaccaatgtttgtcaactacccaaaacaaaatatttcagactcataaatgtgtcaaagtcttcggcaaattttcaaattccaatagacataagacaagacatactggaaagaaacatttcaaatgtaaaaaatatggcaaatcattttgcatggtttcacaactacatcaacatcagataattcatactagggagaattcctaccaatgtgaagaatgcggcaaacccttcaactgctcttcaaccctttctaaacataaaagaattcatactggagagaaaccctacagatgtgaggaatgtggcaaagcttttacctggtcctcaacccttactaaacataggagaattcatactggagaaaaaccctacacatgtgaagaatgtggccaagcctttagccgctcctcaacacttgctaaccacaagagaattcatactggagagaaaccatacacatgtgaagaatgtggcaaagcctttagcttatcctcatccctcacttaccacaagagaattcatactggagagaaaccctacacatgtgaagaatgtggcaaagcctttaactgctcctcaacccttaagaaacataagataattcatactggagagaaaccctacaaatgtaaagaatgtgggaaagcctttgccttctcctcaactcttaatactcataagaggattcatactggagaggaaccctacaaatgtgaagaatgtgacaaagcttttaagtggtcctcaagtcttgctaatcataagagtatgcatactggagagaaaccctacaaatgtgaataatgtgataaagtccagccttcagaccttataatacataaaataatttatacttgaaaaaatc

SEQ ID NO: 203448 - DNA, 1567 bp, Homo sapiens
  Payload ID: 20118
  Gene Name: zinc finger protein 679
  Uniprot ID: Q8IYX0
  ENST ID: ENST00000421025
  CDS Start-End: 270-1505
ggtacttgatccaggtatatgtcacattcccaactgttggctgggcccaagcaaattagtaaaataaattaggtgctgtgtgaaagtatacgccacaatcacacctgcgggaaggaccaggaataaatttcacaattctacgtatttcccagctttaggtctgagagtctacacttctgagctccagttcttctcttcactgctctgcgtcctctgttcctagaggccaagccactgtggccttgtgttctgcaggtatccgcagatttatggctaaaagaccgggatcccctggaagccgagaaatgggactgttgacattcagagatgtagtcatagaattctctctggaggagtggcaatgcctggatcacgctcagcagaatttatatagagatgtgatgttagagaactacagaaacctggtctccctgggtattgctgtctctaagccagacttgatcacctgtctggagcaaaataaagagccttggaatataaagagaaatgagatggtaaccaaacacccagttatgtgttctcatttcacccaagaccttccgccagagctaggcataaaagattcactccaaaaagtaataccaagaagatatggaaaaagtggacatgacaatttacaagtaaaaacatgtaaaagcatgggtgagtgtgaggtgcaaaaaggaggttgtaatgaagttaaccaatgtttgtcaactacccaaaacaaaatatttcagactcataaatgtgtcaaagtcttcggcaaattttcaaattccaatagacataagacaagacatactggaaagaaacatttcaaatgtaaaaaatatggcaaatcattttgcatggtttcacaactacatcaacatcagataattcatactagggagaattcctaccaatgtgaagaatgcggcaaacccttcaactgctcttcaaccctttctaaacataaaagaattcatactggagagaaaccctacagatgtgaggaatgtggcaaagcttttacctggtcctcaacccttactaaacataggagaattcatactggagaaaaaccctacacatgtgaagaatgtggccaagcctttagccgctcctcaacacttgctaaccacaagagaattcatactggagagaaaccatacacatgtgaagaatgtggcaaagcctttagcttatcctcatccctcacttaccacaagagaattcatactggagagaaaccctacacatgtgaagaatgtggcaaagcctttaactgctcctcaacccttaagaaacataagataattcatactggagagaaaccctacaaatgtaaagaatgtgggaaagcctttgccttctcctcaactcttaatactcataagaggattcatactggagaggaaccctacaaatgtgaagaatgtgacaaagcttttaagtggtcctcaagtcttgctaatcataagagtatgcatactggagagaaaccctacaaatgtgaataatgtgataaagtccagccttcagaccttataatacataaaataatttatacttgaaaaaatca

SEQ ID NO: 203449 - DNA, 3022 bp, Homo sapiens
  Payload ID: 20119
  Gene Name: zinc finger protein 680
  Uniprot ID: Q8NEM1
  ENST ID: ENST00000309683
  CDS Start-End: 153-1745
ggacaggacggcttccgggatttggcggggcctttgtctctagctgctgcgggagctccaggtctagtctttactgctctgtgtattctgctcctagaggcccagcctctgtgactccgttatctgcaggtattgggagatgcacagctaagatgccaggaccacctggaagcctagaaatgggaccactgacatttagggatgtggccatagaattctctctggaggagtggcaatgcctggacactgcacaacggaatttatataggaaagtgatgtttgagaactacagaaacctggtcttcctgggtattgctgtctctaagcctcacctgataacctgtttggagcaaggaaaagagccctggaataggaagagacaggagatggtagccaaacccccagttatatattctcatttcactgaagacctttggccagagcatagcataaaagattcttttcaaaaagtgatactgagaggatatggaaaatgtggacatgagaatttacaattaagaataagttgtaaaagtgtggatgagtctaaggtgttcaaagaaggttataatgaacttaaccaatgtttgagaactacccagagcaaaatatttcaatgtgataaatacgtgaaagtctttcataaattttcaaattcaaacagtcataagaaaagaaatactggaaagaaggttttcaaatgtaaagaatgtggcaaatcattttgcatgctttcacatctaacacaacatataagaattcacactagagagaattcttacaaatgtgaggaatgtggcaaagttcttaactggttctcagagcttattaaacataagggaattcatatgggagagaaaccctacaaatgtgaggaatgtggcaaagcctttaaccaatcctcaacccttattaaacataagaaaattcatattgaagagaaacccttcaaatgtgaagaatgtggcaaagcctttagtttattctcaatccttagtaaacataagataattcatactggagacaaaccttacaaatgtgatgaatgtcacaaagcctttaactggtttgcaacccttactaaccataagagaattcatactggagagaaacccttcaaatgtgaagaatgtggcaaagactttaaccagttttcaaaccttactaaacataagaaaattcatactggagagaaaccctacaaatgtgaagaatgtggcaaagcttttaaccagtttgcaaaccttactagacataagaaaattcatactggagagaaatcctacaaatgtgaagaatgcggcaaagcttttatacagtcctcaaaccttactgaacatatgagaattcatactggagagaaaccctacaaatgtgaagaatgtggcaaagcttttaatgggtgctccagccttactcgacataagagaattcacactagagagaatacctacaaatgtgaagaatgtggcaaaggctttactttattttcaacccttactaaccataaagtaattcatactggagagaaatcctacaaatgtgatgaatgtggcaatgtttttaactggcctgcaactcttgctaatcataagagaattcatgctagagagaaaccctacaaatgtgaagaatgtggcaaagcttttaaccggtcctcacaccttactagacataagaaaattcatactggtgagaaactctacaaacctgaaaaatgtgacaataattttgataacacctaaaacttttctaaacataaaagacaccatcctgttgagaaaccctaaaaatgtgaagaatttgacaaagccttccaatgattgttacacttgcttgtaggtaagataatttatattggagaaaactttataagtgtaaagaatgtgacaaaacttaaccaatactcacatcttattgcacaggaaagcatttttacttgagaaagattgtacaagtataaagaatgtgaaaaagtcattgatatcttttcacatcttactcaacaccagagtttatacttattaaaagcattataaatgcaattactgtcaaaagaaatttcagaaaacataacactttaaagtgaagaagcgtgtttattttgaagacaaacataacaaatataaggagcataggagggttgtagtacctttacttgtattacaaatcttattgtacgcattttgtactagagaaaaacactgaagcagttgctcaaactttgttcaacatcagggaatttatattggagaaaaatcctgcaaatgtaatgaatttggaaaaacattttttttcaaaaactacggcgtagaaaacatgaatttatattgaaatgtgtttttgcagatgcagtaagtatgaaaaatatttaatccaaaattgagtctatgtaaatattaaataatttacagtagaaataactaaggcactgacactttagacattacactaaaacagagtgttgagtataaaaaaatctataagttgttagattatttgtaaataactttaaaaggagtagaagattctttggagagttataattacattgaaagtatactttttttcttgaaaaaattatggcttatttgaaaagtaaataatgatgaaattcaactctcaaattactttatttcattcctattgtattcacatgtgaaagcatgtgataaattgttgctgtgtcagatataggagagattcttttttattagatgggcattatttatggttttttctgtggaagagtatgggcattaaaatgtaaggtttatgatgaaaatctaagtggagaggccctgttagtttacttttcatattgagtgatgcatgaggtaggtgtttggagtaatattctgcatcatagagaaaagcatttttaattttactttaaattaaatgtaattaaattactagtgaatcattttactaattgtacttttatgctataaatgcagtacatttgaaaatttttagattatgtataagcttaattttataattaaacatttctttaaca

SEQ ID NO: 203450 - DNA, 2159 bp, Homo sapiens
  Payload ID: 20119
  Gene Name: zinc finger protein 680
  Uniprot ID: Q8NEM1
  ENST ID: ENST00000447137
  CDS Start-End: 88-459
agtctttactgctctgtgtattctgctcctagaggcccagcctctgtgactccgttatctgcaggtattgggagatgcacagctaagatgccaggaccacctggaagcctagaaatgggaccactgacatttagggatgtggccatagaattctctctggaggagtggcaatgcctggacactgcacaacggaatttatataggaaagtgatgtttgagaactacagaaacctggtcttcctgggtattgctgtctctaagcctcacctgataacctgtttggagcaaggaaaagagccctggaataggaagagacaggagatggtagccaaacccccagagtcttactgtgttgctcaggctgatcttgaactcctggtctcaagttatcttactgccttggcctccctaaagatgtgggattacagaaataatccactttgccaggctactatgtagcccttcatgtagaactgtgctagtcataatgaatcataacactgtcaccttttattttgaaaagtctttatttttatctgtttttaaagtacactaatcttgaatcaagtattcttggttaggaattttattactgcatcaaaatttgggaagttcttagcctttttcatctacaagtaacctctacattactttttccctacattcttcttctaagagttttttaatgaatatattgatgtacttgatggtgtccaataagttttacatttcatgttttaattttcttttggaattttatatttttgttttatatattttaggatatgccacctcacatgagttaattgttttggttttttagtttatattataattgagtatgccagtatttaactctgtaaaatttaagacagtgtggaacaaagtcaaatatgaatcagccatatgtctactaccaatataacgatctctgtgtttacctgtataaatattttccctgttctttttatgacttgtatatttctggtataggtttgttgcaaatggttatttaatcttgactaggtgagaagtcatagaaattctcctaatttcaacatctatttattcatggatctatattatttttgtgtgggagaaaaacttttctatttaaagataatttacaaacgatcataatctcttttaggtatgtctatttttacttgtcaaaaacacataacatttacaatagaatatttttaaatgtttattttagtcctattatattgacattgttatgcaacatattcctaaaatgtttttatcttgcaaagctaaatatcaatacccattaaaaaactatgaattttacccatttcctggcacttttcaaacaccactctgttttctctaagagtgtaactgcttcatatatctcatacaatctctgtctttttgtgactggctcattttattttgcacaatatcatcaagctttatagttgttagaatattttctgctttttaaatactgggtgatatttaagtattttgtattttagattatatctactgagtaatttggtgacaaatttgcactgcttttacctattggctttcagtaacaatgctgcaataattacaggtatgcaaatgacctatatgatcatatatgtgtaagtttatatatgtgccgcattctgttctactagtgtacgtttttacctttgtactcataccaaattgttacaattctgtagctctgtaatgtgtttcaaaatcagaaactgtaatgccttcaaaattgtttattttattgcagatttttgggtactttattatctcttaagactttatatactttgggggttgctgtttctatttcttcaaaaatgcatgagaaatttgaacaacattgcattaaatctgtaaattacattgagcaggatggacatcttcacaagattaattattttaacatttcaacaagcatgctcaagagtgtattgttttaatttctatgtatttgtgaatttttcagttttttcttcttactgttctatactcatttcattttggtcatagaaagtaatccataaaaatttagttttaaataatttgttaagacttcttttttggtttaccaggttttctatcaaggagaatttcgtatgaggtattgagaaggctgtttatcattatgttgttgagtgttc

SEQ ID NO: 203451 - DNA, 6497 bp, Homo sapiens
  Payload ID: 20120
  Gene Name: zinc finger protein 681
  Uniprot ID: Q96N22
  ENST ID: ENST00000402377
  CDS Start-End: 143-2080
gtctctcccttcagcccgagctccgggtctcgtcttcactgctctgtgtcctcttcttctagaggcccagcctctatggccctctgacctgcaggtattggcgatccatagctaagacgccaggtcccccggaaacctagaaatggaaccattgaaatttagggatgtggccatagaattctctctggaggagtggcaatgcctggacactatacagcagaatttatataggaatgtgatgttagagaactacagaaacctggtcttcttgggtattgttgtctctaagccagacctgatcacctgtctggaacaagaaaaagagccttggactagaaagagacataggatggtggccgaacccccagttatttgttctcattttgcccaagacttttcaccagagcagaacataaaagattctttccaaaaagtgacaccaagaagatatggaaaatgtgaacatgagaatttacagttaagtaaaagtgtggatgagtgcaaagtgcaaaaaggaggttataatggacttaaccaatgtttgccaactacccagagcaaaatatttcaatgtgataaatatatgaaaatctttcataaattttcaaatttaaatggacataaggtaagacacaccagaaaaaaaccttttaaatataaagaatttggcaaatcattttgcatattttcaaacctaactcaacataaaataatttgtactagagtaaatttctacaaatgtgaagactgtggaaaagcctttaatggatcctcaatctttactaaacataaaagaattcatattggagagaaatcgtacatatgtgaagaatgtggcaaagcctgtaaccagttcacaaaccttactacacataagataatttatactagagacaaactctacaaacgtgaagaatgtagcaaagcctttaacctgtcgtcacacattacaacacatacaataattcatactggagagaatccctacaaacgtgaagaatgtgacaaagcctttaatcagtccttaacccttactacacataagataattcataccagagagaaactcaatgaatataaggaatgtggcaaagctttcaaccagtcctcacaccttaccagacataagataattcatactggagagaaaccctacaaatgtgaagaatgtggcaaagcctttaaccagtcctcacaccttaccagacataagataattcatactggagagaagccctacagatgtgaagaatgtggcaaagcctttaggcagtcctcacaccttactacacataagataattcatactggagagaaaccctacaaatgtgaagaatgtggcaaagcttttaacaagtcctcacaccttactagacataagagcattcatactggagaaaaaccctaccagtgtgaaaaatgtggcaaagcttctaaccaatcctcaaaccttactgaacataagaatattcatactgaagagaaaccatacaaatgtgaagaatgtgggaaagcctttaaccagttctcaaaccttactacacataaaagaattcatactggagagaaaccctacaaatgtgaagaatgtggcaaagcttttaaccagtcctcaatccttactacacataagagaattcatactggagagaaatcctacaaatgtgaagaatgtggcaaagctttctatcgatcctcaaaacttactgaacataagaaaattcatactggagagaaaccctacacatgtgaagaatgtggcaaagcctttaaccattcctcacatcttgctacacataaggtaattcatactggagagaaaccctaccaatgtgaagaatgtggtaaagcctttaaccagtcctcacaccttactagacataagagaattcatactggagagaaaccctaccaatgtgaaaaatgtggcaaagcttttaaccagtcctcaaaccttactggacataagaaaattcatactggtgagaaactctacaaacctaaaagatgtaacagtgattttgaaaacacttcaaagttttctaaacataaaagaaattatgctggtgagaaatcttagaaatgtgaagaatgtaacaaaacctttaaaagttgtcacacttgattgtgcataagataattcatactaaaaaaaaacctacaagtgtgaagaatgtggcaaaacttttaaccaatgctcacaccttattgcacaggaaagcatttgtactagaaaaaaatttcaaatatacagaatgtgaaaaagccattaatatctgttcacatcttactcaacatcagagatttcatacttaataaaagcattatacatgcaattactgtcaaaaatctttcagaaaatataagcctctaaagtgaagagtattcattttgaagacacacattatgaacataaggagggttgtggtacctttacttgtatcacagatctcattgtacacattttgtgctagaggaaaaccatggagcagttgcttaaactttgtgcaacataaggaaatttatattggagaaaaaccctgcaaatgtaataaatttgggaaaacattttttcaaaaacgacagcttagaaaacactagagggttcatactaaaatctatttttgcagatgcagtaaatatgaaaaaatatttaatccaaaattctatgtaaatatcagataattcacagtagaaatagttaaggcactgacacttcaggcattacactaaatcagattgctgagtatagaaaagaatctaaaactaaagttggtaaatgaattatttgtatataacattataagaagtagaaaatttttgcagagttgtaactacattcaaactatcctttgaaaaaaattaggttttatgaaaagtgaataatgtcatttaactcaagttatgctcttcattcctattgtattcacatgtgaaagcatgtgacttaattgttgctgcatcaaagatgagagattctttgttattaggtgtgcattatttacgaccttttttagtgaaagagttaaggacattaaaatgtaagatgcaagatgaaaatgtaagtggagaggctctttctggttaatttataatattgactgatgcatgaggtaggagttcagataaatatcctgtgttatattgagaaaaaaaattttctggtatatcattttactaattgtactttttttttttttgagacagagttttgctcttgttgcccaggctggagtgcaatggtgtgatcttggctcaccaaaacctccacctcccaggttcaagggattctcctgcctcagcctcccgagtagctgggattacaggcatgtgccaccatgcccggctaattttgtatttttaatagagatggggtttctctatgttggtcaggctggtctcaaactcccgacctcgggtgatccacccacctcggcctcccaaagtgctgggattacaggcgcgagtcaccatgcctggccaattgtacttttatgtaataaaatgtagtacattttaaaatttttagataatgtgtgaacttattaatcaggctttttaaaaaacatgttaagaccatcgtgcattcaatgaagcattattatgccattaaatttaacttatcccatcttactcaagggtataggtaaatgatggtaactatacactatttaataagataatggactaacatttctagtaatctgttttgccagtggctttaaattgcaaataagtcagagaatattattcctgtaggttgaattattactcattttttcttatttaaacttatttttcttaatttttgtgggtacatagtatgtgtaaatatggcatatatggcatattttgatacaggtatataatatgtaataattacatatgggtaaatgaaatattcattacctgcagcatttattgtttgtatttgtttgtattataaactaattctgcacttttcggtttttttttgagacgagtctcactatgtcacccaggctgtgcacgcctgggtgcattggcgtggtctcagctcactgcaacctccgcctactgggttcaagtgattcttccgcctcagcctcctgagtagttgggactacaggcgcatgccaccacactcagctaatttttgtatttttagtagaaacagtttcactacgttggccaggtttgtcttgaactcctgaccccatgattagccccctcggcctcccaaagtgctgggattacaggtgggagccaccacacccagccacttttagttgttttcaaatgtacattaaattgttgttggctacagggtctcttttatggtcataagaaaacaatataaacaaaatgcatacatttctgagacctgaattaacattaaaaaattgttatatatttttcttcaaacatgttgcctctctgcctgcaagcacatacagactattagttttgatttacacagagttaaatatatacatatattactttaaagataaagcttgggtttaaaaaaattatggagtaaataaatgccttctttgcgagtatgagtttctacctagtttcagaagagcaatattgaaacaaatcaaattattttaattagatgatgactgcaaaactaaaaaaacttaaaaatgctgaaaacaaatccatactctctgctttgtattgaattgattactgtaaaattgtatggcttataattcagaatctccctatgcaaatttttgtttttacttgcctgattcttaggctagacccataattttcttgtgtcttacatttttttctcttattttatataagatgctatgtgagctggtcagagattataaaaataatttttataaaattagtgcaaaaaatttagatttaatttcaaaattagtgtattgttatattttatgttgttagaatattttattttgttcttttaattggagaacgctgtataagcctactttttttagtttttgttcctttcagtttttataatgaaaataagtaaatattgattgagcccatttatttaggtgagtactaggggggcttcctaaatcatgaggatgtttttatatataaatatagcaaacaaacatgacagtgctttctgtgtcacagatgctttataataagccataaatattcctgttggagttagtttgtaacttcaagacagagatggaacatatcaattgtgagaaataacattgattttttatgtggagaggacatttattttcaggctgcaaagctcagttttgctgaattaaaaaattgtgcttcttttatttcctaattgtcttagttttgtttgtcttattatgtgtatttcagctgtgtatgcatcacagccctcctttttgctgtgctgtggctacagttttctcactgttctcttcacaccatgtcatttcacatggtatattgtaggttttgatgagaaatcggtatttttaatgcactgcaagattggttttaactggagattttgcatatcaatataattttctgatcagttaaattaaaacaaaaagcatacagtgtccacagatgaaaggattaaatcatttagcgttgtttttctctgtttgttaaagaataatcttattaaattcttacacaaagtgtggcaaatataaaatttgcttgaaaatatatcttagaaattaaacttttaatttaattttctacagtatacttatgccacaatgtacgtttccatgcaaaatcttctatttgtaagtgtgaacattaaacattgcaaaatagtaaaatgacctctgtgattttgaaacctggagtaatatttcttttccatattcatattacaatttgaagaaattttctcagttttatatgtttttttagtgggtgaagttcagtctacagtttttacatttagtcacctaactctagccaacttcttggtcatattctctggaaaacattcgaagatcatggcagcttttagataaaaacattttctattattttgcgtgcaaacttgtttactgtgttcacagagtggccagtcatgagaccataagaaacagctgcccttttagtgtctttcataccgtctgtaatatataaattgtgcatttattctgtgaagcatgacattttgaagtatatacacattgtcaaatgcttcattctaggtaattaatgctttacctaacatagttaacatttttgtggtaagagcacatgacaatgttttagcatttttcagaaatacaaatacattgttatgaactataggcaccatgcagtacaaaagcttttttgaacttatttctcctattcaactgtaattatgtatttgactgacatctttctaaacccctcttttttccaaatatgttggcatctggtggtcaccattttattctccacttcagttagattaatttttctagaatcatgtaagtgaaataatttggttaatctatgtaattgaaaataataaatttttttattttaaagatgaa

SEQ ID NO: 203452 - DNA, 628 bp, Homo sapiens
  Payload ID: 20120
  Gene Name: zinc finger protein 681
  ENST ID: ENST00000528059
  CDS Start-End: 172-628
tcttcttctagaggcccagcctctatggccctctgacctgcaggtattggcgatccatagctaagacgccaggtcccccggaaacctagaaatggtattgttgtctctaagccagacctgatcacctgtctggaacaagaaaaagagccttggactagaaagagacataggatggtggccgaacccccagttatttgttctcattttgcccaagacttttcaccagagcagaacataaaagattctttccaaaaagtgacaccaagaagatatggaaaatgtgaacatgagaatttacagttaagtaaaagtgtggatgagtgcaaagtgcaaaaaggaggttataatggacttaaccaatgtttgccaactacccagagcaaaatatttcaatgtgataaatatatgaaaatctttcataaattttcaaatttaaatggacataaggtaagacacaccagaaaaaaaccttttaaatataaagaatttggcaaatcattttgcatattttcaaacctaactcaacataaaataatttgtactagagtaaatttctacaaatgtgaagactgtggaaaagcctttaatggatcctcaatctttactaaacataaaagaattcatattg

SEQ ID NO: 203453 - DNA, 526 bp, Homo sapiens
  Payload ID: 20120
  Gene Name: zinc finger protein 681
  ENST ID: ENST00000531570
  CDS Start-End: 148-526
tcttctagaggcccagcctctatggccctctgacctgcaggtattggcgatccatagctaagacgccaggtcccccggaaacctagaaatgacctgatcacctgtctggaacaagaaaaagagccttggactagaaagagacataggatggtggccgaacccccagttatttgttctcattttgcccaagacttttcaccagagcagaacataaaagattctttccaaaaagtgacaccaagaagatatggaaaatgtgaacatgagaatttacagttaagtaaaagtgtggatgagtgcaaagtgcaaaaaggaggttataatggacttaaccaatgtttgccaactacccagagcaaaatatttcaatgtgataaatatatgaaaatctttcataaattttcaaatttaaatggacataaggtaagacacaccagaaaaaaaccttttaaatataaagaatttggcaaatcattttgcatattttcaaacctaactcaacataaaataatttgtactagagtaa

SEQ ID NO: 203454 - DNA, 2161 bp, Homo sapiens
  Payload ID: 20121
  Gene Name: zinc finger protein 682
  Uniprot ID: O95780
  ENST ID: ENST00000358523
  CDS Start-End: 423-1823
ggccgtcgatcacctccgggcacaggatgcgagaatcagtctcagtgtttcctgtttggattgccatgaggacatcaacccagagtgactgtagaccctcttcccagcacctgagagtctttgagacatttgaggttgttgtgtgcagactgggatgggagttgttccagttttcacttgggtgaaaaaaaaggagagctggagactgatcaaccaattactttcatttcatatggcgattagaaaaacagatgaggcaatcataatctctgcaatccaggaactgtgtctgtggcaaatgaataaatggctgaatttcacaccatggagaactgttgacattcagggatgtgaccatagaattctctctggaggagtgggagtttctgaaccctgctcagcagagtttgtataggaaagtgatgctagagaactacagaaacctggtctctctgggtcttactgtttctaagccagaactgattagccgtctggagcaaagacaggagccctggaatgtgaagagacatgagaccatagccaaacccccagctatgtcttctcattacactgaagaccttttgccagaacagtgcatgcaagattcattccaaaaagtgatactgagaagatatggaagctgtggacttgaggatttacacttaaggaaggatggggaaaatgtgggtgagtgtaaggatcaaaaagaaatttataatggacttaaccaatgtttgtcaactctacctagcaaaattttcccatataataaatgtgtgaaagtctttagtaaatcatcaaatctaaatagagaaaacataagacatactacagagaaacttttcaaatgtatgcaatgtggcaaagtctttaaatctcactcaggcctttcttatcataagataattcacactgaagagaaactctgcatatgtgaggaatgtggcaaaacctttaagtggttctcataccttactaaacataagagaattcacactggagagaaaccatacaaatgtgaagaatgtggcaaagcttttaactggtgctcgagtcttactaaacataagagaatccatactggtgagaaaccctacaaatgtgaagaatgtggaaaagcctttcactggtgttcaccctttgttagacataagaaaattcatacaggagaaaaaccctatacatgtgaagactgtggcagagcgtttaaccggcactcacatctcaccaaacataagacaattcacactggaaagaaaccctacaaatgtaaagaatgtgggaaagcctttaaccactgctcactacttactatacatgagagaacccatacgggagagaaaccctataaatgtgaagaatgtggcaaagcttttaactcatcatcaattcttactgaacataaggtaattcatagcggagagaaaccctacaaatgtgaaaaatgtgacaaagtctttaagaggttctcataccttactaaacacaagagaattcacactggagagaaaccctacaaatgtgaagaatgtggcaaagcttttaactggtcctcaatccttactgaacataagagaattcatactggagagaaaccctacaactgtgaagaatgtggaaaagcctttaatcggtgctcacaccttactagacataagaaaattcatactgccgtcaaacgctataaatgtgaagaatgtggcaaagcttttaaacggtgctcacatcttaatgaacataagagagttcaaagaggagagaaatcctgcaagtataaaaaatgtggggaagcttttaatcactgctcaaaccttactacgtaagaatttttactaaagagaaatcctacaaatgtaaagaatgtggcaaattccataaatcttgctcaaggcattgaaatcacaagataattcatactggagagaaacactacaaatgtgaagaatgtggggaaagtcttcaaccattgctgacagcttattgcacagaagaaaattcatgctgagaaaaattctgattttaaagaatgtggcaaagcatttaataactactatgaacttactcatcagaggttttgtgctagataaaagcaatgtaagtgtaatgatacacattacatttatctgtggaaagatgtcaccaaataaaagccttagagtac

SEQ ID NO: 203455 - DNA, 3164 bp, Homo sapiens
  Payload ID: 20121
  Gene Name: zinc finger protein 682
  Uniprot ID: O95780
  ENST ID: ENST00000397162
  CDS Start-End: 177-1577
agctgtcagctccggagtctgcggactggagtccccggcaggcacagctcggccgtcgatcacctccgggcacaggatgcgaggaactgttgacattcagggatgtgaccatagaattctctctggaggagtgggagtttctgaaccctgctcagcagagtttgtataggaaagtgatgctagagaactacagaaacctggtctctctgggtcttactgtttctaagccagaactgattagccgtctggagcaaagacaggagccctggaatgtgaagagacatgagaccatagccaaacccccagctatgtcttctcattacactgaagaccttttgccagaacagtgcatgcaagattcattccaaaaagtgatactgagaagatatggaagctgtggacttgaggatttacacttaaggaaggatggggaaaatgtgggtgagtgtaaggatcaaaaagaaatttataatggacttaaccaatgtttgtcaactctacctagcaaaattttcccatataataaatgtgtgaaagtctttagtaaatcatcaaatctaaatagagaaaacataagacatactacagagaaacttttcaaatgtatgcaatgtggcaaagtctttaaatctcactcaggcctttcttatcataagataattcacactgaagagaaactctgcatatgtgaggaatgtggcaaaacctttaagtggttctcataccttactaaacataagagaattcacactggagagaaaccatacaaatgtgaagaatgtggcaaagcttttaactggtgctcgagtcttactaaacataagagaatccatactggtgagaaaccctacaaatgtgaagaatgtggaaaagcctttcactggtgttcaccctttgttagacataagaaaattcatacaggagaaaaaccctatacatgtgaagactgtggcagagcgtttaaccggcactcacatctcaccaaacataagacaattcacactggaaagaaaccctacaaatgtaaagaatgtgggaaagcctttaaccactgctcactacttactatacatgagagaacccatacgggagagaaaccctataaatgtgaagaatgtggcaaagcttttaactcatcatcaattcttactgaacataaggtaattcatagcggagagaaaccctacaaatgtgaaaaatgtgacaaagtctttaagaggttctcataccttactaaacacaagagaattcacactggagagaaaccctacaaatgtgaagaatgtggcaaagcttttaactggtcctcaatccttactgaacataagagaattcatactggagagaaaccctacaactgtgaagaatgtggaaaagcctttaatcggtgctcacaccttactagacataagaaaattcatactgccgtcaaacgctataaatgtgaagaatgtggcaaagcttttaaacggtgctcacatcttaatgaacataagagagttcaaagaggagagaaatcctgcaagtataaaaaatgtggggaagcttttaatcactgctcaaaccttactacgtaagaatttttactaaagagaaatcctacaaatgtaaagaatgtggcaaattccataaatcttgctcaaggcattgaaatcacaagataattcatactggagagaaacactacaaatgtgaagaatgtggggaaagtcttcaaccattgctgacagcttattgcacagaagaaaattcatgctgagaaaaattctgattttaaagaatgtggcaaagcatttaataactactatgaacttactcatcagaggttttgtgctagataaaagcaatgtaagtgtaatgatacacattacatttatctgtggaaagatgtcaccaaataaaagccttagagtacacaaggtgtaatgatagtgatacattacatttgtacatggaaagacttcaaaaatataagccttagagtacacaagagtttttatactgaagaaaaacattacaaatataaagattgttgcaatacttttacttatgttacagattttgttgtacataggagaatttatactgaaaggtaaccctctaacagttgctcaaattttattccattttagataatttacattggaaagaaaccctacaactgtaatgaatatgaaaaaaattgtttaaaaagtacaccttagaaaacactagtttaaggccgggcgcggtggctcacacttataatcccagcactttgggaggccgaggcaggcggatcacgaggtcaggagatcgagaccacgatgaaaccctgtctctactaaaaatacaaaaaattagctgggcatgttgtcgggtgcctgtagtcccagctactgggagaggctgaggcaggagaatggcgtgaacccgagaggcggagcttgcagtgagccgagatcgcgccactgaactccaacctgggcgacagagactctgtctcaaaaaaaaagaaagaacgctagtttatatgaaagcatttaacagatgcagtaaatataaaaaattaataaaaaattaagtctaaatgaacatcagaagattcacagtagaaaccactaagacgctaacactttcaatgttattctaaatcagggcattgattataaagagtaattcaaggttaacataatttagttagcctaaacagaaataggagattaatattttgagacttaaacaattatattcaaagtacactttttgcattgaaagaattttagatttttacaaaggcaaattttgatgtaattgaactctcaaattacttgatgctgtgtctttattcctagtgtctgtatgaaagcatgtggtcaatttctgctgctcggggtttgagaagttctatattaggatgtcatttacatacttttcaacagaagattgaggacactgaaatatgaggtgtgtgaagaaagtacacagagaaacttttgtggttgacttataaaacttgtaagtgctgcatgagatagatgttcagagtaatagtcttgtgcattattcaaattttagtaaattgttttaccaattgcacattagatagtatagtggattttgtaatgcttttcttagactgtgtgaacttagtttcaataaaacaattatttttaatgtgttaa

SEQ ID NO: 203456 - DNA, 3245 bp, Homo sapiens
  Payload ID: 20121
  Gene Name: zinc finger protein 682
  Uniprot ID: O95780
  ENST ID: ENST00000397165
  CDS Start-End: 162-1658
ggcctttgtctcgctccagccagagctcagggtccatcttcattgcttagtatcctctgctctagtagttcccggtgactgtcgcagcctctgttgccctctgacttgcagatgctgtgagatccagagctaagactccacgacatcccggaagccgaaaaatggaactgttgacattcagggatgtgaccatagaattctctctggaggagtgggagtttctgaaccctgctcagcagagtttgtataggaaagtgatgctagagaactacagaaacctggtctctctgggtcttactgtttctaagccagaactgattagccgtctggagcaaagacaggagccctggaatgtgaagagacatgagaccatagccaaacccccagctatgtcttctcattacactgaagaccttttgccagaacagtgcatgcaagattcattccaaaaagtgatactgagaagatatggaagctgtggacttgaggatttacacttaaggaaggatggggaaaatgtgggtgagtgtaaggatcaaaaagaaatttataatggacttaaccaatgtttgtcaactctacctagcaaaattttcccatataataaatgtgtgaaagtctttagtaaatcatcaaatctaaatagagaaaacataagacatactacagagaaacttttcaaatgtatgcaatgtggcaaagtctttaaatctcactcaggcctttcttatcataagataattcacactgaagagaaactctgcatatgtgaggaatgtggcaaaacctttaagtggttctcataccttactaaacataagagaattcacactggagagaaaccatacaaatgtgaagaatgtggcaaagcttttaactggtgctcgagtcttactaaacataagagaatccatactggtgagaaaccctacaaatgtgaagaatgtggaaaagcctttcactggtgttcaccctttgttagacataagaaaattcatacaggagaaaaaccctatacatgtgaagactgtggcagagcgtttaaccggcactcacatctcaccaaacataagacaattcacactggaaagaaaccctacaaatgtaaagaatgtgggaaagcctttaaccactgctcactacttactatacatgagagaacccatacgggagagaaaccctataaatgtgaagaatgtggcaaagcttttaactcatcatcaattcttactgaacataaggtaattcatagcggagagaaaccctacaaatgtgaaaaatgtgacaaagtctttaagaggttctcataccttactaaacacaagagaattcacactggagagaaaccctacaaatgtgaagaatgtggcaaagcttttaactggtcctcaatccttactgaacataagagaattcatactggagagaaaccctacaactgtgaagaatgtggaaaagcctttaatcggtgctcacaccttactagacataagaaaattcatactgccgtcaaacgctataaatgtgaagaatgtggcaaagcttttaaacggtgctcacatcttaatgaacataagagagttcaaagaggagagaaatcctgcaagtataaaaaatgtggggaagcttttaatcactgctcaaaccttactacgtaagaatttttactaaagagaaatcctacaaatgtaaagaatgtggcaaattccataaatcttgctcaaggcattgaaatcacaagataattcatactggagagaaacactacaaatgtgaagaatgtggggaaagtcttcaaccattgctgacagcttattgcacagaagaaaattcatgctgagaaaaattctgattttaaagaatgtggcaaagcatttaataactactatgaacttactcatcagaggttttgtgctagataaaagcaatgtaagtgtaatgatacacattacatttatctgtggaaagatgtcaccaaataaaagccttagagtacacaaggtgtaatgatagtgatacattacatttgtacatggaaagacttcaaaaatataagccttagagtacacaagagtttttatactgaagaaaaacattacaaatataaagattgttgcaatacttttacttatgttacagattttgttgtacataggagaatttatactgaaaggtaaccctctaacagttgctcaaattttattccattttagataatttacattggaaagaaaccctacaactgtaatgaatatgaaaaaaattgtttaaaaagtacaccttagaaaacactagtttaaggccgggcgcggtggctcacacttataatcccagcactttgggaggccgaggcaggcggatcacgaggtcaggagatcgagaccacgatgaaaccctgtctctactaaaaatacaaaaaattagctgggcatgttgtcgggtgcctgtagtcccagctactgggagaggctgaggcaggagaatggcgtgaacccgagaggcggagcttgcagtgagccgagatcgcgccactgaactccaacctgggcgacagagactctgtctcaaaaaaaaagaaagaacgctagtttatatgaaagcatttaacagatgcagtaaatataaaaaattaataaaaaattaagtctaaatgaacatcagaagattcacagtagaaaccactaagacgctaacactttcaatgttattctaaatcagggcattgattataaagagtaattcaaggttaacataatttagttagcctaaacagaaataggagattaatattttgagacttaaacaattatattcaaagtacactttttgcattgaaagaattttagatttttacaaaggcaaattttgatgtaattgaactctcaaattacttgatgctgtgtctttattcctagtgtctgtatgaaagcatgtggtcaatttctgctgctcggggtttgagaagttctatattaggatgtcatttacatacttttcaacagaagattgaggacactgaaatatgaggtgtgtgaagaaagtacacagagaaacttttgtggttgacttataaaacttgtaagtgctgcatgagatagatgttcagagtaatagtcttgtgcattattcaaattttagtaaattgttttaccaattgcacattagatagtatagtggattttgtaatgcttttcttagactgtgtgaacttagtttcaataaaacaattatttttaatgtgttaa

SEQ ID NO: 203457 - DNA, 581 bp, Homo sapiens
  Payload ID: 20121
  Gene Name: zinc finger protein 682
  ENST ID: ENST00000593468
  CDS Start-End: 118-429
gcttagtatcctctgctctagtagttcccggtgactgtcgcagcctctgttgccctctgacttgcagatgctgtgagatccagagctaagactccacgacatcccggaagccgaaaaatggaactgttgacattcagggatgtgaccatagaattctctctggaggagtgggagtttctgaaccctgctcagcagagtttgtataggaaagtgatgctagagaactacagaaacctggtctctctgggtcttactgtttctaagccagaactgattagccgtctggagcaaagacaggagccctggaatgtgaagagacatgagaccatagccaaacccccagattacagccttaccattttgtgtaaaaagaagagcaacatattaataagtttccctagtattatctatgtcttctcattacactgaagaccttttgccagaacagtgcatgcaagattcattccaaaaagtgatactgagaagatatggaagctgtggacttgaggatttacacttaaggaaggatggggaaaatgtgggtgagtgtaaggatcaaaaagaaatttataatggactta

SEQ ID NO: 203458 - DNA, 474 bp, Homo sapiens
  Payload ID: 20121
  Gene Name: zinc finger protein 682
  ENST ID: ENST00000602079
  CDS Start-End: 1-157
tttgtataggaaagtgatgctagagaactacagaaacctggtctctctgggtcttactgtttctaagccagaactgattagccgtctggagcaaagacaggagccctggaatgtgaagagacatgagaccatagccaaacccccagtgtctgtatgaaagcatgtggtcaatttctgctgctcggggtttgagaagttctatattaggatgtcatttacatacttttcaacagaagattgaggacactgaaatatgaggtgtgtgaagaaagtacacagagaaacttttgtggttgacttataaaacttgtaagtgctgcatgagatagatgttcagagtaatagtcttgtgcattattcaaattttagtaaattgttttaccaattgcacattagatagtatagtggattttgtaatgcttttcttagactgtgtgaacttagtttcaataaaacaattatttttaatgtgtt

SEQ ID NO: 203459 - DNA, 603 bp, Homo sapiens
  Payload ID: 20121
  Gene Name: zinc finger protein 682
  ENST ID: ENST00000595534
  CDS Start-End: 97-327
tagttcccggtgactgtcgcagcctctgttgccctctgacttgcagatgctgtgagatccagagctaagactccacgacatcccggaagccgaaaaatggaactgttgacattcagggatgtgaccatagaattctctctggaggagtgggagtttctgaaccctgctcagcagagtttgtataggaaagtgatgctagagaactacagaaacctggtctctctgggtcttactgtttctaagccagaactgattagccgtctggagcaaagacaggagccctggaatgtgaagagacatgagaccatagccaaacccccaggctagattacagccttaccattttgtgtaaaaagaagagcaacatattaataagtttccctagtattatatgaggagtcatgagaattgttgtaaattcaacatctattcattggtggatgtatattttctttttgtgagagaaacacttgtgatttgaagctatgtcttctcattacactgaagaccttttgccagaacagtgcatgcaagattcattccaaaaagtgatactgagaagatatggaagctgtggacttgaggatttacacttaaggaagg

SEQ ID NO: 203460 - DNA, 1538 bp, Homo sapiens
  Payload ID: 20121
  Gene Name: zinc finger protein 682
  ENST ID: ENST00000597972
  CDS Start-End: 23-1537
tgcccattgacagttggtcactatgttttgttttgtttttcaggaactgttgacattcagggatgtgaccatagaattctctctggaggagtgggagtttctgaaccctgctcagcagagtttgtataggaaagtgatgctagagaactacagaaacctggtctctctgggtcttactgtttctaagccagaactgattagccgtctggagcaaagacaggagccctggaatgtgaagagacatgagaccatagccaaacccccagctatgtcttctcattacactgaagaccttttgccagaacagtgcatgcaagattcattccaaaaagtgatactgagaagatatggaagctgtggacttgaggatttacacttaaggaaggatggggaaaatgtgggtgagtgtaaggatcaaaaagaaatttataatggacttaaccaatgtttgtcaactctacctagcaaaattttcccatataataaatgtgtgaaagtctttagtaaatcatcaaatctaaatagagaaaacataagacatactacagagaaacttttcaaatgtatgcaatgtggcaaagtctttaaatctcactcaggcctttcttatcataagataattcacactgaagagaaactctgcatatgtgaggaatgtggcaaaacctttaagtggttctcataccttactaaacataagagaattcacactggagagaaaccatacaaatgtgaagaatgtggcaaagcttttaactggtgctcgagtcttactaaacataagagaatccatactggtgagaaaccctacaaatgtgaagaatgtggaaaagcctttcactggtgttcaccctttgttagacataagaaaattcatacaggagaaaaaccctatacatgtgaagactgtggcagagcgtttaaccggcactcacatctcaccaaacataagacaattcacactggaaagaaaccctacaaatgtaaagaatgtgggaaagcctttaaccactgctcactacttactatacatgagagaacccatacgggagagaaaccctataaatgtgaagaatgtggcaaagcttttaactcatcatcaattcttactgaacataaggtaattcatagcggagagaaaccctacaaatgtgaaaaatgtgacaaagtctttaagaggttctcataccttactaaacacaagagaattcacactggagagaaaccctacaaatgtgaagaatgtggcaaagcttttaactggtcctcaatccttactgaacataagagaattcatactggagagaaaccctacaactgtgaagaatgtggaaaagcctttaatcggtgctcacaccttactagacataagaaaattcatactgccgtcaaacgctataaatgtgaagaatgtggcaaagcttttaaacggtgctcacatcttaatgaacataagagagttcaaagaggagagaaatcctgcaagtataaaaaatgtggggaagcttttaatcactgctcaaaccttactacgtaag

SEQ ID NO: 203461 - DNA, 609 bp, Homo sapiens
  Payload ID: 20121
  Gene Name: zinc finger protein 682
  ENST ID: ENST00000601100
  CDS Start-End: 198-609
gtgacgggactggggcctcccagctgtcagctccggagtctgcggactggagtccccggcaggcacagctcggccgtcgatcacctccgggcacaggatgcgaggaactgttgacattcagggatgtgaccatagaattctctctggaggagtgggagtttctgaaccctgctcagcagagtttgtataggaaagtgatgctagagaactacagaaacctggtctctctgggtcttactgtttctaagccagaactgattagccgtctggagcaaagacaggagccctggaatgtgaagagacatgagaccatagccaaacccccagctatgtcttctcattacactgaagaccttttgccagaacagtgcatgcaagattcattccaaaaagtgatactgagaagatatggaagctgtggacttgaggatttacacttaaggaaggatggggaaaatgtgggtgagtgtaaggatcaaaaagaaatttataatggacttaaccaatgtttgtcaactctacctagcaaaattttcccatataataaatgtgtgaaagtctttagtaaatcatcaaatctaaatagagaaaacataagacatactacag

SEQ ID NO: 203462 - DNA, 1710 bp, Homo sapiens
  Payload ID: 20121
  Gene Name: zinc finger protein 682
  Uniprot ID: O95780
  ENST ID: ENST00000595736
  CDS Start-End: 104-1372
agtagttcccggtgactgtcgcagcctctgttgccctctgacttgcagatgctgtgagatccagagctaagactccacgacatcccggaagccgaaaaatgctatgtcttctcattacactgaagaccttttgccagaacagtgcatgcaagattcattccaaaaagtgatactgagaagatatggaagctgtggacttgaggatttacacttaaggaaggatggggaaaatgtgggtgagtgtaaggatcaaaaagaaatttataatggacttaaccaatgtttgtcaactctacctagcaaaattttcccatataataaatgtgtgaaagtctttagtaaatcatcaaatctaaatagagaaaacataagacatactacagagaaacttttcaaatgtatgcaatgtggcaaagtctttaaatctcactcaggcctttcttatcataagataattcacactgaagagaaactctgcatatgtgaggaatgtggcaaaacctttaagtggttctcataccttactaaacataagagaattcacactggagagaaaccatacaaatgtgaagaatgtggcaaagcttttaactggtgctcgagtcttactaaacataagagaatccatactggtgagaaaccctacaaatgtgaagaatgtggaaaagcctttcactggtgttcaccctttgttagacataagaaaattcatacaggagaaaaaccctatacatgtgaagactgtggcagagcgtttaaccggcactcacatctcaccaaacataagacaattcacactggaaagaaaccctacaaatgtaaagaatgtgggaaagcctttaaccactgctcactacttactatacatgagagaacccatacgggagagaaaccctataaatgtgaagaatgtggcaaagcttttaactcatcatcaattcttactgaacataaggtaattcatagcggagagaaaccctacaaatgtgaaaaatgtgacaaagtctttaagaggttctcataccttactaaacacaagagaattcacactggagagaaaccctacaaatgtgaagaatgtggcaaagcttttaactggtcctcaatccttactgaacataagagaattcatactggagagaaaccctacaactgtgaagaatgtggaaaagcctttaatcggtgctcacaccttactagacataagaaaattcatactgccgtcaaacgctataaatgtgaagaatgtggcaaagcttttaaacggtgctcacatcttaatgaacataagagagttcaaagaggagagaaatcctgcaagtataaaaaatgtggggaagcttttaatcactgctcaaaccttactacgtaagaatttttactaaagagaaatcctacaaatgtaaagaatgtggcaaattccataaatcttgctcaaggcattgaaatcacaagataattcatactggagagaaacactacaaatgtgaagaatgtggggaaagtcttcaaccattgctgacagcttattgcacagaagaaaattcatgctgagaaaaattctgattttaaagaatgtggcaaagcatttaataactactatgaacttactcatcagaggttttgtgctagataaaagcaatgtaagtgtaatgatacacattacatttatctgtggaaagatgtcaccaaataaaagccttagagtac

SEQ ID NO: 203463 - DNA, 450 bp, Homo sapiens
  Payload ID: 20121
  Gene Name: zinc finger protein 682
  ENST ID: ENST00000594127
  CDS Start-End: 1-133
ttacactgaagaccttttgccagaacagtgcatgcaagattcattccaaaaagtgatactgagaagatatggaagctgtggacttgaggatttacacttaaggaaggatggggaaaatgtggtgtctgtatgaaagcatgtggtcaatttctgctgctcggggtttgagaagttctatattaggatgtcatttacatacttttcaacagaagattgaggacactgaaatatgaggtgtgtgaagaaagtacacagagaaacttttgtggttgacttataaaacttgtaagtgctgcatgagatagatgttcagagtaatagtcttgtgcattattcaaattttagtaaattgttttaccaattgcacattagatagtatagtggattttgtaatgcttttcttagactgtgtgaacttagtttcaataaaacaattatttttaatgtgtt

SEQ ID NO: 203464 - DNA, 552 bp, Homo sapiens
  Payload ID: 20121
  Gene Name: zinc finger protein 682
  ENST ID: ENST00000596019
  CDS Start-End: 121-369
attgcttagtatcctctgctctagtagttcccggtgactgtcgcagcctctgttgccctctgacttgcagatgctgtgagatccagagctaagactccacgacatcccggaagccgaaaaatggaactgttgacattcagggatgtgaccatagaattctctctggaggagtgggagtttctgaaccctgctcagcagagtttgtataggaaagtgatgctagagaactacagaaacctggtctctctgggtcttactgtttctaagccagaactgattagccgtctggagcaaagacaggagccctggaatgtgaagagacatgagaccatagccaaacccccaggtacctacagagttggacagtaggaccccagtcctgtcctcttgaaactgacctggagatgaccccagctgatggagaaccctggaaacctggaggatcctcctgctcattctctgtgcccctggacacgtagctagaggagtgcatgcactggcttatagcagagctgccactattctgggtttttttttttttccttgtcttat

SEQ ID NO: 203465 - DNA, 1610 bp, Homo sapiens
  Payload ID: 20122
  Gene Name: zinc finger protein 683
  Uniprot ID: Q8IZ20
  ENST ID: ENST00000349618
  CDS Start-End: 82-1596
aggaacctgagcagatgccttgacccagaccagagacccaagccaaggaaagcccatgatcaccagacaggtaatggggatatgaaggaagaatcagctgcacaattaggttgttgtcataggcccatggccctgggaggtacagggggctccctgtcccccagcctggacttccagctcttccgaggtgaccaggtcttctcagcctgcagaccacttccagacatggtggatgctcatggcccatcctgtgccagctggctgtgtcccttgcccctggcaccgggcaggtctgcactgctggcctgcctacaggacctggacctgaacctgtgcaccccacagccggcacccctgggcacagacctgcagggcctccaagaggacgccttgagcatgaagcacgagccaccagggctgcaggccagctccaccgatgacaagaaattcacagtcaagtacccacagaacaaggacaagctgggaaaacagccagaaagagctggcgagggggccccctgcccagccttctcctctcataacagctcttccccaccaccgctgcagaacagaaagagccccagccccttggctttctgcccctgtccccctgtcaactccatctccaaggagctcccatttctcctccacgccttctaccctggatacccacttctcctgcctccaccccacctgttcacctatggggccctaccttctgaccaatgtccccacctcctcatgctgccccaagacccctcctaccccaccatggctatgcctagcctgctgatgatggtcaatgagctggggcaccccagcgctcggtgggagaccctgcttccctacccaggggccttccaagcctctggccaagctctgccttcccaggcccgaaatccaggtgctggagctgccccaaccgactccccaggcctggagcgtggtggcatggcatctccagcaaagcgggtcccattgagttcccagacaggcaccgcagccttgccttacccgctgaaaaagaagaatggcaaaatcctgtacgagtgcaacatatgtggcaagagctttgggcagctctccaatctcaaggtccacctgcgtgtgcacagtggagagcgtccattccagtgtgccttgtgccagaagagcttcactcaacttgcccacctgcagaagcaccacctggtgcacactggggagcggccccacaagtgctcggtgtgccacaagcgcttcagcagctccagtaacctcaagacccacctgcgcctgcactccggggcccggcccttccagtgcagtgtctgccggagtcgcttcacccagcacatccacctgaagctgcaccatcggctgcatgccccacagccctgtggcctggtgcacacccagctgcccctggcctctctggcctgccttgcccaatggcaccagggggcactagatcttatggcggtggcatctgagaaacacatgggctatgacatagatgaggtcaaagtgtcctcgacatcccaggggaaagcaagagcagtgagcctgagcagtgccgggactcccctggtgatggggcaggaccagaacaattaaaaatgtttcttctg

SEQ ID NO: 203466 - DNA, 1670 bp, Homo sapiens
  Payload ID: 20122
  Gene Name: zinc finger protein 683
  Uniprot ID: Q8IZ20
  ENST ID: ENST00000403843
  CDS Start-End: 79-1653
aggaacctgagcagatgccttgacccagaccagagacccaagccaaggaaagcccatgatcaccagagtaatggggatatgaaggaagaatcagctgcacaattaggttgttgtcataggcccatggccctgggaggtacagggggctccctgtcccccagcctggacttccagctcttccgaggtgaccaggtcttctcagcctgcagaccacttccagacatggtggatgctcatggcccatcctgtgccagctggctgtgtcccttgcccctggcaccgggcaggtctgcactgctggcctgcctacaggacctggacctgaacctgtgcaccccacagccggcacccctgggcacagacctgcagggcctccaagaggacgccttgagcatgaagcacgagccaccagggctgcaggccagctccaccgatgacaagaaattcacagtcaagtacccacagaacaaggacaagctgggaaaacagccagaaagagctggcgagggggccccctgcccagccttctcctctcataacagctcttccccaccaccgctgcagaacagaaagagccccagccccttggctttctgcccctgtccccctgtcaactccatctccaaggagctcccatttctcctccacgccttctaccctggatacccacttctcctgcctccaccccacctgttcacctatggggccctaccttctgaccaatgtccccacctcctcatgctgccccaagacccctcctaccccaccatggctatgcctagcctgctgatgatggtcaatgagctggggcaccccagcgctcggtgggagaccctgcttccctacccaggggccttccaagcctctggccaagctctgccttcccaggcccgaaatccaggtgctggagctgccccaaccgactccccaggcctggagcgtggtggcatggcatctccagcaaagcgggtcccattgagttcccagacaggcaccgcagccttgccttacccgctgaaaaagaagaatggcaaaatcctgtacgagtgcaacatatgtggcaagagctttgggcagctctccaatctcaaggtccacctgcgtgtgcacagtggagagcgtccattccagtgtgccttgtgccagaagagcttcactcaacttgcccacctgcagaagcaccacctggtgcacactggggagcggccccacaagtgctcgataccgtgggttccaggaagaaatcactggaaaagcttccaggcctggagggaaagagaggtgtgccacaagcgcttcagcagctccagtaacctcaagacccacctgcgcctgcactccggggcccggcccttccagtgcagtgtctgccggagtcgcttcacccagcacatccacctgaagctgcaccatcggctgcatgccccacagccctgtggcctggtgcacacccagctgcccctggcctctctggcctgccttgcccaatggcaccagggggcactagatcttatggcggtggcatctgagaaacacatgggctatgacatagatgaggtcaaagtgtcctcgacatcccaggggaaagcaagagcagtgagcctgagcagtgccgggactcccctggtgatggggcaggaccagaacaattaaaaatgtttcttctgtca

SEQ ID NO: 203467 - DNA, 1712 bp, Homo sapiens
  Payload ID: 20122
  Gene Name: zinc finger protein 683
  Uniprot ID: Q8IZ20
  ENST ID: ENST00000436292
  CDS Start-End: 122-1696
ggggaggtagcacaaagggaggaccatggtcttctaactgaggaacctgagcagatgccttgacccagaccagagacccaagccaaggaaagcccatgatcaccagacaggtaatggggatatgaaggaagaatcagctgcacaattaggttgttgtcataggcccatggccctgggaggtacagggggctccctgtcccccagcctggacttccagctcttccgaggtgaccaggtcttctcagcctgcagaccacttccagacatggtggatgctcatggcccatcctgtgccagctggctgtgtcccttgcccctggcaccgggcaggtctgcactgctggcctgcctacaggacctggacctgaacctgtgcaccccacagccggcacccctgggcacagacctgcagggcctccaagaggacgccttgagcatgaagcacgagccaccagggctgcaggccagctccaccgatgacaagaaattcacagtcaagtacccacagaacaaggacaagctgggaaaacagccagaaagagctggcgagggggccccctgcccagccttctcctctcataacagctcttccccaccaccgctgcagaacagaaagagccccagccccttggctttctgcccctgtccccctgtcaactccatctccaaggagctcccatttctcctccacgccttctaccctggatacccacttctcctgcctccaccccacctgttcacctatggggccctaccttctgaccaatgtccccacctcctcatgctgccccaagacccctcctaccccaccatggctatgcctagcctgctgatgatggtcaatgagctggggcaccccagcgctcggtgggagaccctgcttccctacccaggggccttccaagcctctggccaagctctgccttcccaggcccgaaatccaggtgctggagctgccccaaccgactccccaggcctggagcgtggtggcatggcatctccagcaaagcgggtcccattgagttcccagacaggcaccgcagccttgccttacccgctgaaaaagaagaatggcaaaatcctgtacgagtgcaacatatgtggcaagagctttgggcagctctccaatctcaaggtccacctgcgtgtgcacagtggagagcgtccattccagtgtgccttgtgccagaagagcttcactcaacttgcccacctgcagaagcaccacctggtgcacactggggagcggccccacaagtgctcgataccgtgggttccaggaagaaatcactggaaaagcttccaggcctggagggaaagagaggtgtgccacaagcgcttcagcagctccagtaacctcaagacccacctgcgcctgcactccggggcccggcccttccagtgcagtgtctgccggagtcgcttcacccagcacatccacctgaagctgcaccatcggctgcatgccccacagccctgtggcctggtgcacacccagctgcccctggcctctctggcctgccttgcccaatggcaccagggggcactagatcttatggcggtggcatctgagaaacacatgggctatgacatagatgaggtcaaagtgtcctcgacatcccaggggaaagcaagagcagtgagcctgagcagtgccgggactcccctggtgatggggcaggaccagaacaattaaaaatgtttcttctgtc

SEQ ID NO: 203468 - DNA, 744 bp, Homo sapiens
  Payload ID: 20122
  Gene Name: zinc finger protein 683
  ENST ID: ENST00000423508
  CDS Start-End: 154-744
acccaagccaaggaaagcccatgatcaccagagtaggttgggaagtgcggatagaggggaagtagtttttatttttttctaacagagaagttgtgcaaggtgttctgagagttgggagcagagtgtgatgccaggagagggcagagctggcagatggaagccaaaggtaatggggatatgaaggaagaatcagctgcacaattaggttgttgtcataggcccatggccctgggaggtacagggggctccctgtcccccagcctggacttccagctcttccgaggtgaccaggtcttctcagcctgcagaccacttccagacatggtggatgctcatggcccatcctgtgccagctggctgtgtcccttgcccctggcaccgggcaggtctgcactgctggcctgcctacaggacctggacctgaacctgtgcaccccacagccggcacccctgggcacagacctgcagggcctccaagaggacgccttgagcatgaagcacgagccaccagggctgcaggccagctccaccgatgacaagaaattcacagtcaagtacccacagaacaaggacaagctgggaaaacagccagaaagagctggcgagggggccccctgcccagccttctcctctcataacagctcttccccaccaccgctgcagaacagaaagagccccagccccttggctttctgcccctgtccccctgtcaactccatctccaaggagctcccatttctcctc

SEQ ID NO: 203469 - DNA, 853 bp, Homo sapiens
  Payload ID: 20122
  Gene Name: zinc finger protein 683
  ENST ID: ENST00000416125
  CDS Start-End: 288-853
ctcctggggcatttcctagccaagccagggagctttcaggattggagacctggaaatctccaaggccatttccttttttatttttttctaacagagaggttgtgcaaagtgttctgagagctgggagcagagtgtgatgccaggagggagcacagctggcagatggaagccaaagcctggagtgtagcagagccatctcagctcactgcaacctccgcctcccgggttcaagcaattctcctgcctcagtctcccaagtagctggaaatacagcaggtaatggggatatgaaggaagaatcagctgcacaattaggttgttgtcataggcccatggccctgggaggtacagggggctccctgtcccccagcctggacttccagctcttccgaggtgaccaggtcttctcagcctgcagaccacttccagacatggtggatgctcatggcccatcctgtgccagctggctgtgtcccttgcccctggcaccgggcaggtctgcactgctggcctgcctacaggacctggacctgaacctgtgcaccccacagccggcacccctgggcacagacctgcagggcctccaagaggacgccttgagcatgaagcacgagccaccagggctgcaggccagctccaccgatgacaagaaattcacagtcaagtacccacagaacaaggacaagctgggaaaacagccagaaagagctggcgagggggccccctgcccagccttctcctctcataacagctcttccccaccaccgctgcagaacagaaagagccccagccccttggctttctgcccctgtccccctgtcaactccatctccaaggagctcccatttctcct

SEQ ID NO: 203470 - DNA, 662 bp, Homo sapiens
  Payload ID: 20122
  Gene Name: zinc finger protein 683
  ENST ID: ENST00000453132
  CDS Start-End: 296-662
ttctaactgaggaacctgagcagatgccttgacccagaccagagacccaagccaaggaaagcccatgatcaccagagtaggttgggaagtgcggatagaggggaagtagtttttatttttttctaacagagaagttgtgcaaggtgttctgagagttgggagcagagtgtgatgccaggagagggcagagctggcagatggaagccaaaggtgtgcgggtcaccccttctgggtggggacatctgatcgacctagtccatgtatgcctgcatgaagtgctgcaggtaatggggatatgaaggaagaatcagctgcacaattaggttgttgtcataggcccatggccctgggaggtacagggggctccctgtcccccagcctggacttccagctcttccgaggtgaccagagcacgagccaccagggctgcaggccagctccaccgatgacaagaaattcacagtcaagtacccacagaacaaggacaagctgggaaaacagccagaaagagctggcgagggggccccctgcccagccttctcctctcataacagctcttccccaccaccgctgcagaacagaaagagccccagccccttggctttctgcccctgtccccctgtcaactccatctccaaggagctcccatttctcctccacgc

SEQ ID NO: 203471 - DNA, 1080 bp, Homo sapiens
  Payload ID: 20122
  Gene Name: zinc finger protein 683
  ENST ID: ENST00000455900
  CDS Start-End: 233-1080
cagcaaggaagggcttggcaggcagaggcttctccacgtgggaacctgagggagtctgtcctcagcccacctcctggggcatttcctagccaagccagggagctttcaggattggagacctggaaatctccaaggccatttccttttttatttttttctaacagagaggttgtgcaaagtgttctgagagctgggagcagagtgtgatgccaggagggagcacagctggcagatggaagccaaaggtaatggggatatgaaggaagaatcagctgcacaattaggttgttgtcataggcccatggccctgggaggtacagggggctccctgtcccccagcctggacttccagctcttccgaggtgaccaggtcttctcagcctgcagaccacttccagacatggtggatgctcatggcccatcctgtgccagctggctgtgtcccttgcccctggcaccgggcaggtctgcactgctggcctgcctacaggacctggacctgaacctgtgcaccccacagccggcacccctgggcacagacctgcagggcctccaagaggacgccttgagcatgaagcacgagccaccagggctgcaggccagctccaccgatgacaagaaattcacagtcaagtacccacagaacaaggacaagctgggaaaacagccagaaagagctggcgagggggccccctgcccagccttctcctctcataacagctcttccccaccaccgctgcagaacagaaagagccccagccccttggctttctgcccctgtccccctgtcaactccatctccaaggagctcccatttctcctccacgccttctaccctggatacccacttctcctgcctccaccccacctgttcacctatggggccctaccttctgaccaatgtccccacctcctcatgctgccccaagacccctcctaccccaccatggctatgcctagcctgctgatgatggtcaatgagctggggcaccccagcgctcggtgggagaccctgcttccctacccaggggccttccaagcctctggccaagctctgccttcccaggcccgaaatccagg

SEQ ID NO: 203472 - DNA, 936 bp, Homo sapiens
  Payload ID: 20122
  Gene Name: zinc finger protein 683
  ENST ID: ENST00000451801
  CDS Start-End: 128-936
ctcagccacaggcagctgtggcctggctgcccacctccttccttcccagccaggagcactgctgcagcaccgagtggagagccccacagccagcagcccttcgggggtccatgcaggtaatggggatatgaaggaagaatcagctgcacaattaggttgttgtcataggcccatggccctgggaggtacagggggctccctgtcccccagcctggacttccagctcttccgaggtgaccaggtcttctcagcctgcagaccacttccagacatggtggatgctcatggcccatcctgtgccagctggctgtgtcccttgcccctggcaccgggcaggtctgcactgctggcctgcctacaggacctggacctgaacctgtgcaccccacagccggcacccctgggcacagacctgcagggcctccaagaggacgccttgagcatgaagcacgagccaccagggctgcaggccagctccaccgatgacaagaaattcacagtcaagtacccacagaacaaggacaagctgggaaaacagccagaaagagctggcgagggggccccctgcccagccttctcctctcataacagctcttccccaccaccgctgcagaacagaaagagccccagccccttggctttctgcccctgtccccctgtcaactccatctccaaggagctcccatttctcctccacgccttctaccctggatacccacttctcctgcctccaccccacctgttcacctatggggccctaccttctgaccaatgtccccacctcctcatgctgccccaagacccctcctaccccaccatggctatgcctagcctgctgatgatggtcaatgagctggggcaccccagcgctcggtgggagaccctgcttccctacccaggggccttccaagcctctggccaagctctgccttccca

SEQ ID NO: 203473 - DNA, 592 bp, Homo sapiens
  Payload ID: 20122
  Gene Name: zinc finger protein 683
  ENST ID: ENST00000454975
  CDS Start-End: 130-592
ggggcctcagccacaggcagctgtggcctggctgcccacctccttccttcccagccaggagcactgctgcagcaccgagtggagagccccacagccagcagcccttcgggggtccatggtaatggggatatgaaggaagaatcagctgcacaattaggttgttgtcataggcccatggccctgggaggtacagggggctccctgtcccccagcctggacttccagctcttccgaggtgaccagccggcacccctgggcacagacctgcagggcctccaagaggacgccttgagcatgaagcacgagccaccagggctgcaggccagctccaccgatgacaagaaattcacagtcaagtacccacagaacaaggacaagctgggaaaacagccagaaagagctggcgagggggccccctgcccagccttctcctctcataacagctcttccccaccaccgctgcagaacagaaagagccccagccccttggctttctgcccctgtccccctgtcaactccatctccaaggagctcccatttctcctccacgccttctaccctggatacccacttctcctgcctccaccccacc

SEQ ID NO: 203474 - DNA, 1009 bp, Homo sapiens
  Payload ID: 20123
  Gene Name: zinc finger protein 684
  ENST ID: ENST00000372696
  CDS Start-End: 150-428
attcaatcttcaaatcagcgccgcgggaagtgcgggcgggtgttgctcccctgtctctggacgacgctgtgactgatcccaggcttggagccggagctgcgagcgaggcagtgaaagggtggcagatttctgtgtaagagctgcagaaaatgatcagcttccaggaatcagtgacattccaggatgtggctgtggatttcactgcagaggagtggcagctgcttgattgtgctgagagaaccctgtattgggatgtgatgttggagaactatagaaacctcatctcagtgggatgtccaattaccaaaacaaaagtgatcctcaaggtagagcaaggacaagagccatggatggtggagggagcgaatccacacgagagctctccaggctggagtgcagtggcgcaatctcagctcgggttcaagtgattctcctacctcagcctcccgaagagctggaactacaggcgcccgccaccatgcctggctaatttttgtatttttagtagagacacggtttcaccatgttggccaggatggtcttgatctcttgaccttgtgagccacccgccttggcctcccaaagtgctgggattacaggtgtgagccaccgtgcctggcccaaaaataaagtattttaaaattcaacaaacgagtatgaaacatttcttcaatgcacattaacattgcagttttgttctaattaactgtcaaaatgacagacagcagcagtgactatcttagaaattcatagaaaatggagcttaaagtttaaagtatgcaaaatttggagaagtcttttttttgaggtcatggaacagtggttcctccctaaagagtatctaagttctagataggacgagaggagataagggggggtgcaaatgaaggtggacaacgaacatgagcaaaagattgaatttaggaatctagaatccatggagtagaaggtatttgttgaggactagtgaaatgcatgcttcccatgagtgaattcatatcttgcataa

SEQ ID NO: 203475 - DNA, 1028 bp, Homo sapiens
  Payload ID: 20123
  Gene Name: zinc finger protein 684
  ENST ID: ENST00000372697
  CDS Start-End: 150-509
attcaatcttcaaatcagcgccgcgggaagtgcgggcgggtgttgctcccctgtctctggacgacgctgtgactgatcccaggcttggagccggagctgcgagcgaggcagtgaaagggtggcagatttctgtgtaagagctgcagaaaatgatcagcttccaggaatcagtgacattccaggatgtggctgtggatttcactgcagaggagtggcagctgcttgattgtgctgagagaaccctgtattgggatgtgatgttggagaactatagaaacctcatctcagtgggatgtccaattaccaaaacaaaagtgatcctcaaggtagagcaaggacaagagccatggatggtggagggagcgaatccacacgagagctctccagagtctcgctctgtcgccaggctggagtgcagtggcgcaatctcagctcgggttcaagtgattctcctacctcagcctcccgaagagctggaactacaggcgcccgccaccatgcctggctaatttttgtatttttagtagagacacggtttcaccatgttggccaggatggtcttgatctcttgaccttgtgagccacccgccttggcctcccaaagtgctgggattacaggtgtgagccaccgtgcctggcccaaaaataaagtattttaaaattcaacaaacgagtatgaaacatttcttcaatgcacattaacattgcagttttgttctaattaactgtcaaaatgacagacagcagcagtgactatcttagaaattcatagaaaatggagcttaaagtttaaagtatgcaaaatttggagaagtcttttttttgaggtcatggaacagtggttcctccctaaagagtatctaagttctagataggacgagaggagataagggggggtgcaaatgaaggtggacaacgaacatgagcaaaagattgaatttaggaatctagaatccatggagtagaaggtatttgttgaggactagtgaaatgcatgcttcccatgagtgaattcatatcttgcataa

SEQ ID NO: 203476 - DNA, 2097 bp, Homo sapiens
  Payload ID: 20123
  Gene Name: zinc finger protein 684
  Uniprot ID: Q5T5D7
  ENST ID: ENST00000372699
  CDS Start-End: 252-1388
atgggaaatgtggtctccgacggatggcctacacccgggaggagtccaggaactctaggtggacagttacttccgcacacgcgtagtaggacggtagccggtattcaatcttcaaatcagcgccgcgggaagtgcgggcgggtgttgctcccctgtctctggacgacgctgtgactgatcccaggcttggagccggagctgcgagcgaggcagtgaaagggtggcagatttctgtgtaagagctgcagaaaatgatcagcttccaggaatcagtgacattccaggatgtggctgtggatttcactgcagaggagtggcagctgcttgattgtgctgagagaaccctgtattgggatgtgatgttggagaactatagaaacctcatctcagtgggatgtccaattaccaaaacaaaagtgatcctcaaggtagagcaaggacaagagccatggatggtggagggagcgaatccacacgagagctctccagaatctgactacccacttgttgatgaaccagggaagcatcgggaaagcaaagacaattttttgaagtcagttttgctcacattcaataaaattctgactatggagagaatccaccattataatatgagcacaagtcttaatccaatgagaaaaaaatcatataaatcgtttgagaagtgtttgccacctaatttagacttacttaaatataatagaagttatactgtagaaaacgcttatgaatgcagtgaatgcgggaaagccttcaaaaagaagtttcatttcattagacatgaaaaaaatcatacaaggaaaaaaccttttgaatgcaatgactgtggaaaagcctatagcaggaaggcacaccttgcaactcatcagaaaattcataatggagagagaccctttgtgtgcaatgattgtgggaaggcgtttatgcataaagcccaactcgtggtccaccagagacttcacactggagagaagccttatgagtgcagtcaatgtgggaaaacattcacttggaactcctcatttaatcaacacgtgaaatctcatacacttgagaagtcatttgaatgtaaggaatgtgggaaaaccttcaggtatagttcatccctttataaacattccagatttcatacaggagagaaaccctaccagtgtatcatatgtggcaaagcttttggcaacacatccgtgcttgttacacaccaaagaattcatacaggagagaaaccttacagttgtattgaatgtggcaaagccttcatcaagaagtcccatctcctcagacatcagataactcatacaggagagaagccctatgaatgtaacagatgtgggaaagcattttcccagaagtcaaatcttattgtacatcagaaaattcatacataatattcactttatgaatatgagaaggccttattaaatatttgctaaatcttattaaatactaaagaattcatggtgagaagtctacaatttaaatgaatttggaagagtagattcccataaaaaacaaccaatgccaatcatgttctggaagtgataataaactttttacagaaaatatgacagaaaacaactataaataatagagcataaagcttggaaagtaagcataacttaaaaaatcaaagaaccagtgaaaactacatttgccattcctgacttttaatttttataataaaataattatgcaagtgtgagtttaaaatatatgcttatacattatattaaagtatgcctattaacagtttctgcagtaaataacattttttcttccagtctcaacatacataattaatcaagtgagaaaatgtgttttaatatgtcatatgaatttcagtgatattttcatccatttgctggcacttttaatgggcatgacagtgtttctgaatctgagtctcctttaattatacaagtgaagacttcttattaaaattaatataaagatattttcctatgtatgtaaataccagaacaaaaaacaagacactaattgaggagagaaaggcacttgtattctgtattacagtaagtattcagttgaggaaaagaattatttaaatatgtaaataaataatttgcacttcaaata

SEQ ID NO: 203477 - DNA, 5378 bp, Homo sapiens
  Payload ID: 20124
  Gene Name: zinc finger protein 687
  Uniprot ID: Q8N1G0
  ENST ID: ENST00000324048
  CDS Start-End: 971-4684
ggccgcggggagggcggcggtggctgcagcggctggagcggggtagagaccgccgggtctcggcccgcaccaggagcggaacaacctttcagatctgtgtggaccccagaagatccgtgaagaatatgaattgattccatgcggacatgaatgagtccttaaacctagaacatcatgtacatcatcctccttaataatagtattgattatttggttctatgctggggaccggaggggatgagatggtttccaccagaatgctcactgagctctattacccttccctgttccctgtattttttttttttttctgagacagtcttgctctgtcgcccaggtgggagtgcagtggcacgatctcagctcactgcaaactccacctcccaggttcaagcaattcttctgcctcagcctcccgagtagctgggactacaggtgtgtgctgccatgcccagctaatttttgtatttttagtagagacggggtttcactatcttggccaggatggtcttgatctcctgacctcgtgatccgcccgcctctgcctccccaagtgctgggattacaggcgtgagccaccatgcccagccccctatatttcttttttttgagacagggtctcgctctgtccaggctggagtgcagtggcgtgatcttggctcattgaaacctcaacctcatgggttcaggcgattctcctgcctcagcctcctttgtagctgcgattacaggcatgtgccaccacacctgtctagttttttgtatttttagtagagacaaggtttcaccatgttggccaagctggtctcaaactcctgacctcaagtgatccatctgcctcagcctcccaaaacgctgggattacaagcatgagccaccgcacctggccccttccctgtatttctaagaactctcttttcccctgctttctctggattttggagcccaccaaggtctgggatctgccgatatgggggatatgaagacccctgattttgatgacctccttgctgcctttgacatccctgacattgatgcgaatgaagccatccattctgggccagaagaaaatgaggggcctggaggcccagggaagccagaaccaggtgtaggaagtgaatctgaagacacagcagcagcctctgctggggatggccctggagttccagcccaggcctctgaccatggcctgccaccgccagacatttctgtagtcagtgtcattgtcaagaacactgtgtgtcccgagcagtctgaggccctggctggaggctcagcaggagacggggcccaggctgctggggtaactaaagaagggcctgtggggcctcatcgaatgcagaatggttttgggagccctgaaccttccctcccaggaactccccactctcctgctcctcccagtgggggcacctggaaagaaaaaggcatggaaggcaaaactcccttggacctgtttgctcattttggccctgagccaggggaccactcagatccgctgcctccctctgcaccctctcccactcgggagggggctctgaccccgcctcctttcccctcttcctttgagctggcccaggagaatggcccaggcatgcagccacctgtttcttccccaccattgggggccttgaagcaggagagctgcagcccccatcatccccaggtcctagcccaacaaggctcaggctccagccctaaggccacggacatccctgccagtgcctcgcctcccccagttgctggggtgcccttcttcaagcagtctccagggcaccagagccctcttgcctcccccaaagtgcccgtctgtcagcccttgaaggaagaagatgatgatgaggggccagtggacaagtcttccccaggaagtccccagagtccctctagtggggccgaggctgcagatgaggacagcaatgactcccctgcctccagctcctctaggcctcttaaggtgcggatcaagaccattaaaacatcctgcgggaatatcacaaggactgtaactcaggtcccctcagatcctgatccacctgcccccttggctgagggggccttcttggctgaggctagcctcttgaagctgtcccctgcaacacctacttctgagggtccaaaggtggtgagcgtacagttgggtgatggtacaaggctgaaaggcactgtgctgcctgtggccaccatccagaacgccagtactgccatgctgatggcagccagtgtggctcgcaaggctgtggtgctgcctggggggactgccaccagccctaagatgattgctaagaacgtgctaggcctggtgccccaagccctgcctaaggctgacgggcgggcagggctggggactgggggacagaaggtgaatggtgcctcggtggtgatggtgcaaccttcaaagacagctactgggccaagtacagggggcggcacagtgatatcacggacccagtccagcctggtggaggccttcaacaagatcctcaacagcaagaacctgctccctgcctataggccaaacctgagcccaccagctgaggctgggctggccctgcctcccaccggctaccgctgcctggagtgtggggatgccttctcattggagaagagcctggcacggcactatgaccgtcggagcatgcgcatcgaggtcacctgcaaccactgcgcccgccgcctggtcttcttcaacaagtgcagcctgctcctgcatgcacgtgaacacaaggacaaggggctcgtcatgcagtgctcacatttggtcatgaggcctgtagcccttgaccagatggtggggcagccggacatcacaccgctgctgcctgtagctgtcccacctgtctctggacctctggccttgcctgccttgggcaagggtgagggggccatcacctcctctgccattactacagttgctgctgaggcccctgtcctgccgctctccacagagccgcctgctgccccggccacctctgcttacacatgctttcgctgcctggagtgcaaggaacagtgccgggacaaggctggcatggcagctcacttccagcagctcggcccccctgcccctggggccaccagcaatgtgtgcccaacctgccccatgatgctccccaatcgctgcagcttcagcgcccaccagcgcatgcataagaatcgacccccccatgtctgtcctgagtgtgggggcaacttcctgcaagccaattttcagacccatctccgggaggcctgtctgcacgtctctcgccgtgtaggatacaggtgccccagctgttcagtggtgtttgggggtgtgaactccatcaagtcccacatccagacgtcgcactgcgaggttttccacaagtgccccatctgccccatggccttcaagtctgggccaagtgcccatgcccacctctactcccagcatcccagcttccaaactcagcaggccaagctgatctacaagtgcgccatgtgcgacacagtcttcactcacaaacccctcctctcctcacacttcgaccagcacttgctgccccagcgtgtcagtgtctttaagtgcccgtcttgtcctctgctctttgcccaaaaaaggaccatgctggaacatctcaagaacacccatcagtctgggcgcttggaggagactgctgggaaaggggccgggggtgccctgctgacccccaagactgagcctgaggagctggctgtttctcagggaggggcagcccctgctactgaggagtcgtcttcatcttcagaagaggaggaagtacccagctcccctgagcccccccgtccagccaaacggcctcggcgggaactagggagcaaaggcctcaagggtgggggtggggggcctggaggctggacctgtggcctgtgtcactcctggttccctgagcgtgatgaatacgtggcccacatgaagaaggagcatggcaagtcagtgaaaaagttcccctgtcgcctgtgtgagcgctccttctgctccgcccccagcctgaggcgccatgtcagagttaatcacgagggcatcaagcgagtttacccctgcaggtattgcacagagggaaaacgcaccttcagcagccgcctgatcctagagaaacatgtccaggtccggcacggcttgcagcttggggcccagtcccctggccgggggaccaccttggctcggggttccagtgccagagcccaggggccaggtcggaaacgccgccagtcttctgactcttgcagtgaggagcctgacagcacgacaccgccagccaagtcccccaggggcggacctggatctggaggccatggccctctgcgctaccggagcagcagctccacagaacagagcctcatgatggggttgagggtggaggatggtgcccagcagtgcctcgactgtggcttgtgctttgcctcccctggctccctgagccgacaccgtttcatcagccacaagaagagacggggtgtgggtaaagccagtgccctggggctgggggatggggaggaagaggcccctccatcaaggtctgaccccgatggtggagactcacccctgcctgcttctggaggcccactgacctgtaaggtctgtggcaagagctgcgacagccctctaaacctcaagacccacttccgcacgcatggcatggcgttcatcagggctcggcagggggctgttggggacaactagtctccaaggcctgggactgaccagccccttcctcttggagcctggttttccctactgctgcctgatccctcggctggggagttttcattaacattaatattttgttaattcctgtctctccaacctgaagaagaagagcatttgaggattattctagttatttgcaacctccctttgggtttggccctggagtcctagtagagtggaccctccattcctcctttctgagcccaacactaattaattttatgctcctgctgcagaacccccagtgtgggcctgggggtgggaggatgggacttaggtatgcctgctagacaggttcagggaaggactgatgggggtgtcatggatggacacacctctccacaattccttcaggcatggactggaactttcctcctctaggccgggccctgccctagtgcccacccccgcccccgcccccgcccaaccccaactcactggcactcaagccccctacccctgcagtgcctttcacttctttttttccccagaaatccggggcgggggggtggggggttggtagggatgagtcctgtcaagggggccacaggagaggaggggacaggctctcaggaatcctttattcttgtagtaataataatactaacaaacagttggggaactagggagaaaaccagaccattaaaactgtttgtggtcgaatctc

SEQ ID NO: 203478 - DNA, 4831 bp, Homo sapiens
  Payload ID: 20124
  Gene Name: zinc finger protein 687
  Uniprot ID: Q8N1G0
  ENST ID: ENST00000336715
  CDS Start-End: 147-3860
gagggagtggggaggccgaaccggagagaagcaggaagtagcggcggccgcggggagggcggcggtggctgcagcggctggagcggggtagagaccgccgggtctcggcccgcaccaggagcggaacaagtctgggatctgccgatatgggggatatgaagacccctgattttgatgacctccttgctgcctttgacatccctgacattgatgcgaatgaagccatccattctgggccagaagaaaatgaggggcctggaggcccagggaagccagaaccaggtgtaggaagtgaatctgaagacacagcagcagcctctgctggggatggccctggagttccagcccaggcctctgaccatggcctgccaccgccagacatttctgtagtcagtgtcattgtcaagaacactgtgtgtcccgagcagtctgaggccctggctggaggctcagcaggagacggggcccaggctgctggggtaactaaagaagggcctgtggggcctcatcgaatgcagaatggttttgggagccctgaaccttccctcccaggaactccccactctcctgctcctcccagtgggggcacctggaaagaaaaaggcatggaaggcaaaactcccttggacctgtttgctcattttggccctgagccaggggaccactcagatccgctgcctccctctgcaccctctcccactcgggagggggctctgaccccgcctcctttcccctcttcctttgagctggcccaggagaatggcccaggcatgcagccacctgtttcttccccaccattgggggccttgaagcaggagagctgcagcccccatcatccccaggtcctagcccaacaaggctcaggctccagccctaaggccacggacatccctgccagtgcctcgcctcccccagttgctggggtgcccttcttcaagcagtctccagggcaccagagccctcttgcctcccccaaagtgcccgtctgtcagcccttgaaggaagaagatgatgatgaggggccagtggacaagtcttccccaggaagtccccagagtccctctagtggggccgaggctgcagatgaggacagcaatgactcccctgcctccagctcctctaggcctcttaaggtgcggatcaagaccattaaaacatcctgcgggaatatcacaaggactgtaactcaggtcccctcagatcctgatccacctgcccccttggctgagggggccttcttggctgaggctagcctcttgaagctgtcccctgcaacacctacttctgagggtccaaaggtggtgagcgtacagttgggtgatggtacaaggctgaaaggcactgtgctgcctgtggccaccatccagaacgccagtactgccatgctgatggcagccagtgtggctcgcaaggctgtggtgctgcctggggggactgccaccagccctaagatgattgctaagaacgtgctaggcctggtgccccaagccctgcctaaggctgacgggcgggcagggctggggactgggggacagaaggtgaatggtgcctcggtggtgatggtgcaaccttcaaagacagctactgggccaagtacagggggcggcacagtgatatcacggacccagtccagcctggtggaggccttcaacaagatcctcaacagcaagaacctgctccctgcctataggccaaacctgagcccaccagctgaggctgggctggccctgcctcccaccggctaccgctgcctggagtgtggggatgccttctcattggagaagagcctggcacggcactatgaccgtcggagcatgcgcatcgaggtcacctgcaaccactgcgcccgccgcctggtcttcttcaacaagtgcagcctgctcctgcatgcacgtgaacacaaggacaaggggctcgtcatgcagtgctcacatttggtcatgaggcctgtagcccttgaccagatggtggggcagccggacatcacaccgctgctgcctgtagctgtcccacctgtctctggacctctggccttgcctgccttgggcaagggtgagggggccatcacctcctctgccattactacagttgctgctgaggcccctgtcctgccgctctccacagagccgcctgctgccccggccacctctgcttacacatgctttcgctgcctggagtgcaaggaacagtgccgggacaaggctggcatggcagctcacttccagcagctcggcccccctgcccctggggccaccagcaatgtgtgcccaacctgccccatgatgctccccaatcgctgcagcttcagcgcccaccagcgcatgcataagaatcgacccccccatgtctgtcctgagtgtgggggcaacttcctgcaagccaattttcagacccatctccgggaggcctgtctgcacgtctctcgccgtgtaggatacaggtgccccagctgttcagtggtgtttgggggtgtgaactccatcaagtcccacatccagacgtcgcactgcgaggttttccacaagtgccccatctgccccatggccttcaagtctgggccaagtgcccatgcccacctctactcccagcatcccagcttccaaactcagcaggccaagctgatctacaagtgcgccatgtgcgacacagtcttcactcacaaacccctcctctcctcacacttcgaccagcacttgctgccccagcgtgtcagtgtctttaagtgcccgtcttgtcctctgctctttgcccaaaaaaggaccatgctggaacatctcaagaacacccatcagtctgggcgcttggaggagactgctgggaaaggggccgggggtgccctgctgacccccaagactgagcctgaggagctggctgtttctcagggaggggcagcccctgctactgaggagtcgtcttcatcttcagaagaggaggaagtacccagctcccctgagcccccccgtccagccaaacggcctcggcgggaactagggagcaaaggcctcaagggtgggggtggggggcctggaggctggacctgtggcctgtgtcactcctggttccctgagcgtgatgaatacgtggcccacatgaagaaggagcatggcaagtcagtgaaaaagttcccctgtcgcctgtgtgagcgctccttctgctccgcccccagcctgaggcgccatgtcagagttaatcacgagggcatcaagcgagtttacccctgcaggtattgcacagagggaaaacgcaccttcagcagccgcctgatcctagagaaacatgtccaggtccggcacggcttgcagcttggggcccagtcccctggccgggggaccaccttggctcggggttccagtgccagagcccaggggccaggtcggaaacgccgccagtcttctgactcttgcagtgaggagcctgacagcacgacaccgccagccaagtcccccaggggcggacctggatctggaggccatggccctctgcgctaccggagcagcagctccacagaacagagcctcatgatggggttgagggtggaggatggtgcccagcagtgcctcgactgtggcttgtgctttgcctcccctggctccctgagccgacaccgtttcatcagccacaagaagagacggggtgtgggtaaagccagtgccctggggctgggggatggggaggaagaggcccctccatcaaggtctgaccccgatggtggagactcacccctgcctgcttctggaggcccactgacctgtaaggtctgtggcaagagctgcgacagccctctaaacctcaagacccacttccgcacgcatggcatggcgttcatcagggctcggcagggggctgttggggacaactagtctccaaggcctgggactgaccagccccttcctcttggagcctggttttccctactgctgcctgatccctcggctggggagttttcattaacattaatattttgttaattcctgtctctccaacctgaagaagaagagcatttgaggattattctagttatttgcaacctccctttgggtttggccctggagtcctagtagagtggaccctccattcctcctttctgagcccaacactaattaattttatgctcctgctgcagaacccccagtgtgggcctgggggtgggaggatgggacttaggtatgcctgctagacaggttcagggaaggactgatgggggtgtcatggatggacacacctctccacaattccttcaggcatggactggaactttcctcctctaggccgggccctgccctagtgcccacccccgcccccgcccccgcccaaccccaactcactggcactcaagccccctacccctgcagtgcctttcacttctttttttccccagaaatccggggcgggggggtggggggttggtagggatgagtcctgtcaagggggccacaggagaggaggggacaggctctcaggaatcctttattcttgtagtaataataatactaacaaacagttggggaactagggagaaaaccagaccattaaaactgtttgtggtcgaatctccattcaggcctctctttttctgtgacttggacaatgtggagttgaagcgggtgagagaacatggaaggcccgcccttctcagggaagaggtggtagtgaccaagacaggcagggaaaaagcaaacttctatgtagtgccttttgtatcttggacactgaggcatccgttcatacctcatcacccatctccccctgcactcccccagaaaacctggaaatgacacaagtggctaactaaggactttatttcaaacaaaaattaaaaataaaaaattga

SEQ ID NO: 203479 - DNA, 893 bp, Homo sapiens
  Payload ID: 20124
  Gene Name: zinc finger protein 687
  ENST ID: ENST00000443959
  CDS Start-End: 453-893
gttacgctgtcgcccaggagctgaaccgcgcgaggaccccatccatcagattatatggcgatttagacggtgggaagaccgcaaggaaatggtcagcggatgacgtaatgtttggggtggcgtcccattctgtaacttctgtacggcatcagtgacacgggtttagcttgaaacagcgcaaaaggacctacacttctgtgctccactccgactcaatgcggttctgctctcagtgcccaccacacagaagctgggttccttacattcgcgaaagtgaactgcagcttcaagcttcgagcggccagtagggagcgaggggcggagacgcacctgggtgctcccccttccagtaggcaagctgggaagcaggctggcttctttctaagcgacagtggcggaggccaatcgtttacgagactcgtagatggggcagacggaccccggcgcagccaatggggagaggtctgggatctgccgatatgggggatatgaagacccctgattttgatgacctccttgctgcctttgacatccctgacattgatgcgaatgaagccatccattctgggccagaagaaaatgaggggcctggaggcccagggaagccagaaccaggtgtaggaagtgaatctgaagacacagcagcagcctctgctggggatggccctggagttccagcccaggcctctgaccatggcctgccaccgccagacatttctgtagtcagtgtcattgtcaagaacactgtgtgtcccgagcagtctgaggccctggctggaggctcagcaggagacggggcccaggctgctggggtaactaaagaagggcctgtggggcctcatcgaatgcagaatggttttgggagccctgaaccttccctcccaggaactccc

SEQ ID NO: 203480 - DNA, 3277 bp, Homo sapiens
  Payload ID: 20124
  Gene Name: zinc finger protein 687
  ENST ID: ENST00000426871
  CDS Start-End: 1-2120
gcactgtgctgcctgtggccaccatccagaacgccagtactgccatgctgatggcagccagtgtggctcgcaaggctgtggtgctgcctggggggactgccaccagccctaagatgattgctaagaacgtgctaggcctggtgccccaagccctgcctaaggctgacgggcgggcagggctggggactgggggacagaaggtgaatggtgcctcggtggtgatggtgcaaccttcaaagacagctactgggccaagtacagggggcggcacagtgatatcacggacccagtccagcctggtggaggccttcaacaagatcctcaacagcaagaacctgctccctgcctataggccaaacctgagcccaccagctgaggctgggctggccctgcctcccaccggctaccgctgcctggagtgtggggatgccttctcattggagaagagcctggcacggcactatgaccgtcggagcatgcgcatcgaggtcacctgcaaccactgcgcccgccgcctggtcttcttcaacaagtgcagcctgctcctgcatgcacgtgaacacaaggacaaggggctcgtcatgcagtgctcacatttggtcatgaggcctgtagcccttgaccagatggtggggcagccggacatcacaccgctgctgcctgtagctgtcccacctgtctctggacctctggccttgcctgccttgggcaagggtgagggggccatcacctcctctgccattactacagttgctgctgaggcccctgtcctgccgctctccacagagccgcctgctgccccggccacctctgcttacacatgctttcgctgcctggagtgcaaggaacagtgccgggacaaggctggcatggcagctcacttccagcagctcggcccccctgcccctggggccaccagcaatgtgtgcccaacctgccccatgatgctccccaatcgctgcagcttcagcgcccaccagcgcatgcataagaatcgacccccccatgtctgtcctgagtgtgggggcaacttcctgcaagccaattttcagacccatctccgggaggcctgtctgcacgtctctcgccgtgtaggatacaggtgccccagctgttcagtggtgtttgggggtgtgaactccatcaagtcccacatccagacgtcgcactgcgaggttttccacaagtgccccatctgccccatggccttcaagtctgggccaagtgcccatgcccacctctactcccagcatcccagcttccaaactcagcaggccaagctgatctacaagtgcgccatgtgcgacacagtcttcactcacaaacccctcctctcctcacacttcgaccagcacttgctgccccagcgtgtcagtgtctttaagtgcccgtcttgtcctctgctctttgcccaaaaaaggaccatgctggaacatctcaagaacacccatcagtctgggcgcttggaggagactgctgggaaaggggccgggggtgccctgctgacccccaagactgagcctgaggagctggctgtttctcagggaggggcagcccctgctactgaggagtcgtcttcatcttcagaagaggaggaagtacccagctcccctgagcccccccgtccagccaaacggcctcggcgggaactagggagcaaaggcctcaagggtgggggtggggggcctggaggctggacctgtggcctgtgtcactcctggttccctgagcgtgatgaatacgtggcccacatgaagaaggagcatggcaagtcagtgaaaaagttcccctgtcgcctgtgtgagcgctccttctgctccgcccccagcctgaggcgccatgtcagagttaatcacgagggcatcaagcgagtttacccctgcagaagcaagggccctggccttcgggctgtgccgctgctgccatcctgtcctctcccatttcaggtattgcacagagggaaaacgcaccttcagcagccgcctgatcctagagaaacatgtccaggtccggcacggcttgcagcttggggcccagtcccctggccgggggaccaccttggctcggggttccagtgccagagcccaggggccaggtcggaaacgccgccagtcttctgactcttgcagtgaggagcctgacagcacgacaccgccagccaagtcccccaggggcggacctggatctggaggccatggccctctgcgctaccggagcagcagctccacagaacagagcctcatgatggggttgagggtggaggatggtgcccagcagtgcctcgactgtggcttgtgctttgcctcccctggctccctgagccgacaccgtttcatcagccacaagaagagacggggtgtgggtaaagccagtgccctggggctgggggatggggaggaagaggcccctccatcaaggtctgaccccgatggtggagactcacccctgcctgcttctggaggcccactgacctgtaaggtctgtggcaagagctgcgacagccctctaaacctcaagacccacttccgcacgcatggcatggcgttcatcagggctcggcagggggctgttggggacaactagtctccaaggcctgggactgaccagccccttcctcttggagcctggttttccctactgctgcctgatccctcggctggggagttttcattaacattaatattttgttaattcctgtctctccaacctgaagaagaagagcatttgaggattattctagttatttgcaacctccctttgggtttggccctggagtcctagtagagtggaccctccattcctcctttctgagcccaacactaattaattttatgctcctgctgcagaacccccagtgtgggcctgggggtgggaggatgggacttaggtatgcctgctagacaggttcagggaaggactgatgggggtgtcatggatggacacacctctccacaattccttcaggcatggactggaactttcctcctctaggccgggccctgccctagtgcccacccccgcccccgcccccgcccaaccccaactcactggcactcaagccccctacccctgcagtgcctttcacttctttttttccccagaaatccggggcgggggggtggggggttggtagggatgagtcctgtcaagggggccacaggagaggaggggacaggctctcaggaatcctttattcttgtagtaataataatactaacaaacagttggggaactagggagaaaaccagaccattaaaactgtttgtggtcgaatctc

SEQ ID NO: 203481 - DNA, 4185 bp, Homo sapiens
  Payload ID: 20124
  Gene Name: zinc finger protein 687
  ENST ID: ENST00000449313
  CDS Start-End: 126-2483
cggagagaagcaggaagtagcggcggccgcggggagggcggcggtggctgcagcggctggagcggggtagagaccgccgggtctcggcccgcaccaggagcggaacaagtctgggatctgccgatatgggggatatgaagacccctgattttgatgacctccttgctgcctttgacatccctgacattgatgcgaatgaagccatccattctgggccagaagaaaatgaggggcctggaggcccagggaagccagaaccaggtgtaggaagtgaatctgaagacacagcagcagcctctgctggggatggccctggagttccagcccaggcctctgaccatggcctgccaccgccagacatttctgtagtcagtgtcattgtcaagaacactgtgtgtcccgagcagtctgaggccctggctggaggctcagcaggagacggggcccaggctgctggggtaactaaagaagggcctgtggggcctcatcgaatgcagaatggttttgggagccctgaaccttccctcccaggaactccccactctcctgctcctcccagtgggggcacctggaaagaaaaaggcatggaaggcaaaactcccttggacctgtttgctcattttggccctgagccaggggaccactcagatccgctgcctccctctgcaccctctcccactcgggagggggctctgaccccgcctcctttcccctcttcctttgagctggcccaggagaatggcccaggcatgcagccacctgtttcttccccaccattgggggccttgaagcaggagagctgcagcccccatcatccccaggtcctagcccaacaaggctcaggctccagccctaaggccacggacatccctgccagtgcctcgcctcccccagttgctggggtgcccttcttcaagcagtctccagggcaccagagccctcttgcctcccccaaagtgcccgtctgtcagcccttgaaggaagaagatgatgatgaggggccagtggacaagtcttccccaggaagtccccagagtccctctagtggggccgaggctgcagatgaggacagcaatgactcccctgcctccagctcctctaggcctcttaaggtgcggatcaagaccattaaaacatcctgcgggaatatcacaaggactgtaactcaggtcccctcagatcctgatccacctgcccccttggctgagggggccttcttggctgaggctagcctcttgaagctgtcccctgcaacacctacttctgagggtccaaaggtggtgagcgtacagttgggtgatggtacaaggctgaaaggcactgtgctgcctgtggccaccatccagaacgccagtactgccatgctgatggcagccagtgtggctcgcaaggctgtggtgctgcctggggggactgccaccagccctaagatgattgctaagaacgtgctaggcctggtgccccaagccctgcctaaggctgacgggcgggcagggctggggactgggggacagaaggtgaatggtgcctcggtggtgatggtgcaaccttcaaagacagctactgggccaagtacagggggcggcacagtgatatcacggacccagtccagcctggtggaggccttcaacaagatcctcaacagcaagaacctgctccctgcctataggccaaacctgagcccaccagctgaggctgggctggccctgcctcccaccggctaccgctgcctggagtgtggggatgccttctcattggagaagagcctggcacggcactatgaccgtcggagcatgcgcatcgaggtcacctgcaaccactgcgcccgccgcctggtcttcttcaacaagtgcagcctgctcctgcatgcacgtgaacacaaggacaaggggctcgtcatgcagtgctcacatttggtcatgaggcctgtagcccttgaccagatggtggggcagccggacatcacaccgctgctgcctgtagctgtcccacctgtctctggacctctggccttgcctgccttgggcaagggtgagggggccatcacctcctctgccattactacagttgctgctgaggcccctgtcctgccgctctccacagagccgcctgctgccccggccacctctgcttacacatgctttcgctgcctggagtgcaaggaacagtgccgggacaaggctggcatggcagctcacttccagcagctcggcccccctgcccctggggccaccagcaatgtgtgcccaacctgccccatgatgctccccaatcgctgcagcttcagcgcccaccagcgcatgcataagaatcgacccccccatgtctgtcctgagtgtgggggcaacttcctgcaagccaattttcagacccatctccgggaggcctgtctgcacgtctctcgccgtgtaggatacagaacacccatcagtctgggcgcttggaggagactgctgggaaaggggccgggggtgccctgctgacccccaagactgagcctgaggagctggctgtttctcagggaggggcagcccctgctactgaggagtcgtcttcatcttcagaagaggaggaagtacccagctcccctgagcccccccgtccagccaaacggcctcggcgggaactagggagcaaaggcctcaagggtgggggtggggggcctggaggctggacctgtggcctgtgtcactcctggttccctgagcgtgatgaatacgtggcccacatgaagaaggagcatggcaagtcagtgaaaaagttcccctgtcgcctgtgtgagcgctccttctgctccgcccccagcctgaggcgccatgtcagagttaatcacgagggcatcaagcgagtttacccctgcaggtattgcacagagggaaaacgcaccttcagcagccgcctgatcctagagaaacatgtccaggtccggcacggcttgcagcttggggcccagtcccctggccgggggaccaccttggctcggggttccagtgccagagcccaggggccaggtcggaaacgccgccagtcttctgactcttgcagtgaggagcctgacagcacgacaccgccagccaagtcccccaggggcggacctggatctggaggccatggccctctgcgctaccggagcagcagctccacagaacagagcctcatgatggggttgagggtggaggatggtgcccagcagtgcctcgactgtggcttgtgctttgcctcccctggctccctgagccgacaccgtttcatcagccacaagaagagacggggtgtgggtaaagccagtgccctggggctgggggatggggaggaagaggcccctccatcaaggtctgaccccgatggtggagactcacccctgcctgcttctggaggcccactgacctgtaaggtctgtggcaagagctgcgacagccctctaaacctcaagacccacttccgcacgcatggcatggcgttcatcagggctcggcagggggctgttggggacaactagtctccaaggcctgggactgaccagccccttcctcttggagcctggttttccctactgctgcctgatccctcggctggggagttttcattaacattaatattttgttaattcctgtctctccaacctgaagaagaagagcatttgaggattattctagttatttgcaacctccctttgggtttggccctggagtcctagtagagtggaccctccattcctcctttctgagcccaacactaattaattttatgctcctgctgcagaacccccagtgtgggcctgggggtgggaggatgggacttaggtatgcctgctagacaggttcagggaaggactgatgggggtgtcatggatggacacacctctccacaattccttcaggcatggactggaactttcctcctctaggccgggccctgccctagtgcccacccccgcccccgcccccgcccaaccccaactcactggcactcaagccccctacccctgcagtgcctttcacttctttttttccccagaaatccggggcgggggggtggggggttggtagggatgagtcctgtcaagggggccacaggagaggaggggacaggctctcaggaatcctttattcttgtagtaataataatactaacaaacagttggggaactagggagaaaaccagaccattaaaactgtttgtggt

SEQ ID NO: 203482 - DNA, 766 bp, Homo sapiens
  Payload ID: 20124
  Gene Name: zinc finger protein 687
  ENST ID: ENST00000436614
  CDS Start-End: 1-300
cgcaccttcagcagccgcctgatcctagagaaacatgtccaggtccggcacggcttgcagcttggggcccagtcccctggccgggggaccaccttggctcggggttccagtgccagagcccagtttcttccacttttcttcaggggccaggtcggaaacgccgccagtcttctgactcttgcagtgaggagcctgacagcacgacaccgccagccaagtcccccaggggcggacctggatctggaggccatggccctctgcgctaccggagcagcagctccacagaacagagcctcatgatggggttgagggtggaggatggtgcccagcagtgcctcgactgtggcttgtgctttgcctcccctggctccctgagccgacaccgtttcatcagccacaagaagagacggggtgtgggtaaagccagtgccctggggctgggggatggggaggaagaggcccctccatcaaggtctgaccccgatggtggagactcacccctgcctgcttctggaggcccactgacctgtaaggtctgtggcaagagctgcgacagccctctaaacctcaagacccacttccgcacgcatggcatggcgttcatcagggctcggcagggggctgttggggacaactagtctccaaggcctgggactgaccagccccttcctcttggagcctggttttccctactgctgcctgatccctcggctggggagttttcattaacattaatattttgttaattcctgtctctccaacctga

SEQ ID NO: 203483 - DNA, 2506 bp, Homo sapiens
  Payload ID: 20125
  Gene Name: zinc finger protein 688
  Uniprot ID: P0C7X2
  ENST ID: ENST00000223459
  CDS Start-End: 1106-1936
gccaagcattgggtgtgcgcctgtggtcccagctactcgggaggctgaggtgagaagatcgcttcagcccgggaggtcgagtctgcagtgagctaggatcgcactgctgggccacagagcaagaccctgtctcaaaacaaacaaaaaataaattcatgtatgttagcaacaattactatttaatttaaaacttccccattccgattccatcctcaccaagcacgttccttcgcctgcagcttcggtctagagcctgagcgagccgagctgcggatgccaggggctgggtggactccgcagctaagctactgtaaaacacgcacctgcttctaccgcgggtgtacacatggtttgccagggtgtgcgcgtcttcccaaggggtctggggaccaaattccagctcccgccatcgggaggcacggtaagagaccgtaggggacacaatcccgagcaccgcagatgccgaggtctccgctgcgctccagtctgtcaacagaggcttcaggaccgcggggtcccttcaaatgccccgccagtcccaggccaatcaccgcgcagcttcttccgggatcgtcgccaatcatcggccgttgcgtattgcgggtacagaggggtaagtgaagcttcgggcccttacatctttcttgaaggcaagaagcctctcctctacttcccagacaccccgcctcccccactagaaaaagcagccgaagcggctttatttaagggcaagtgggacgatgaggccagagaagtcagaaaggctccatatttgatatggtcaaataatggcgcccttaagagcagcctgtgacaattgaagggtggtcgccatattttcagaaggcaccttccgggtcccttaacccgggtgtctatgtccaagcggccatgaagtgaataaacactgaggaattatatttgtccctatcagaatcctcgaatccctagcagccagtccctgctacttcggttgcctcggctgcgttcggacgccacggctgggcggggccgcccttcctgtggacaacgacagctgaggccgggagcggggaggcggcggctccagggacctggcggccgccgatcggggctgcgaggccccatggcgccgcccccagccccgctcctggcgccgaggcccggggagacccggcctggttgcaggaagcccgggactgtgagcttcgcggacgtggccgtgtacttctccccggaggagtggggctgtctgcggcccgcgcagagggctctgtaccgggacgtgatgcaggagacctacggccacctgggcgcgctcggattcccaggccccaaaccagccctcatctcttggatggaacaggagagtgaggcttggagccccgccgcccaggatcctgagaagggggaaagactgggaggagctcggagaggagatgtcccaaacaggaaggaagaggaaccggaggaagtcccaagagccaaagggcctagaaaggctcctgtgaaggagagtcctgaagtgctggtggaacgcaaccctgacccagctattagcgtggccccggcacgggcacagccacccaaaaatgctgcctgggacccgaccacaggagcacagcccccggcacccatacccagcatggatgctcaggccggccagcggcgccacgtgtgcacggactgcggccgccgcttcacctacccctcactgctggtcagccacaggcgcatgcactcgggggagcggcctttcccctgccccgagtgtggcatgcgcttcaagaggaagttcgcagtggaagcgcaccagtggatccaccgctcctgctccggggggcggcggggccggaggcctgggatccgggctgtgcctcgggcccccgtccgaggtgaccgggacccgcctgtgctcttccggcactacccagacatcttcgaggagtgcggctgagcggcaccgcaggctggagttgagcctgaccttggcacgaaggactgacggatccctgaggtgggccactgagtcggggactccggaactgaaattcatgccctgggctttcctcaaggatccctcaagtttccaacttgtaaaaagaaaagtgcctgtaaagattcgaatagattagacttgccacccatctccccagtcttttgtttaacaaaaaaaaaaaaaaaaaaaaaaaaaaagaagagagtgagaccctggactcatttcaaagtgttatctgaagatcaggtgcaacagagacctttatatcatctcaggaactagccactccttatctatttcagatgcagatgctgagggggaccagggcctggggaggggacctacatggagggcgtggtcaaaccctggctaattgtcatcagcaggggacccagacactggagtggatgggagtagaatagatgcaggtggcacaaatccagcctctgttgggagaccaaggagggaggatcgtttgagtccaggagttcagaccagcctgagcaacaggctatctagcgatatcta

SEQ ID NO: 203484 - DNA, 1492 bp, Homo sapiens
  Payload ID: 20125
  Gene Name: zinc finger protein 688
  Uniprot ID: P0C7X2
  ENST ID: ENST00000563276
  CDS Start-End: 460-1248
gccaagcattgggtgtgcgcctgtggtcccagctactcgggaggctgaggtgagaagatcgcttcagcccgggaggtcgagtctgcagtgagctaggatcgcactgctgggccacagagcaagaccctgtctcaaaacaaacaaaaaataaattcatgtatgttagcaacaattactatttaatttaaaacttccccattccgattccatcctcaccaagcacgttccttcgcctgcagcttcggtctagagcctgagcgagccgagctgcggatgccaggggctgggtggactccgcagctaagctactgtaaaacacgcacctgcttctaccgcgggtgtacacatggtttgccagggtgtgcgcgtcttcccaaggggtctggggaccaaattccagctcccgccatcgggaggcacggtaagagaccgtaggggacacaatcccgagcaccgcagatgccgaggtctccgctgcgctccagtctgtcaacagaggcttcaggaccgcggggtcccttcaaatgccccgccagtcccaggccaatcaccgcgcagcttcttccgggatcgtcgccaatcatcggccgttgcgtattgcgggtacagaggggattcccaggccccaaaccagccctcatctcttggatggaacaggagagtgaggcttggagccccgccgcccaggatcctgagaagggggaaagactgggaggagctcggagaggagatgtcccaaacaggaaggaagaggaaccggaggaagtcccaagagccaaagggcctagaaaggctcctgtgaaggagagtcctgaagtgctggtggaacgcaaccctgacccagctattagcgtggccccggcacgggcacagccacccaaaaatgctgcctgggacccgaccacaggagcacagcccccggcacccatacccagcatggatgctcaggccggccagcggcgccacgtgtgcacggactgcggccgccgcttcacctacccctcactgctggtcagccacaggcgcatgcactcgggggagcggcctttcccctgccccgagtgtggcatgcgcttcaagaggaagttcgcagtggaagcgcaccagtggatccaccgctcctgctccggggggcggcggggccggaggcctgggatccgggctgtgcctcgggcccccgtccgaggtgaccgggacccgcctgtgctcttccggcactacccagacatcttcgaggagtgcggctgagcggcaccgcaggctggagttgagcctgaccttggcacgaaggactgacggatccctgaggtgggccactgagtcggggactccggaactgaaattcatgccctgggctttcctcaaggatccctcaagtttccaacttgtaaaaagaaaagtgcctgtaaagattcgaatagattagacttgccacccatctccccagtcttttgtttaacaaaaaaaaaaaaaaaaaaaaaaaaaaagaaga

SEQ ID NO: 203485 - DNA, 427 bp, Homo sapiens
  Payload ID: 20125
  Gene Name: zinc finger protein 688
  ENST ID: ENST00000566632
  CDS Start-End: 1-427
cagccacctcccgttcccagggcttcaggtaccccctcgggagtgttttcacccgcatccatttcattcaggcagcagcactgcagccccttccaggattcccaggccccaaaccagccctcatctcttggatggaacaggagagtgaggcttggagccccgccgcccaggatcctgagaagggggaaagactgggaggagctcggagaggagatgtcccaaacaggaaggaagaggaaccggaggaagtcccaagagccaaagggcctagaaaggctcctgtgaaggagagtcctgaagtgctggtggaacgcaaccctgacccagctattagcgtggccccggcacgggcacagccacccaaaaatgctgcctgggacccgaccacaggagcacagcccccggcacccatacccagcatggatgc

SEQ ID NO: 203486 - DNA, 244 bp, Homo sapiens
  Payload ID: 20125
  Gene Name: zinc finger protein 688
  ENST ID: ENST00000563707
  CDS Start-End: 7-225
ggccccatggcgccgcccccagccccgctcctggcgccgaggcccggggagacccggcctggttgcaggaagcccgggactgtgagcttcgcggacgtggccgtgtacttctccccggaggagtggggctgtctgcggcccgcgcagagggctctgtaccgggacgtgatgcaggagacctacggccacctgggcgcgctcggcccccacttccagcatccctaaagaaattcaactgtgttgg

SEQ ID NO: 203487 - DNA, 540 bp, Homo sapiens
  Payload ID: 20125
  Gene Name: zinc finger protein 688
  ENST ID: ENST00000567855
  CDS Start-End: 24-356
gccgatcggggctgcgaggccccatggcgccgcccccagccccgctcctggcgccgaggcccggggagacccggcctggttgcaggaagcccgggactgtgagcttcgcggacgtggccgtgtacttctccccggaggagtggggctgtctgcggcccgcgcagagggctctgtaccgggacgtgatgcaggagacctacggccacctgggcgcgctcggattcccaggccccaaaccagccctcatctcttggatggaacaggagagtgaggcttggagccccgccgcccaggatcctgagaagggggaaagactgggaggagctcggagaggcccccacttccagcatccctaaagaaattcaactgtgttgggtactagaggagtaaagaaggcagacctggtacaaagttttcagaacatgggacagcggtcctgtgaggactgggagcccagtccaaccaggcactccagcctgggtgacagagtgagactccgtctcaaaaataaataaataaataaataaataaataaataaa

SEQ ID NO: 203488 - DNA, 3547 bp, Homo sapiens
  Payload ID: 20126
  Gene Name: zinc finger protein 689
  Uniprot ID: Q96CS4
  ENST ID: ENST00000287461
  CDS Start-End: 339-1841
ttgagggcaaagaggttaggaagccggcatggcgctccggtcaataaaatcgatagctggaagctgcctgtgttccaggcaaaggcggtgcggtagcagcgccgccattttccccgaaggcatcttccggtgcctttcacccaagttcgggcaggagtttcctgaataacagcaaaaggtttccgttagccccgcgggcgaccaattccgattccctccgggcctccccggccacgctcagccctggtccggcaggggctcctcgatcccaggggccgccagcgcccgagggccgaggcctggacacggaaggccgtggcgccggcttctcgggtcccatggcgccaccttcggctccgctccctgcgcagggaccaggaaaggccagacccagtcggaaaaggggcaggaggccgagggctctgaagttcgtggacgtggccgtgtacttctccccggaggagtggggctgcctgcggcccgcgcagagggccctgtaccgggacgtgatgcgggagacctacggtcacctgggcgcgctcgggtgcgcaggtcccaaaccagccctcatctcctggttggaacgaaacaccgatgactgggaaccggctgctctagatccgcaggagtacccgagagggctaacagtccagagaaaaagcagaaccagaaagaagaatggggagaaggaagtattcccgcctaaggaggcaccccgaaaggggaagcgaggccggaggcccagcaaaccccgactgattcctaggcagacgtccgggggccccatctgccctgactgcggctgtaccttccctgatcatcaggccctggagagccacaagtgcgcccagaatctaaaaaagccttacccttgcccagactgtgggcgccgcttttcctatccatccctgctggtcagtcaccggcgggcacactccggcgagtgcccctatgtttgtgaccagtgtggcaaacgtttctcccagcgcaagaacctctcccagcaccaggtcatccatacaggggagaagccctatcactgccctgactgtggtcgctgcttccggaggagccggtccttggccaatcaccggaccacacacacaggtgaaaaaccccaccagtgccctagctgtggacgtcgcttcgcctacccctccctgctagccatccaccagcgtacacacacgggagagaagccctacacttgcctcgagtgcaaccgccgcttccgccagcgcacggccctcgtcatccaccagcgcatccacacgggcgagaagccctacccgtgcccggactgcgagcggcgcttctcctcctcctctcgcctggtcagtcaccggcgtgtgcactctggggagcgtccctatgcctgcgagcactgtgaggcccgcttctcccagcgcagcacgctgctccagcaccagctcttgcacaccggagagaagccctacccctgcccagactgtgggcgtgccttccggcggagcggctccctggccatccatcgcagcacgcacacagaggagaagctgcacgcctgcgacgactgtggtcgccgctttgcctacccctcactgctggccagccaccggcgcgtgcactcgggcgagcggccctatgcctgcgacctttgctccaagcgttttgctcagtggagccacctggcccagcaccagctgctgcacacgggggagaagcctttcccctgcctcgagtgtggccggtgcttccgccagaggtggtctctggctgtccacaagtgtagccccaaggccccaaactgtagccctagatctgctatcgggggctccagtcagaggggcaacgcccattagaaggggaaggactgcctacgttcatttcattttatggagggtcccagaaaagggaaggaggagccccaggtcatacagggcagagtcagaactaaacccgggtctcctgctgcacagagctgaactttgtatcttgcaatgcgctggctgcctccctgtgcgtgtctggaacagtcccattaggagaggtgacgtcatttgcttaaagttttccaagctaccctatcctaaaatagtttgtgtggatatcagggctaaaagttctccccatctattttaggggctgtctgcttttctagtctgtccacacagggattacctgtcatcttgcatgcaatcaggagaatctcataggggcaggaccttcccctactctgcctcttcctccatactaggttggaaaaatctggtttagcccactttttgcaacactcctgccaagtggtcttctacccattgcttgaaaatctctcttgacagggagctcactacctcacaaggcaggtcatttcattgtgggatctatagaaggttaagtaccacattctcctctaaaccttgcctacgacatgtttaatacttcatctacatagcagcccttcagataatcacaaccactttgcccccaagttttcaggttaagtagcatgaatttggtcattccttaaagacagggtttcaatttccacacatgatctctgcaaacaggcactgggttttcagtgtcctttttgaagggtcatataaaaataaggtaacaccacagtgccactacaccttctggggctggacttgtttcagcagctttggttgcactgaatttgggggagctgcatggtaccaggggtttattgggttgcagatatataaatgccctaaacttaaaaaaaaaaaaaaaagctataaaactaagtcttcatcttgtatttggaaaattggttcaagctgggtatgagacataagtgtagtcagctctgggagaaggttgctcttaaggagaagcagggacctgtggtttagcagcaggaagtgcaaatgggactggcttgtgctctacctggcagacctggattggcttcaggcagccagtgcctggaaaagcctggagaattgggccgtacttgaccctgattctcatcaggcacagatgaatcacaggcacctaagaatcggcacagaacttccatgaggcctcagtcagcattttttcacaaaatgagctgaggccattcaaggaggctagaaagagggaactgaatccagagaggaagagtctatagtcatcaagttgtatccatgccagcctccctccacagaggtggcagcagcgtggctcaatctgatccacctccatggcacccactgggtaggtgcttcataaagctttaccgagttaaatgtgaacaaggcctaccactttgccttgggcagctgcaccaaattagaatttccagatgtgactcatctcatattccaacagctggagtgggtcatcctttacccctgtggctccttcctacagctctcctgatctcagcacaagcaggggagcagctgggggaacacagctttatgtaattacctctgttcaatatttagcaagttgcattgtaacattgtaactgtttgtttctccttggatgatgagctacccccaagaaggggtcatatcagattgggtctcattaaaatgtctgatgaatgaa

SEQ ID NO: 203489 - DNA, 2713 bp, Homo sapiens
  Payload ID: 20126
  Gene Name: zinc finger protein 689
  ENST ID: ENST00000611647
  CDS Start-End: 334-1830
ggcaaagaggttaggaagccggcatggcgctccggtcaataaaatcgatagctggaagctgcctgtgttccaggcaaaggcggtgcggtagcagcgccgccattttccccgaaggcatcttccggtgcctttcacccaagttcgggcaggagtttcctgaataacagcaaaaggtttccgttagccccgcgggcgaccaattccgattccctccgggcctccccggccacgctcagccctggtccggcaggggctcctcgatcccaggggccgccagcgcccgagggccgaggcctggacacggaaggccgtggcgccggcttctcgggtcccatggcgccaccttcggctccgctccctgcgcagggaccaggaaaggccagacccagtcggaaaaggggcaggaggccgagggctctgaagttcgtggacgtggccgtgtacttctccccggaggagtggggctgcctgcggcccgcgcagagggccctgtaccgggacgtgatgcgggagacctacggtcacctgggcgcgctcgggtgcgcaggtcccaaaccagccctcatctcctggttggaacgaaacaccgatgactgggaaccggctgctctagatccgcaggagtacccgagagggctaacagtccagagaaaaagcagaaccagaaagaagaatggggagaaggaagtattcccgcctaaggaggcaccccgaaaggggaagcgaggccggaggcccagcaaaccccgactgattcctaggcagacgtccgggggccccatctgccctgactgcggctgtaccttccctgatcatcaggccctggagagccacaagtgcgcccagaatctaaaaaagccttacccttgcccagactgtgggcgccgcttttcctatccatccctgctggtcagtcaccggcgggcacactccggcgagtgcccctatgtttgtgaccagtgtggcaaacgtttctcccagcgcaagaacctctcccagcaccaggtcatccatacaggggagaagccctatcactgccctgactgtggtcgctgcttccggaggagccggtccttggccaatcaccggaccacacacacaggtgaaaaaccccaccagtgccctagctgtggacgtcgcttcgcctacccctccctgctagccatccaccagcgtacacacacgggagagaagccctacacttgcctcgagtgcaaccgccgcttccgccagcgcacggccctcgtcatccaccagcgcatccacacgggcgagaagccctacccgtgcccggactgcgagcggcgcttctcctcctcctctcgcctggtcagtcaccggcgtgtgcactctggggagcgtccctatgcctgcgagcactgtgaggcccgcttctcccagcgcagcacgctgctccagcaccagctcttgcacaccggagagaagccctacccctgcccagactgtgggcgtgccttccggcggagcggctccctggccatccatcgcagcacgcacacagaggagaagctgcacgcctgcgacgactgtggtcgccgctttgcctacccctcactgctggccagccaccggcgcgtgcactcgggcgagcggccctatgcctgcgacctttgctccaagcgttttgctcagtggagccacctggcccagcaccagctgctgcacacgggggagaagcctttcccctgcctcgagccggtgcttccgccagaggtggtctctgctgtccacaagtgtagccccaaggccccaaactgtagccctagatctgctatcgggggctccagtcagaggggcaacgcccattagaaggggaaggactgcctacgttcatttcattttatggagggtcccagaaaagggaaggaggagccccaggtcatacagggcagagtcagaactaaacccgggtctcctgctgcacagagctgaactttgtatcttgcaatgcgctggctgcctccctgtgcgtgtctggaacagtcccattaggagaggtgacgtcatttgcttaaagttttccaagctaccctatcctaaaatagtttgtgtggatatcagggctaaaagttctccccatctattttaggggctgtctgcttttctagtctgtccacacagggattacctgtcatcttgcatgcaatcaggagaatctcataggggcaggaccttcccctactctgcctcttcctccatactaggttggaaaaatctggtttagcccactttttgcaacactcctgccaagtggtcttctacccattgcttgaaaatctctcttgacagggagctcactacctcacaaggcaggtcatttcattgtgggatctatagaaggttaagtaccacattctcctctaaaccttgcctacgacatgtttaatacttcatctacatagcagcccttcagataatcacaaccactttgcccccaagttttcaggttaagtagcatgaatttggtcattccttaaagacagggtttcaatttccacacatgatctctgcaaacaggcactgggttttcagtgtcctttttgaagggtcatataaaaataaggtaacaccacagtgccactacaccttctggggctggacttgtttcagcagctttggttgcactgaatttgggggagctgcatggtaccaggggtttattgggttgcagatatataaatgccctaaactt

SEQ ID NO: 203490 - DNA, 1438 bp, Homo sapiens
  Payload ID: 20127
  Gene Name: zinc finger protein 69
  Uniprot ID: Q9UC07
  ENST ID: ENST00000340180
  CDS Start-End: 70-519
ccggtctttccagccccgagagggacctggttcctctgcccaggcttctgtcactctgtcacctacgctatgccctgctgtagtcacaggaggtgtagagaggaccccgggacatctgaaagccaggaaatggaggagtgggctttgctggatatttcccagaggaaactctacaaggaagtgatgctggaaactttcaggaacctgacctctgtaggaaaaagttggaaagaccagaacattgaatatgagtaccaaaaccccaggagaaacttcaggagtctcatagaaaagaaagtcaatgaaattaaagatgacagtcattgtggagaaacttttacccaggttccagatgacaggctgaacttccaggagaagaaagcttctcctgaaataaaatcatgtgacagctttgtgtgtggagaagttggcctaggtaactcatcttttaatatgaacatcagaggtgacattggacacaaggcctatgagtatcaggaatatggaccgaagccataaaaaaatctcactctgtcacccaggctggagtgcagtggcatgatctcaggtcgctgcaacctctgcctccagggttcaagcaactctcctgcttcagcctcctgagtagctgggactacaggcatgcaccaccacgccaggctaattttttgtattttttagtagagacagggtttcaccatattggccaggctggtcttgaactccagacctcatgattcgcctgcctcggcctcccaaaatgctgggattacagatatgagccatcatgcccagccgcaaccctaatttttcattcagtcataataccaacagttatctcatgtacctctgagtgccttcttcccaaaagccagcagtaccatacctgctgtcagcaagtgtgtaatataccatagtgataaatatgaccaaaagccataaatgactgtgagatgtatgagaatgacacgtcacattagtaagaagagaaaaattttggccatgtttatgatttgaaatatgttttcctctatcacatttagaaatatagttacaaaatgcccttagttttatcctgattcatcatggtcactgaggagcatcgtctcatatgcctggtatgtgacatgtgtctcttcaacagtaaaagacttggcattggctgggcatggtggctcacgcctgtaatcccagcactttgggaggccgaggtcaggagttagagaccattctgaccaatatgatcaaaccccgtctctactaaaaatacaaaaattagcggggtgtggtggcatgctcctgtaatcctagctattcaggaggctgacgcaggagacttgcttgaatataggaggcagacgttgcagtgagccgaggtcacaccattcactccagcctgggcaacaagagcgaaactccgtttcaaaaaaaaaaaaaa

SEQ ID NO: 203491 - DNA, 569 bp, Homo sapiens
  Payload ID: 20127
  Gene Name: zinc finger protein 69
  ENST ID: ENST00000445911
  CDS Start-End: 107-569
acctcacctttgtccctgcgcgggctgcggctgggatccggtctttccagccccgagagggacctggttcctctgcccaggcttctgtcactctgtcacctacgctatgccctgctgtagtcacaggaggtgtagagaggaccccgggacatctgaaagccaggaaatggaggagtgggctttgctggatatttcccagaggaaactctacaaggaagtgatgctggaaactttcaggaacctgacctctgtaggaaaaagttggaaagaccagaacattgaatatgagtaccaaaaccccaggagaaacttcaggagtctcatagaaaagaaagtcaatgaaattaaagatgacagtcattgtggagaaacttttacccaggttccagatgacaggctgaacttccaggagaagaaagcttctcctgaaataaaatcatgtgacagctttgtgtgtggagaagttggcctaggtaactcatcttttaatatgaacatcagaggtgacattggacacaaggcctatgagtatcaggaatatggaccgaagccatgtaagtgtcaacaac

SEQ ID NO: 203492 - DNA, 2010 bp, Homo sapiens
  Payload ID: 20127
  Gene Name: zinc finger protein 69
  Uniprot ID: Q9UC07
  ENST ID: ENST00000429654
  CDS Start-End: 141-1841
tgttcctccagacactgagggggtcgcattccttacctcacctttgtccctgcgcgggctgcggctgggatccggtctttccagccccgagagggacctggttcctctgcccaggcttctgtcactctgtcacctacgctatgccctgctgtagtcacaggaggtgtagagaggaccccgggacatctgaaagccaggaaatggacccagtggcctttgatgatgttgctgtgaacttcacccaggaggagtgggctttgctggatatttcccagaggaaactctacaaggaagtgatgctggaaactttcaggaacctgacctctgtaggaaaaagttggaaagaccagaacattgaatatgagtaccaaaaccccaggagaaacttcaggagtctcatagaaaagaaagtcaatgaaattaaagatgacagtcattgtggagaaacttttacccaggttccagatgacaggctgaacttccaggagaagaaagcttctcctgaaataaaatcatgtgacagctttgtgtgtggagaagttggcctaggtaactcatcttttaatatgaacatcagaggtgacattggacacaaggcctatgagtatcaggaatatggaccgaagccatgtaagtgtcaacaacctaaaaaagccttcagatatcacccctcctttagaacaccacaaagggatcacactggagagaaaccctatgcttgtaaagaatgtggaaaaacttttatttcccattcaagcattcaaagacacgtggtaatgcacagtggggatggaccttataaatgtaaattttgtgggaaagccttccattgtctcagtttatatcttatccatgaaagaattcacactggagagaaaccatatgaatgtaaacaatgtggtaaatcctttagttattctgctacccttcgaatacacgaaagaactcacactggagaaaagccttatgaatgtcagcaatgtgggaaagcatttcatagtcccagatgctatcgtagacatgaaaggattcacacgggagagaaggcttatcaatgtaaggaatgtggaaaagcattcacgtgtccccagtatgttcgtatacatgaaaggacccactctaggaaaaaaccctatgaatgtacgcagtgtgggaaagcattatcctctcttacaagttttcaaacacacataagaatgcactctggagaaagaccttatgaatgtaagatatgtgggaaaggcttttgttctgccaattcatttcaaagacatgaaaaaactcacagtggagagaaaccctataaatgcaagcaatgtggtaaagccttcattcattccagttcccttcgttatcatgaaaggattcacactggagagaaaccctatgagtgtaagcaatgtgggaaggccttcagatcttcctcacaccttcaattgcatggtaggactcacactggagagaagccctatgaatgtcaggaatgtgggaaagccttcagatctatgaagaaccttcaaagtcatgaaaggacacaaacacacgtaagaatacactctggagaaagaccttataaatgtaagctatgtgggaaaggcttttattgtcccaaatcattgcaaagacatgaaaaaactcacactggagagaaactctatgaatgcaagcaatgtggtgaagccttcagtagttccagttcctttcgataccatgaaaggactcacactggagagaaaccctataaatgcaagcaatgtgggaaagccttcagagctgcctcagtccttcgaatgcatggtaggactcaccctgaagataaaccctatgagtgtaagcaatgagggaaagccttcagatctgcctcacacctttgaatgcatggtaggacacacaatcaagagaaaccatgaatgtaaagaatgtgggaaacccttcaggtctgcccagaaccttcgaattcagtaaaggacacaagcacacataagaatgcattctggatagctgaacaaa

SEQ ID NO: 203493 - DNA, 1910 bp, Homo sapiens
  Payload ID: 20128
  Gene Name: zinc finger protein 691
  Uniprot ID: Q5VV52
  ENST ID: ENST00000372502
  CDS Start-End: 303-1250
atccttcctgggttccggctccggctccagctccttccctcgcctacagaggcggcgctgtccctgatcgagcggcgggagcgagggcctggacgtagtgtcttcaacagttgtaacagcagctgccatttgctgaatgacagcatgtgtcacacactctgctgagtattacaggcatttttttctaatacaaagtcttgtagtgtggaaatacttgcagacttgaaggaattatcagtctttcattttctatcatcagtgtcctatgatagtttgtgcttccctccctcatccctttgttcatgtcactctgttcaccaacccactctgctgaaatgtcgttatttcttcaaggcccggaggaaatgctaccactctcatcagagggttcagagatgggcagtgagaaggagcagagtccagaaccacacctgcctgaggaaggggaagggggtaagccttggagagtggatgactcagagggttcttggatcccacctggggagaaggagcatgggcaagagagcctgtcggatgaactgcaagaaactcatccaaaaaagccatggcagaaagtcactgtccgggctcgagagctaggggaccccattgctcatccaaggcatgaggcagatgagaagccctttatatgtgcccagtgtggcaaaaccttcaataatacctccaacctgagaacacaccagcggatccacactggtgagaagccttacaagtgttctgaatgtggcaagagcttctcgagaagctccaaccgcatccggcacgagcggatccacctggaagagaaacactacaaatgccccaagtgccaggagagctttcggcggcgctcagacctcaccacgcaccagcaagatcacctaggcaagcggccataccgctgtgacatctgtggcaagagcttcagccagagtgccacgctagctgtgcatcaccggacccacctggagccagcaccctacatctgctgtgagtgtgggaagagcttcagcaacagctccagctttggcgtgcatcaccgcacccacacaggtgagagaccttatgagtgcactgagtgtgggcggaccttcagcgatatctccaactttggagcacaccagcggacccacagaggggagaagccctaccggtgcactgtgtgtgggaaacacttctcccggagctcgaatctcatccgccaccagaaaactcacttgggcgaacaggctgggaaagattccagctgaaggagagccccatttagagtgagggagagagagtgagagaccctaacctattggaggaagatcttcagcatcttttgctgctaccttgacctcaagcccttcatcccactttggagaatggttttgtatagcctctgaagtcaggatctcaggaagtcctgaggagggactctggaataaaaacccttgcctctttccaggccaatttctcgtgttggaaagtcagaagacccagtcttggctttactttcttggggtgaaagagaaatagggtaggctcagaacatgctcatgttattaaggcagcagtccccctggcctttgaggaagtacttatgagatgggtgtcactgtctgaaggttctccaaattgtctgtgaactgcttaggtaggagtgcactgcagtttcctgctagttcccacctgttgtgccccaactttgcttctagatctctggggtgggaggagtgaccttctcaatggaaggggcctccttggtctggagaagagatctgaggtcccaccttagaaatgaaagggaaaccctcagggagccatgacccagggaccttcacactcccccatgtttgttacttgttatccctcccccaacctgcctctgttttccccagagtgattagcagtaaaacccttcaatg

SEQ ID NO: 203494 - DNA, 993 bp, Homo sapiens
  Payload ID: 20128
  Gene Name: zinc finger protein 691
  ENST ID: ENST00000372503
  CDS Start-End: 105-993
ttttttccagaaatacttgcagacttgaaggaattatcagtctttcattttctatcatcagtgtcctatgatagtttgtgcttccctccctcatccctttgttcatgtcactctgttcaccaacccactctgctgaaatgtcgttatttcttcaaggcccggaggaaatgctaccactctcatcagagggttcagagatgggcagtgagaaggagcagagtccagaaccacacctgcctgaggaaggggaagggggtaagccttggagagtggatgactcagagggttcttggatcccacctggggagaaggagcatgggcaagagagcctgtcggatgaactgcaagaaactcatccaaaaaagccatggcagaaagtcactgtccgggctcgagagctaggggaccccattgctcatccaaggcatgaggcagatgagaagccctttatatgtgcccagtgtggcaaaaccttcaataatacctccaacctgagaacacaccagcggatccacactggtgagaagccttacaagtgttctgaatgtggcaagagcttctcgagaagctccaaccgcatccggcacgagcggatccacctggaagagaaacactacaaatgccccaagtgccaggagagctttcggcggcgctcagacctcaccacgcaccagcaagatcacctaggcaagcggccataccgctgtgacatctgtggcaagagcttcagccagagtgccacgctagctgtgcatcaccggacccacctggagccagcaccctacatctgctgtgagtgtgggaagagcttcagcaacagctccagctttggcgtgcatcaccgcacccacacaggtgagagaccttatgagtgcactgagtgtgggcggaccttcagcgatatctccaactttggagcacaccagcggacccacagaggggagaagccctaccggtgcactgtgtgtgggaaacacttctcccggagctcga

SEQ ID NO: 203495 - DNA, 1935 bp, Homo sapiens
  Payload ID: 20128
  Gene Name: zinc finger protein 691
  ENST ID: ENST00000372504
  CDS Start-End: 351-1271
tgatcgagcggcgggagcgagggcctggacgtagtgtcttcaacagttgtaacagcagctgccatttgctgaatgacagcatgtgtcacacactctgctgagtattacaggcatttttttctaatacaaagtcttgtagtgtggaaatacttgcagacttgaaggaattatcagtctttcattttctatcatcagtgtcctatgatagtttgtgcttccctccctcatccctttgttcatgtcactctgttcaccaacccactctgctgaaatgtcgttatttcttcaaggcccggaggaaatgctaccactctcatcagagtggtttcaagaagagtgacattattcaaatggcacaaatatcatctggtggtggtggacaaagccggtgccttctttttgctctgggttcagagatgggcagtgagaaggagcagagtccagaaccacacctgcctgaggaaggggaagggggtaagccttggagagtggatgactcagagggttcttggatcccacctggggagaaggagcatgggcaagagagcctgtcggatgaactgcaagaaactcatccaaaaaagccatggcagaaagtcactgtccgggctcgagagctaggggaccccattgctcatccaaggcatgaggcagatgagaagccctttatatgtgcccagtgtggcaaaaccttcaataatacctccaacctgagaacacaccagcggatccacactggtgagaagccttacaagtgttctgaatgtggcaagagcttctcgagaagctccaaccgcatccggcacgagcggatccacctggaagagaaacactacaaatgccccaagtgccaggagagctttcggcggcgctcagacctcaccacgcaccagcaagatcacctaggcaagcggccataccgctgtgacatctgtggcaagagcttcagccagagtgccacgctagctgtgcatcaccggacccacctggagccagcaccctacatctgctgtgagtgtgggaagagcttcagcaacagctccagctttggcgtgcatcaccgcacccacacaggtgagagaccttatgagtgcactgagtgtgggcggaccttcagcgatatctccaactttggagcacaccagcggacccacagaggggagaagccctaccggtgcactgtgtgtgggaaacacttctcccggagctcgaatctcatccgccaccagaaaactcacttgggcgaacaggctgggaaagattccagctgaaggagagccccatttagagtgagggagagagagtgagagaccctaacctattggaggaagatcttcagcatcttttgctgctaccttgacctcaagcccttcatcccactttggagaatggttttgtatagcctctgaagtcaggatctcaggaagtcctgaggagggactctggaataaaaacccttgcctctttccaggccaatttctcgtgttggaaagtcagaagacccagtcttggctttactttcttggggtgaaagagaaatagggtaggctcagaacatgctcatgttattaaggcagcagtccccctggcctttgaggaagtacttatgagatgggtgtcactgtctgaaggttctccaaattgtctgtgaactgcttaggtaggagtgcactgcagtttcctgctagttcccacctgttgtgccccaactttgcttctagatctctggggtgggaggagtgaccttctcaatggaaggggcctccttggtctggagaagagatctgaggtcccaccttagaaatgaaagggaaaccctcagggagccatgacccagggaccttcacactcccccatgtttgttacttgttatccctcccccaacctgcctctgttttccccagagtgattagcagtaaaacccttcaatgaaaa

SEQ ID NO: 203496 - DNA, 1859 bp, Homo sapiens
  Payload ID: 20128
  Gene Name: zinc finger protein 691
  Uniprot ID: Q5VV52
  ENST ID: ENST00000372506
  CDS Start-End: 341-1195
cgctgtccctgatcgagcggcgggagcgagggcctggacgtagtgtcttcaacagttgtaacagcagctgccatttgctgaatgacagcatgtgtcacacactctgctgagtattacaggcatttttttctaatacaaagtcttgtagtgtggaaatacttgcagacttgaaggaattatcagtctttcattttctatcatcagtgtcctatgatagtttgtgcttccctccctcatccctttgttcatgtcactctgttcaccaacccactctgctgaaatgtcgttatttcttcaaggcccggaggaaatgctaccactctcatcagagggttcagagatgggcagtgagaaggagcagagtccagaaccacacctgcctgaggaaggggaagggggtaagccttggagagtggatgactcagagggttcttggatcccacctggggagaaggagcatgggcaagagagcctgtcggatgaactgcaagaaactcatccaaaaaagccatggcagaaagtcactgtccgggctcgagagctaggggaccccattgctcatccaaggcatgaggcagatgagaagccctttatatgtgcccagtgtggcaaaaccttcaataatacctccaacctgagaacacaccagcggatccacactggtgagaagccttacaagtgttctgaatgtggcaagagcttctcgagaagctccaaccgcatccggcacgagcggatccacctggaagagaaacactacaaatgccccaagtgccaggagagctttcggcggcgctcagacctcaccacgcaccagcaagatcacctaggcaagcggccataccgctgtgacatctgtggcaagagcttcagccagagtgccacgctagctgtgcatcaccggacccacctggagccagcaccctacatctgctgtgagtgtgggaagagcttcagcaacagctccagctttggcgtgcatcaccgcacccacacaggtgagagaccttatgagtgcactgagtgtgggcggaccttcagcgatatctccaactttggagcacaccagcggacccacagaggggagaagccctaccggtgcactgtgtgtgggaaacacttctcccggagctcgaatctcatccgccaccagaaaactcacttgggcgaacaggctgggaaagattccagctgaaggagagccccatttagagtgagggagagagagtgagagaccctaacctattggaggaagatcttcagcatcttttgctgctaccttgacctcaagcccttcatcccactttggagaatggttttgtatagcctctgaagtcaggatctcaggaagtcctgaggagggactctggaataaaaacccttgcctctttccaggccaatttctcgtgttggaaagtcagaagacccagtcttggctttactttcttggggtgaaagagaaatagggtaggctcagaacatgctcatgttattaaggcagcagtccccctggcctttgaggaagtacttatgagatgggtgtcactgtctgaaggttctccaaattgtctgtgaactgcttaggtaggagtgcactgcagtttcctgctagttcccacctgttgtgccccaactttgcttctagatctctggggtgggaggagtgaccttctcaatggaaggggcctccttggtctggagaagagatctgaggtcccaccttagaaatgaaagggaaaccctcagggagccatgacccagggaccttcacactcccccatgtttgttacttgttatccctcccccaacctgcctctgttttccccagagtgattagcagtaaaacccttcaatgaaaa

SEQ ID NO: 203497 - DNA, 1683 bp, Homo sapiens
  Payload ID: 20128
  Gene Name: zinc finger protein 691
  Uniprot ID: Q5VV52
  ENST ID: ENST00000372507
  CDS Start-End: 165-1019
ggcgctgtccctgatcgagcggcgggagcgagggcctggacgtagtgtcttcaacagttgtaacagcagctgccatttgctgaatgacagcatgtgtcacacactctgctgagtattacaggcatttttttctaatacaaagtcttgtagtgtggggttcagagatgggcagtgagaaggagcagagtccagaaccacacctgcctgaggaaggggaagggggtaagccttggagagtggatgactcagagggttcttggatcccacctggggagaaggagcatgggcaagagagcctgtcggatgaactgcaagaaactcatccaaaaaagccatggcagaaagtcactgtccgggctcgagagctaggggaccccattgctcatccaaggcatgaggcagatgagaagccctttatatgtgcccagtgtggcaaaaccttcaataatacctccaacctgagaacacaccagcggatccacactggtgagaagccttacaagtgttctgaatgtggcaagagcttctcgagaagctccaaccgcatccggcacgagcggatccacctggaagagaaacactacaaatgccccaagtgccaggagagctttcggcggcgctcagacctcaccacgcaccagcaagatcacctaggcaagcggccataccgctgtgacatctgtggcaagagcttcagccagagtgccacgctagctgtgcatcaccggacccacctggagccagcaccctacatctgctgtgagtgtgggaagagcttcagcaacagctccagctttggcgtgcatcaccgcacccacacaggtgagagaccttatgagtgcactgagtgtgggcggaccttcagcgatatctccaactttggagcacaccagcggacccacagaggggagaagccctaccggtgcactgtgtgtgggaaacacttctcccggagctcgaatctcatccgccaccagaaaactcacttgggcgaacaggctgggaaagattccagctgaaggagagccccatttagagtgagggagagagagtgagagaccctaacctattggaggaagatcttcagcatcttttgctgctaccttgacctcaagcccttcatcccactttggagaatggttttgtatagcctctgaagtcaggatctcaggaagtcctgaggagggactctggaataaaaacccttgcctctttccaggccaatttctcgtgttggaaagtcagaagacccagtcttggctttactttcttggggtgaaagagaaatagggtaggctcagaacatgctcatgttattaaggcagcagtccccctggcctttgaggaagtacttatgagatgggtgtcactgtctgaaggttctccaaattgtctgtgaactgcttaggtaggagtgcactgcagtttcctgctagttcccacctgttgtgccccaactttgcttctagatctctggggtgggaggagtgaccttctcaatggaaggggcctccttggtctggagaagagatctgaggtcccaccttagaaatgaaagggaaaccctcagggagccatgacccagggaccttcacactcccccatgtttgttacttgttatccctcccccaacctgcctctgttttccccagagtgattagcagtaaaacccttcaatgaaaa

SEQ ID NO: 203498 - DNA, 1577 bp, Homo sapiens
  Payload ID: 20128
  Gene Name: zinc finger protein 691
  Uniprot ID: Q5VV52
  ENST ID: ENST00000372508
  CDS Start-End: 59-913
ccctcgcctacagaggcggcgctgtccctgatcgagcggcgggagcgagggttcagagatgggcagtgagaaggagcagagtccagaaccacacctgcctgaggaaggggaagggggtaagccttggagagtggatgactcagagggttcttggatcccacctggggagaaggagcatgggcaagagagcctgtcggatgaactgcaagaaactcatccaaaaaagccatggcagaaagtcactgtccgggctcgagagctaggggaccccattgctcatccaaggcatgaggcagatgagaagccctttatatgtgcccagtgtggcaaaaccttcaataatacctccaacctgagaacacaccagcggatccacactggtgagaagccttacaagtgttctgaatgtggcaagagcttctcgagaagctccaaccgcatccggcacgagcggatccacctggaagagaaacactacaaatgccccaagtgccaggagagctttcggcggcgctcagacctcaccacgcaccagcaagatcacctaggcaagcggccataccgctgtgacatctgtggcaagagcttcagccagagtgccacgctagctgtgcatcaccggacccacctggagccagcaccctacatctgctgtgagtgtgggaagagcttcagcaacagctccagctttggcgtgcatcaccgcacccacacaggtgagagaccttatgagtgcactgagtgtgggcggaccttcagcgatatctccaactttggagcacaccagcggacccacagaggggagaagccctaccggtgcactgtgtgtgggaaacacttctcccggagctcgaatctcatccgccaccagaaaactcacttgggcgaacaggctgggaaagattccagctgaaggagagccccatttagagtgagggagagagagtgagagaccctaacctattggaggaagatcttcagcatcttttgctgctaccttgacctcaagcccttcatcccactttggagaatggttttgtatagcctctgaagtcaggatctcaggaagtcctgaggagggactctggaataaaaacccttgcctctttccaggccaatttctcgtgttggaaagtcagaagacccagtcttggctttactttcttggggtgaaagagaaatagggtaggctcagaacatgctcatgttattaaggcagcagtccccctggcctttgaggaagtacttatgagatgggtgtcactgtctgaaggttctccaaattgtctgtgaactgcttaggtaggagtgcactgcagtttcctgctagttcccacctgttgtgccccaactttgcttctagatctctggggtgggaggagtgaccttctcaatggaaggggcctccttggtctggagaagagatctgaggtcccaccttagaaatgaaagggaaaccctcagggagccatgacccagggaccttcacactcccccatgtttgttacttgttatccctcccccaacctgcctctgttttccccagagtgattagcagtaaaacccttcaatgaaaa

SEQ ID NO: 203499 - DNA, 728 bp, Homo sapiens
  Payload ID: 20128
  Gene Name: zinc finger protein 691
  ENST ID: ENST00000397034
  CDS Start-End: 330-728
ggcctggacgtagtgtcttcaacagttgtaacagcagctgccatttgctgaatgacagcatgtgtcacacactctgctgagtattacaggcatttttttctaatacaaagtcttgtagtgtggaaatacttgcagacttgaaggaattatcagtctttcattttctatcatcagtgtcctatgatagtttgtgcttccctccctcatccctttgttcatgtcactctgttcaccaacccactctgctgaaatgtcgttatttcttcaaggcccggaggaaatgctaccactctcatcagagtggtttcaagaagagtgacattattcaaatggcacaaatatcatctggtggtggtggacaaagccggtgccttctttttgctctggtgttggccatttgtgttcattctcagggttcagagatgggcagtgagaaggagcagagtccagaaccacacctgcctgaggaaggggaagggggtaagccttggagagtggatgactcagagggttcttggatcccacctggggagaaggagcatgggcaagagagcctgtcggatgaactgcaagaaactcatccaaaaaagccatggcagaaagtcactgtccgggctcgagagctaggggaccccattgctcatccaaggcatgaggcagatgagaagccctttatatgtgcccagtgtggcaaaaccttcaataatacctccaacctgagaacacac

SEQ ID NO: 203500 - DNA, 1581 bp, Homo sapiens
  Payload ID: 20128
  Gene Name: zinc finger protein 691
  ENST ID: ENST00000630961
  CDS Start-End: 1-921
atggcacaaatatcatctggtggtggtggacaaagccggtgccttctttttgctctgggttcagagatgggcagtgagaaggagcagagtccagaaccacacctgcctgaggaaggggaagggggtaagccttggagagtggatgactcagagggttcttggatcccacctggggagaaggagcatgggcaagagagcctgtcggatgaactgcaagaaactcatccaaaaaagccatggcagaaagtcactgtccgggctcgagagctaggggaccccattgctcatccaaggcatgaggcagatgagaagccctttatatgtgcccagtgtggcaaaaccttcaataatacctccaacctgagaacacaccagcggatccacactggtgagaagccttacaagtgttctgaatgtggcaagagcttctcgagaagctccaaccgcatccggcacgagcggatccacctggaagagaaacactacaaatgccccaagtgccaggagagctttcggcggcgctcagacctcaccacgcaccagcaagatcacctaggcaagcggccataccgctgtgacatctgtggcaagagcttcagccagagtgccacgctagctgtgcatcaccggacccacctggagccagcaccctacatctgctgtgagtgtgggaagagcttcagcaacagctccagctttggcgtgcatcaccgcacccacacaggtgagagaccttatgagtgcactgagtgtgggcggaccttcagcgatatctccaactttggagcacaccagcggacccacagaggggagaagccctaccggtgcactgtgtgtgggaaacacttctcccggagctcgaatctcatccgccaccagaaaactcacttgggcgaacaggctgggaaagattccagctgaaggagagccccatttagagtgagggagagagagtgagagaccctaacctattggaggaagatcttcagcatcttttgctgctaccttgacctcaagcccttcatcccactttggagaatggttttgtatagcctctgaagtcaggatctcaggaagtcctgaggagggactctggaataaaaacccttgcctctttccaggccaatttctcgtgttggaaagtcagaagacccagtcttggctttactttcttggggtgaaagagaaatagggtaggctcagaacatgctcatgttattaaggcagcagtccccctggcctttgaggaagtacttatgagatgggtgtcactgtctgaaggttctccaaattgtctgtgaactgcttaggtaggagtgcactgcagtttcctgctagttcccacctgttgtgccccaactttgcttctagatctctggggtgggaggagtgaccttctcaatggaaggggcctccttggtctggagaagagatctgaggtcccaccttagaaatgaaagggaaaccctcagggagccatgacccagggaccttcacactcccccatgtttgttacttgttatccctcccccaacctgcctctgttttccccagagtgattagcagtaaaacccttcaatg

SEQ ID NO: 203501 - DNA, 1931 bp, Homo sapiens
  Payload ID: 20129
  Gene Name: zinc finger protein 692
  Uniprot ID: Q9BU19
  ENST ID: ENST00000306601
  CDS Start-End: 168-1727
agcagccgacgccgagaggcaccgtttcttcttaaaagagaaacgctgcgcgcgcgaggtgggcccctgtcttccagcagctccgggcctgctcgctaggcccgggaggcgcaggcgcaggcgcagtgggggtgagggcgcgtgggggcgcacagcctctggtgcacatggcttcctccccggcggtggacgtgtcctgcaggcggcgggagaagcggcggcagctggacgcgcgccgcagcaagtgccgcatccgcctgggcggccacatggagcagtggtgcctcctcaaggagcggctgggcttctccctgcactcgcagctcgccaagttcctgttggaccggtacacttcttcaggctgtgtcctctgtgcaggtcctgagcctttgcctccaaaaggtctgcagtatctggtgctcttgtctcatgcccacagccgagagtgcagcctggtgcccgggcttcgggggcctggcggccaagatggggggcttgtgtgggagtgctcagcaggccataccttctcctggggaccctctttgagccctacaccttcagaggcacccaagccagcctcccttccacatactactcggagaagttggtgttccgaggccacgagtgggcaggagcttgcagatttggaatctgagcatgatgagaggactcaagaggccaggttgcccaggagggtgggacccccaccagagaccttcccacctccaggagaggaagagggtgaggaagaagaggacaatgatgaggatgaagaggagatgctcagtgatgccagcttatggacctacagctcctccccagatgatagtgagcctgatgcccccagactactgccttcccctgtcacctgcacacctaaagagggggagacaccaccagcccctgcagcactctccagtcctcttgctgtgccggccttgtcagcatcctcattgagttccagagctcctccacctgcagaagtcagggtgcagccacagctcagcaggacccctcaagcggcccagcagactgaggccctggccagcactgggagtcaggcccagtctgctccaaccccggcctgggatgaggacactgcacaaattggccccaagagaattaggaaagctgccaaaagagagctgatgccttgtgacttccctggctgtggaaggatcttctccaaccggcagtatttgaatcaccacaaaaagtaccagcacatccaccagaagtctttctcctgcccagagccagcctgtgggaagtctttcaactttaagaaacacctgaaggagcacatgaagctgcacagtgacacccgggactacatctgtgagttctgcgcccggtctttccgcactagcagcaaccttgtcatccacagacgtatccacactggagaaaaacccctgcagtgtgagatatgcgggtttacctgccgccagaaggcttccctgaactggcaccagcgcaagcatgcagagacggtggctgccttgcgcttcccctgtgaattctgcggcaagcgctttgagaagccagacagtgttgcagcccaccgtagcaaaagtcacccagccctgcttctagcccctcaagagtcacccagtggtcccctagagccctgtcccagcatctctgcccctgggcctctgggatccagcgaggggtccaggccctctgcatctcctcaggctccaaccctgcttcctcagcaatgagctctcctccagctttggctttgggaagccagactccagggactgaaaaggagcaacaaggagagggtctgcttgagaaatgccagatgcttggtccccaggaactaaggcgacagagtgcagggtgggggcaagactgggctgtaggggagctggactactttagtcttcctaaaggacaaaataaacagtattttatgcagg

SEQ ID NO: 203502 - DNA, 1710 bp, Homo sapiens
  Payload ID: 20129
  Gene Name: zinc finger protein 692
  Uniprot ID: Q9BU19
  ENST ID: ENST00000366471
  CDS Start-End: 84-1508
agttccgggctacagcagccgacgccgagaggcaccgtttcttcttaaaagagaaacgctgcgcgcgcgagcctctggtgcacatggcttcctccccggcggtggacgtgtcctgcaggcggcgggagaagcggcggcagctggacgcgcgccgcagcaagtgccgcatccgcctgggcggccacatggagcagtggtgcctcctcaaggagcggctgggcttctccctgcactcgcagctcgccaagttcctgttggaccggtacacttcttcaggctgtgtcctctgtgcaggtcctgagcctttgcctccaaaaggtctgcagtatctggtgctcttgtctcatgcccacagccgagagtgcagcctggtgcccgggcttcgggggcctggcggccaagatggggggcttgtgtgggagtgctcagcaggccataccttctcctggggaccctctttgagccctacaccttcagaggcacccaagccagcctcccttccacatactactcggagaagttggtgttccgaggccacgagtgggcaggagcttgcagatttggaatctgagcatgatgagaggactcaagaggccaggttgcccagtagtgagcctgatgcccccagactactgccttcccctgtcacctgcacacctaaagagggggagacaccaccagcccctgcagcactctccagtcctcttgctgtgccggccttgtcagcatcctcattgagttccagagctcctccacctgcagaagtcagggtgcagccacagctcagcaggacccctcaagcggcccagcagactgaggccctggccagcactgggagtcaggcccagtctgctccaaccccggcctgggatgaggacactgcacaaattggccccaagagaattaggaaagctgccaaaagagagctgatgccttgtgacttccctggctgtggaaggatcttctccaaccggcagtatttgaatcaccacaaaaagtaccagcacatccaccagaagtctttctcctgcccagagccagcctgtgggaagtctttcaactttaagaaacacctgaaggagcacatgaagctgcacagtgacacccgggactacatctgtgagttctgcgcccggtctttccgcactagcagcaaccttgtcatccacagacgtatccacactggagaaaaacccctgcagtgtgagatatgcgggtttacctgccgccagaaggcttccctgaactggcaccagcgcaagcatgcagagacggtggctgccttgcgcttcccctgtgaattctgcggcaagcgctttgagaagccagacagtgttgcagcccaccgtagcaaaagtcacccagccctgcttctagcccctcaagagtcacccagtggtcccctagagccctgtcccagcatctctgcccctgggcctctgggatccagcgaggggtccaggccctctgcatctcctcaggctccaaccctgcttcctcagcaatgagctctcctccagctttggctttgggaagccagactccagggactgaaaaggagcaacaaggagagggtctgcttgagaaatgccagatgcttggtccccaggaactaaggcgacagagtgcagggtgggggcaagactgggctgtaggggagctggactactttagtcttcctaaaggacaaaataaacagtattttatgca

SEQ ID NO: 203503 - DNA, 2065 bp, Homo sapiens
  Payload ID: 20129
  Gene Name: zinc finger protein 692
  Uniprot ID: Q9BU19
  ENST ID: ENST00000451251
  CDS Start-End: 347-1921
attgggattagtccgctccactcactgtcagcattaagtgggggtgcccaagacggggtggatggggggcgccctccagacctctgaccacggcctcaccgccactcgacccaactatgaagagcgcccccagctgcacgccaggacacgacctttccttcccctagaaaccagtaaaggccgctgccctattcaagatgaaatgtgtggaccgcccccagcccagttgaaatttcccgtgaaagtctctcgccccttccccacagctccacttcagtggactggagggcgcaggcctttgttctgactgcttctgtctgcctgcctcccacccgacgacactcacatgcctctggtgcacatggcttcctccccggcggtggacgtgtcctgcaggcggcgggagaagcggcggcagctggacgcgcgccgcagcaagtgccgcatccgcctgggcggccacatggagcagtggtgcctcctcaaggagcggctgggcttctccctgcactcgcagctcgccaagttcctgttggaccggtacacttcttcaggctgtgtcctctgtgcaggtcctgagcctttgcctccaaaaggtctgcagtatctggtgctcttgtctcatgcccacagccgagagtgcagcctggtgcccgggcttcgggggcctggcggccaagatggggggcttgtgtgggagtgctcagcaggccataccttctcctggggaccctctttgagccctacaccttcagaggcacccaagccagcctcccttccacatactactcggagaagttggtgttccgaggccacgagtgggcaggagcttgcagatttggaatctgagcatgatgagaggactcaagaggccaggttgcccaggagggtgggacccccaccagagaccttcccacctccaggagaggaagagggtgaggaagaagaggacaatgatgaggatgaagaggagatgctcagtgatgccagcttatggacctacagctcctccccagatgatagtgagcctgatgcccccagactactgccttcccctgtcacctgcacacctaaagagggggagacaccaccagcccctgcagcactctccagtcctcttgctgtgccggccttgtcagcatcctcattgagttccagagctcctccacctgcagaagtcagggtgcagccacagctcagcaggacccctcaagcggcccagcagactgaggccctggccagcactgggagtcaggcccagtctgctccaaccccggcctgggatgaggacactgcacaaattggccccaagagaattaggaaagctgccaaaagagagctgatgccttgtgacttccctggctgtggaaggatcttctccaaccggcagtatttgaatcaccacaaaaagtaccagcacatccaccagaagtctttctcctgcccagagccagcctgtgggaagtctttcaactttaagaaacacctgaaggagcacatgaagctgcacagtgacacccgggactacatctgtgagttctgcgcccggtctttccgcactagcagcaaccttgtcatccacagacgtatccacactggagaaaaacccctgcagtgtgagatatgcgggtttacctgccgccagaaggcttccctgaactggcaccagcgcaagcatgcagagacggtggctgccttgcgcttcccctgtgaattctgcggcaagcgctttgagaagccagacagtgttgcagcccaccgtagcaaaagtcacccagccctgcttctagcccctcaagagtcacccagtggtcccctagagccctgtcccagcatctctgcccctgggcctctgggatccagcgaggggtccaggccctctgcatctcctcaggctccaaccctgcttcctcagcaatgagctctcctccagctttggctttgggaagccagactccagggactgaaaaggagcaacaaggagagggtctgcttgagaaatgccagatgcttggtccccaggaactaaggcgacagagtgcagggtgggggcaagactgggctg

SEQ ID NO: 203504 - DNA, 1916 bp, Homo sapiens
  Payload ID: 20129
  Gene Name: zinc finger protein 692
  ENST ID: ENST00000412341
  CDS Start-End: 164-481
gccgacgccgagaggcaccgtttcttcttaaaagagaaacgctgcgcgcgcgaggtgggcccctgtcttccagcagctccgggcctgctcgctaggcccgggaggcgcaggcgcaggcgcagtgggggtgagggcgcgtgggggcgcacagcctctggtgcacatggcttcctccccggcggtggacgtgtcctgcaggcggcgggagaagcggcggcagctggacgcgcgccgcagcaagtgccgcatccgcctgggcggccacatggagcagtggtgcctcctcaaggagcggctgggcttctccctgcactcgcagctcgccaagttcctgttggaccggtacacttcttcaggctgtgtcctctgtgcagccgagagtgcagcctggtgcccgggcttcgggggcctggcggccaagatggggggcttgtgtgggagtgctcagcaggccataccttctcctggggaccctctttgagccctacaccttcagaggcacccaagccagcctcccttccacatactactcggagaagttggtgttccgaggccacgagtgggcaggagcttgcagatttggaatctgagcatgatgagaggactcaagaggccaggttgcccaggagggtgggacccccaccagagaccttcccacctccaggagaggaagaggtagtgagcctgatgcccccagactactgccttcccctgtcacctgcacacctaaagagggggagacaccaccagcccctgcagcactctccagtcctcttgctgtgccggccttgtcagcatcctcattgagttccagagctcctccacctgcagaagtcagggtgcagccacagctcagcaggacccctcaagcggcccagcagactgaggccctggccaggtaacctgatggctgagacagaaagggcaggggcgtcctgggatgtggccctccctcgaggccctctgctccctctttgctgcccgtagcactgggagtcaggcccagtctgctccaaccccggcctgggatgaggacactgcacaaattggccccaagagaattaggaaagctgccaaaagagagctgatgccttgtgacttccctggctgtggaaggatcttctccaaccggcagtatttgaatcaccacaaaaagtaccagcacatccaccagaagtctttctcctgcccagagccagcctgtgggaagtctttcaactttaagaaacacctgaaggagcacatgaagctgcacagtggtaagggaggtccagacgggctccatgatttggataacaactaattagaacctgagcctcctgacctccaatacggtgcactctgacacccgggactacatctgtgagttctgcgcccggtctttccgcactagcagcaaccttgtcatccacagacgtatccacactggagaaaaacccctgcagtgtgagatatgcgggtttacctgccgccagaaggcttccctgaactggcaccagcgcaagcatgcagagacggtggctgccttgcgcttcccctgtgaattctgcggcaagcgctttgagaagccagacagtgttgcagcccaccgtagcaaaagtcacccagccctgcttctagcccctcaagagtcacccagtggtcccctagagccctgtcccagcatctctgcccctgggcctctgggatccagcgaggggtccaggccctctgcatctcctcaggctccaaccctgcttcctcagcaatgagctctcctccagctttggctttgggaagccagactccagggactgaaaaggagcaacaaggagagggtctgcttgagaaatgccagatgcttggtccccaggaactaaggcgacagagtgcagggtgggggcaagactgggctgtaggggagctggactacttta

SEQ ID NO: 203505 - DNA, 595 bp, Homo sapiens
  Payload ID: 20129
  Gene Name: zinc finger protein 692
  ENST ID: ENST00000530986
  CDS Start-End: 181-390
agttccgggctacagcagccgacgccgagaggcaccgtttcttcttaaaagagaaacgctgcgcgcgcgaggtgggcccctgtcttccagcagctccgggcctgctcgctaggcccgggaggcgcaggcgcaggcgcagtgggggtgagggcgcgtgggggcgcacagcctctggtgcacatggcttcctccccggcggtggacgtgtcctgcaggcggcgggagaagcggcggcagctggacgcgcgccgcagcaagtgccgcatccgcctgggcggccacatggagcagtggtgcctcctcaaggagcggctgggcttctccctgcactcgcagctcgccaagttcctgttggaccggtttctcactttaccaggacggcctgtgtgacttgtggcctccgagggtcctgctcccctcctcatggtctcagcgaatagcggcccttagggctggccccttacatgtgtgagtgcccagggctgagggtggctggccacctgagtcctgacctgcctcttctcctgctggcaggtacacttcttcaggctgtgtcctctgtgcaggtcctgagcctttgcctccaaaaggtctg

SEQ ID NO: 203506 - DNA, 1064 bp, Homo sapiens
  Payload ID: 20129
  Gene Name: zinc finger protein 692
  ENST ID: ENST00000496411
  CDS Start-End: 114-356
cgaggtgggcccctgtcttccagcagctccgggcctgctcgctaggcccgggaggcgcaggcgcaggcgcagtgggggtgagggcgcgtgggggcgcacagcctctggtgcacatggcttcctccccggcggtggacgtgtcctgcaggcggcgggagaagcggcggcagctggacgcgcgccgcagcaagtgccgcatccgcctgggcggccacatggagcagtggtgcctcctcaaggagcggctgggcttctccctgcactcgcagctcgccaagttcctgttggaccggacggcctgtgtgacttgtggcctccgagggtcctgctcccctcctcatggtctcagcgaatagcggcccttagggctggccccttacatgtgtgagtgcccagggctgagggtggctggccacctgagtcctgacctgcctcttctcctgctggcaggtacacttcttcaggctgtgtcctctgtgcaggtcctgagcctttgcctccaaaaggtctgcagtatctggtgctcttgtctcatgcccacagccgagagtgcagcctggtgcccgggcttcgggggcctggcggccaagatggggggcttgtgtgggagtgctcagcaggccataccttctcctggggaccctctttgagccctacaccttcagaggcacccaagccagcctcccttccacatactactcggagaagttggtgttccgaggccacgagtgggcaggagcttgcagatttggaatctgagcatgatgagaggactcaagaggccaggttgcccaggagggtgggacccccaccagagaccttcccacctccaggagaggaagaggtagtgagcctgatgcccccagactactgccttcccctgtcacctgcacacctaaagagggggagacaccaccagcccctgcagcactctccagtcctcttgctgtgccggccttgtcagcatcctcattgagttccagagctcctccacctgcagaagtcagggtgcagccacagctcagcaggacccctcaagcggcccagcagactgaggccctggc

SEQ ID NO: 203507 - DNA, 1006 bp, Homo sapiens
  Payload ID: 20129
  Gene Name: zinc finger protein 692
  ENST ID: ENST00000476503
  CDS Start-End: 1-820
tgagcctgatgcccccagactactgccttcccctgtcacctgcacacctaaagagggggagacaccaccagcccctgcagcactctccagtcctcttgctgtgccggccttgtcagcatcctcattgagttccagagctcctccacctgcagaagtcagggtgcagccacagctcagcaggacccctcaagcggcccagcagactgaggccctggccaggaaagctgccaaaagagagctgatgccttgtgacttccctggctgtggaaggatcttctccaaccggcagtatttgaatcaccacaaaaagtaccagcacatccaccagaagtctttctcctgcccagagccagcctgtgggaagtctttcaactttaagaaacacctgaaggagcacatgaagctgcacagtgacacccgggactacatctgtgagttctgcgcccggtctttccgcactagcagcaaccttgtcatccacagacgtatccacactggagaaaaacccctgcagtgtgagatatgcgggtttacctgccgccagaaggcttccctgaactggcaccagcgcaagcatgcagagacggtggctgccttgcgcttcccctgtgaattctgcggcaagcgctttgagaagccagacagtgttgcagcccaccgtagcaaaagtcacccagccctgcttctagcccctcaagagtcacccagtggtcccctagagccctgtcccagcatctctgcccctgggcctctgggatccagcgaggggtccaggccctctgcatctcctcaggctccaaccctgcttcctcagcaatgagctctcctccagctttggctttgggaagccagactccagggactgaaaaggagcaacaaggagagggtctgcttgagaaatgccagatgcttggtccccaggaactaaggcgacagagtgcagggtgggggcaagactgggctgtaggggagctggactactttagtcttcctaaaggacaaaata

SEQ ID NO: 203508 - DNA, 656 bp, Homo sapiens
  Payload ID: 20129
  Gene Name: zinc finger protein 692
  ENST ID: ENST00000496231
  CDS Start-End: 261-656
ccgacgccgagaggcaccgtttcttcttaaaagagaaacgctgcgcgcgcgaggtgggcccctgtcttccagcagctccgggcctgctcgctaggcccgggaggcgcaggcgcaggcgcagtgggggtgagggcgcgtgggggcgcacagttcactgatgaggaaactgaggccctaacggcaggtggagccgggtccccgacccccgagatcggcagggcgctgaagacgtcccttccaccctccagcctctggtgcacatggcttcctccccggcggtggacgtgtcctgcaggcggcgggagaagcggcggcagctggacgcgcgccgcagcaagtgccgcatccgcctgggcggccacatggagcagtggtgcctcctcaaggagcggctgggcttctccctgcactcgcagctcgccaagttcctgttggaccggtacacttcttcaggctgtgtcctctgtgcaggtcctgagcctttgcctccaaaaggtctgcagtatctggtgctcttgtctcatgcccacagccgagagtgcagcctggtgcccgggcttcgggggcctggcggccaagatggggggcttgtgtgggagtgctcagcaggccataccttctcctggggaccctctttgagccctacaccttcagag

SEQ ID NO: 203509 - DNA, 851 bp, Homo sapiens
  Payload ID: 20129
  Gene Name: zinc finger protein 692
  ENST ID: ENST00000482023
  CDS Start-End: 1-238
gaaagctgccaaaagagagctgatgccttgtgacttccctggctgtggaaggatcttctccaaccggcagtatttgaatcaccacaaaaagtaccagcacatccaccagaagtctttctcctgcccagagccagcctgtgggaagtctttcaactttaagaaacacctgaaggagcacatgaagctgcacagtggtaagggaggtccagacgggctccatgatttggataacaactaattagaacctgagcctcctgacctccaatacggtgcactctgacacccgggactacatctgtgagttctgcgcccggtctttccgcactagcagcaaccttgtcatccacagacgtatccacactggagaaaaacccctgcagtgtgagatatgcgggtttacctgccgccagaaggcttccctgaactggcaccagcgcaagcatgcagagacggtggctgccttgcgcttcccctgtgaattctgcggcaagcgctttgagaagccagacagtgttgcagcccaccgtagcaaaagtcacccagccctgcttctagcccctcaagagtcacccagtggtcccctagagccctgtcccagcatctctgcccctgggcctctgggatccagcgaggggtccaggccctctgcatctcctcaggctccaaccctgcttcctcagcaatgagctctcctccagctttggctttgggaagccagactccagggactgaaaaggagcaacaaggagagggtctgcttgagaaatgccagatgcttggtccccaggaactaaggcgacagagtgcagggtgggggcaagactgggctgtaggggagctggactacttta

SEQ ID NO: 203510 - DNA, 576 bp, Homo sapiens
  Payload ID: 20129
  Gene Name: zinc finger protein 692
  ENST ID: ENST00000528141
  CDS Start-End: 84-293
agttccgggctacagcagccgacgccgagaggcaccgtttcttcttaaaagagaaacgctgcgcgcgcgagcctctggtgcacatggcttcctccccggcggtggacgtgtcctgcaggcggcgggagaagcggcggcagctggacgcgcgccgcagcaagtgccgcatccgcctgggcggccacatggagcagtggtgcctcctcaaggagcggctgggcttctccctgcactcgcagctcgccaagttcctgttggaccggtttctcactttaccaggacggcctgtgtgacttgtggcctccgagggtcctgctcccctcctcatggtctcagcgaatagcggcccttagggctggccccttacatgtgtgagtgcccagggctgagggtggctggccacctgagtcctgacctgcctcttctcctgctggcaggtacacttcttcaggctgtgtcctctgtgcaggtcctgagcctttgcctccaaaaggtctgcagtatctggtgctcttgtctcatgcccacagccgagagtgcagcctggtgcccgggcttcgggggcctggcggccaa

SEQ ID NO: 203511 - DNA, 901 bp, Homo sapiens
  Payload ID: 20129
  Gene Name: zinc finger protein 692
  ENST ID: ENST00000483223
  CDS Start-End: 221-463
cccgacgacactcacatggtagcgctgagcttcaacaccctgtatcatagaaggacggggtttggctccacacctgccactgctattgaaatagtttagtcttgccccagttcactgatgaggaaactgaggccctaacggcaggtggagccgggtccccgacccccgagatcggcagggcgctgaagacgtcccttccaccctccagcctctggtgcacatggcttcctccccggcggtggacgtgtcctgcaggcggcgggagaagcggcggcagctggacgcgcgccgcagcaagtgccgcatccgcctgggcggccacatggagcagtggtgcctcctcaaggagcggctgggcttctccctgcactcgcagctcgccaagttcctgttggaccggacggcctgtgtgacttgtggcctccgagggtcctgctcccctcctcatggtctcagcgaatagcggcccttagggctggccccttacatgtgtgagtgcccagggctgagggtggctggccacctgagtcctgacctgcctcttctcctgctggcaggtacacttcttcaggctgtgtcctctgtgcaggtcctgagcctttgcctccaaaaggtctgcagtatctggtgctcttgtctcatgcccacagccgagagtgcagcctggtgcccgggcttcgggggcctggcggccaagatggggggcttgtgtgggagtgctcagcaggccataccttctcctggggaccctctttgagccctacaccttcagaggcacccaagccagcctcccttccacatactactcggagaagttggtgttccgaggccacgagtgggcaggagcttgcagatttggaatctgagcatgatgagaggactcaagaggccaggttgccca

SEQ ID NO: 203512 - DNA, 2704 bp, Homo sapiens
  Payload ID: 20129
  Gene Name: zinc finger protein 692
  Uniprot ID: Q9BU19
  ENST ID: ENST00000463519
  CDS Start-End: 405-695
acgacctttccttcccctagaaaccagtaaaggccgctgccctattcaagatgaaatgtgtggaccgcccccagcccagttgaaatttcccgtgaaagtctctcgccccttccccacagctccacttcagtggactggagggcgcaggcctttgttctgactgcttctgtctgcctgcctcccacccgacgacactcacatggtagcgctgagcttcaacaccctgtatcatagaaggacggggtttggctccacacctgccactgctattgaaatagtttagtcttgccccagttcactgatgaggaaactgaggccctaacggcaggtggagccgggtccccgacccccgagatcggcagggcgctgaagacgtcccttccaccctccagcctctggtgcacatggcttcctccccggcggtggacgtgtcctgcaggcggcgggagaagcggcggcagctggacgcgcgccgcagcaagtgccgcatccgcctgggcggccacatggagcagtggtgcctcctcaaggagcggctgggcttctccctgcactcgcagctcgccaagttcctgttggaccgggcctgtcctgctgctcttttccaccctcaggtttctcactttaccaggacggcctgtgtgacttgtggcctccgagggtcctgctcccctcctcatggtctcagcgaatagcggcccttagggctggccccttacatgtgtgagtgcccagggctgagggtggctggccacctgagtcctgacctgcctcttctcctgctggcaggtacacttcttcaggctgtgtcctctgtgcaggtaggtaggggatggcagggggtgagagccagagggaagagggaccacagggtgacccagaaacaccctcctttcaaagggagccctgagtaagtttgggaagggtggggtgagttggggagcacagggtagtttgatggaggcaacctctgggtggggaagggagcaatgtctcaggatctagtgtgtctaggttctgaagaatgataaattggactggggctgaggttgccctggggtttgagggaacagggctccctgggtatggctctccagggtaagaggaggagacttcccagttcagcctgactgcttcccccacccctccaggtcctgagcctttgcctccaaaaggtctgcagtatctggtgctcttgtctcatgcccacagccgagagtgcagcctggtgcccgggcttcgggggcctggcggccaagatggggggcttgtgtgggagtgctcagcaggccataccttctcctggggaccctctttgagccctacaccttcagaggcacccaagccagcctcccttccacatactactcggagaagttggtgttccgaggccacgagtgggcaggagcttgcagatttggaatctgagcatgatgagaggactcaagaggccaggttgcccaggagggtgggacccccaccagagaccttcccacctccaggagaggaagagggtgaggaagaagaggacaatgatgaggatgaagaggagatgctcagtgatgccagcttatggacctacagctcctccccagatgatagtgagcctgatgcccccagactactgccttcccctgtcacctgcacacctaaagagggggagacaccaccagcccctgcagcactctccagtcctcttgctgtgccggccttgtcagcatcctcattgagttccagagctcctccacctgcagaagtcagggtgcagccacagctcagcaggacccctcaagcggcccagcagactgaggccctggccagcactgggagtcaggcccagtctgctccaaccccggcctgggatgaggacactgcacaaattggccccaagagaattaggaaagctgccaaaagagagctgatgccttgtgacttccctggctgtggaaggatcttctccaaccggcagtatttgaatcaccacaaaaagtaccagcacatccaccagaagtctttctcctgcccagagccagcctgtgggaagtctttcaactttaagaaacacctgaaggagcacatgaagctgcacagtgacacccgggactacatctgtgagttctgcgcccggtctttccgcactagcagcaaccttgtcatccacagacgtatccacactggagaaaaacccctgcagtgtgagatatgcgggtttacctgccgccagaaggcttccctgaactggcaccagcgcaagcatgcagagacggtggctgccttgcgcttcccctgtgaattctgcggcaagcgctttgagaagccagacagtgttgcagcccaccgtagcaaaagtcacccagccctgcttctagcccctcaagagtcacccagtggtcccctagagccctgtcccagcatctctgcccctgggcctctgggatccagcgaggggtccaggccctctgcatctcctcaggctccaaccctgcttcctcagcaatgagctctcctccagctttggctttgggaagccagactccagggactgaaaaggagcaacaaggagagggtctgcttgagaaatgccagatgcttggtccccaggaactaaggcgacagagtgcagggtgggggcaagactgggctgtaggggagctggactactttagtcttcctaaaggacaaaataaacagtattttatgcagg

SEQ ID NO: 203513 - DNA, 1521 bp, Homo sapiens
  Payload ID: 20129
  Gene Name: zinc finger protein 692
  ENST ID: ENST00000477070
  CDS Start-End: 1-494
gtcctgagcctttgcctccaaaaggtctgcagtatctggtgctcttgtctcatgcccacagccgagagtgcagcctggtgcccgggcttcgggggcctggcggccaagatggggggcttgtgtgggagtgctcagcaggccataccttctcctggggaccctctttgagccctacaccttcagaggcacccaagccagcctcccttccacatactactcggagaagttggtgttccgaggccacgagtgggcaggagcttgcagatttggaatctgagcatgatgagaggactcaagaggccaggttgcccaggagggtgggacccccaccagagaccttcccacctccaggagaggaagaggtagtgagcctgatgcccccagactactgccttcccctgtcacctgcacacctaaagagggggagacaccaccagcccctgcagcactctccagtcctcttgctgtgccggccttgtcagcatcctcattgagttccagagctcctccacctgcagaagtcagggtgcagccacagctcagcaggacccctcaagcggcccagcagactgaggccctggccaggtaacctgatggctgagacagaaagggcaggggcgtcctgggatgtggccctccctcgaggccctctgctccctctttgctgcccgtagcactgggagtcaggcccagtctgctccaaccccggcctgggatgaggacactgcacaaattggccccaagagaattaggaaagctgccaaaagagagctgatgccttgtgacttccctggctgtggaaggatcttctccaaccggcagtatttgaatcaccacaaaaagtaccagcacatccaccagaagtctttctcctgcccagagccagcctgtgggaagtctttcaactttaagaaacacctgaaggagcacatgaagctgcacagtgacacccgggactacatctgtgagttctgcgcccggtctttccgcactagcagcaaccttgtcatccacagacgtatccacactggagaaaaacccctgcagtgtgagatatgcgggtttacctgccgccagaaggcttccctgaactggcaccagcgcaagcatgcagagacggtggctgccttgcgcttcccctgtgaattctgcggcaagcgctttgagaagccagacagtgttgcagcccaccgtagcaaaagtcacccagccctgcttctagcccctcaagagtcacccagtggtcccctagagccctgtcccagcatctctgcccctgggcctctgggatccagcgaggggtccaggccctctgcatctcctcaggctccaaccctgcttcctcagcaatgagctctcctccagctttggctttgggaagccagactccagggactgaaaaggagcaacaaggagagggtctgcttgagaaatgccagatgcttggtccccaggaactaaggcgacagagtgcagggtgggggcaagactgggctgtaggggagctggactactttagtc

SEQ ID NO: 203514 - DNA, 548 bp, Homo sapiens
  Payload ID: 20129
  Gene Name: zinc finger protein 692
  ENST ID: ENST00000533647
  CDS Start-End: 16-258
cagcctctggtgcacatggcttcctccccggcggtggacgtgtcctgcaggcggcgggagaagcggcggcagctggacgcgcgccgcagcaagtgccgcatccgcctgggcggccacatggagcagtggtgcctcctcaaggagcggctgggcttctccctgcactcgcagctcgccaagttcctgttggaccggacggcctgtgtgacttgtggcctccgagggtcctgctcccctcctcatggtctcagcgaatagcggcccttagggctggccccttacatgtgtgagtgcccagggctgagggtggctggccacctgagtcctgacctgcctcttctcctgctggcaggtacacttcttcaggctgtgtcctctgtgcagccgagagtgcagcctggtgcccgggcttcgggggcctggcggccaagatggggggcttgtgtgggagtgctcagcaggccataccttctcctggggaccctctttgagccctacaccttcagaggcacccaagccagcctcccttccacatactactcggagaa

SEQ ID NO: 203515 - DNA, 3340 bp, Homo sapiens
  Payload ID: 20130
  Gene Name: zinc finger protein 695
  Uniprot ID: Q8IW36
  ENST ID: ENST00000339986
  CDS Start-End: 149-1696
tttgtctccttgcggccggcggggtgctgggttcccgtctgctgcctctcggagagtcccgggtgactgccgcaggctccatcgccctgtggcctgcaggtattgcgagatttatagggaggacgctgggacccccaaaagctgggaaatgggactattggcattcagggatgtggctctagaattctctccagaggagtgggaatgcctggacccagctcagcggagtttgtatagggatgtgatgttagagaactacagaaacctgatctcccttggtgaggatagcttcaatatgcaattcctatttcacagtcttgctatgtctaagccagaactgatcatctgtctggaggcaaggaaagagccctggaacgtgaacacagagaagacagccagacactcagttttgtcttcttatcttactgaagacattttgccagagcagggcctgcaagtttcattccaaaaagtgatgctgagaagatatgaaagatgttgtcttgagaaattacgcttaaggaatgactgggaaattgtgggtgagtggaaagggcagaaggcaagttataatggacttgacctatgctcagcaactactcatagcaaaaactttcaatgcaataaatgtgtgaaaggttttagtaaatttgcaaatctaaataaatgtaagataagccatactggagaaaaaccattcaaatgcaaagaatgtggcaatgtctcttgcatgtctttaataatgactcaacagcagagaatccatattggagagaacccgtaccaatgtaaaaaatgtggcaaagcctttaatgagtgctcatgctttactgactgtaagagaattcatgttggagagaaacattgcaaatgtgaagaatgtaataacatttttaagtcttgctcaagtcttgctgttgttgagaaaaatcatactgaaaagaaaacctacagatgtgaagaatgtggcaaagcttttaacctgtgctcagttcttactaaacataagaaaattcatactggagagaaaccatacaaatgtgaagaatgtggcaaatcctttaagttgttcccataccttactcaacacaagagaattcatagtagagagaaaccctacaagtgtgaagaatgtggcaaagtctttaaattgttgtcataccttactcaacatagaagaattcatactggagagaaaaccttccgatgtgaagaatgtggaaaagcctttaaccagagctcacatctgactgaacataggagaattcatactggtgagaaaccatacaaatgtgaggaatgtggcaaagcttttacctggttctcataccttattcagcataagagaattcatactgggcagaaaccctacaaatgtgaggaatgtggcaaagcttttacctggttttcataccttactcaacataagagaattcatactggagagaaaccctacaaatgtgatgaatgtggcaaagcttttaactggttttcatatcttactaatcataagagaattcatactggagagaaaccctacaaatgtgaagaatgtggcaaagcctttggccagagctcacacctttctaaacataagacaattcataccagagagaaaccatacaagtgtgaggaatgtggcaaagcctttaaccactctgcacaacttgctgtacatgagaaaactcatacctgagaaaaaccctacaattctaaacaatatggcatagtctttaatacctattcacaacttcacagcagaatatttttactgaataagagtgttacaaatgtaatgactgtcaaaaggccatttacagtctatgagcctttgagtgcactaaaatgtttaggctacgaacaatacaaatagaccggttcaacacctccacttatatcacagctcttactgtacacagaagaatttatactggagggaaaccctccagttgctcaaactgtattcaatttcaaagactttgtattggagagaaaccctacaaatgtaataaatgcagaaacaacatttgttcaaaaaatatacctcagaaaacaccagagtgttcacactaaaaactgttttacagatgcagtaaatgtgaaaaaatgtctaatcaaaaattacatcaaaacacatccaagaattcatagtaaaaagcactaagtcactgacactttcagacattactgtaaatctgagtgttggttatagagaataattcaaagttaagttaaagtaagtaggagattcaccttttggggaagttataattacatttcaagtataccttttggtgccaggcacggtggctctttcctatagttgctgcacttttggatgccgaggtcgggggattgcttgagcccaggagtttgggaccaggctgggcaacatggcaaaacctcatctctacaaaaagtaaaataaaagccaggcttggtggcacatgcctgttgtcccagctacttggaaggctcaggtgggaggattgcttgagcctggaggttgaggatgcagtgagctgctatctggcaacttcactcctgcctgggcaacagagcaagaccctttctcaataataataataacaacataataataaagtatactcggtgcactgaaagagttttagcttttttgaaaatcacatatttatgtaattcaagtcttaaatcacttgataccatgccttcatttctagtgtttatgtgaaggcatgaggcctactgttgctacatgaaagctgtgagagtttcttctatattcgggtgggtgttgttcatatccttttctttggaagattatggacattgcattgtaagcttcctgaagaaatttaactggagaggctctttgtacttgtcttataatagggttgtaagtgattcatgagataggtcttcagagtactattctgcattatatttaagaaagaaacatttgagttttacaagtcagttgtttttcctattgcacattaaggtaataaaattcagtggattttgaaatgctctttttagactgtttgaacttaatttgttttaataagacattgttttaatgtctttggaccgttgtacattaagtgatgcgtatcctaccaccaacgttaacctatctcaccttagttacggttgtaggtaacaaatggtaacaatacaatagtgggtaacatggtggaatagtatctctaatgatcccttctcccagtggcattaaacttcaaataatttgaaaaatattgttcccacacgttacaccttcattctgtttgctctttttgtaatgacagtgtcattattaaggctataataaagcctatataggattataatcaaa

SEQ ID NO: 203516 - DNA, 862 bp, Homo sapiens
  Payload ID: 20130
  Gene Name: zinc finger protein 695
  Uniprot ID: Q8IW36
  ENST ID: ENST00000366504
  CDS Start-End: 92-493
cccgggtgactgccgcaggctccatcgccctgtggcctgcaggtattgcgagatttatagggaggacgctgggacccccaaaagctgggaaatgggactattggcattcagggatgtggctctagaattctctccagaggagtgggaatgcctggacccagctcagcggagtttgtatagggatgtgatgttagagaactacagaaacctgatctcccttggtgaggatagcttcaatatgcaattcctatttcacagtcttgctatgtctaagccagaactgatcatctgtctggaggcaaggaaagagccctggaacgtgaacacagagaagacagccagacactcagttttgtcttcttatcttactgaagacattttgccagagcagggcctgcaagtttcattccaaaaagtgatgctgagaagatatgaaagatgttgtcttgagaaattacgcttaaggaatgactgggaaattgtggccatgtgaagatgtgcttgcttcccctttgccttctgccatgattctaagtttcctgaggcctccccagaagcagaagcatgtaaagcccacagaaccggtccagtcgtcgaccatcgagctgctttgaagaccctgcggaggttccgtcgctgcttgaacacagtgcctggactccctgctccgtgaggcgaatttacaccgggtccagctgcgtcagcccgagttctgaattaaaacatgcctcccacagaatctatttctgatgaatatgaaaggaagattgttcttccatgttggtttttattgagatatctctttttttcccttttcatttggttgtcctaactccatgaatagaaaagaaaatgtattaat

SEQ ID NO: 203517 - DNA, 714 bp, Homo sapiens
  Payload ID: 20130
  Gene Name: zinc finger protein 695
  ENST ID: ENST00000491337
  CDS Start-End: 149-415
tttgtctccttgcggccggcggggtgctgggttcccgtctgctgcctctcggagagtcccgggtgactgccgcaggctccatcgccctgtggcctgcaggtattgcgagatttatagggaggacgctgggacccccaaaagctgggaaatgggactattggcattcagggatgtggctctagaattctctccagaggagtgggaatgcctggacccagctcagcggagtttgtatagggatgtgatgttagagaactacagaaacctgatctcccttggtgaggatagcttcaatatgcaattcctatttcacagtcttgctatgtctaagccagaactgatcatctgtctggaggcaaggaaagagccctggaacgtgaacacagagaagacagccagacactcagccatgtgaagatgtgcttgcttcccctttgccttctgccatgattctaagtttcctgaggcctccccagaagcagaagcatgtaaagcccacagaaccggtccagtcgtcgaccatcgagctgctttgaagaccctgcggaggttccgtcgctgcttgaacacagtgcctggactccctgctccgtgaggcgaatttacaccgggtccagctgcgtcagcccgagttctgaattaaaacatgcctcccacagaatctatttctgatgaatatgaaaggaagattgttcttccatgttggtttttatt

SEQ ID NO: 203518 - DNA, 826 bp, Homo sapiens
  Payload ID: 20130
  Gene Name: zinc finger protein 695
  Uniprot ID: Q8IW36
  ENST ID: ENST00000487338
  CDS Start-End: 186-704
agagaggaaggggcggccttggggatctggcggggcctttgtctccttgcggccggcggggtgctgggttcccgtctgctgcctctcggagagtcccgggtgactgccgcaggctccatcgccctgtggcctgcaggtattgcgagatttatagggaggacgctgggacccccaaaagctgggaaatgggactattggcattcagggatgtggctctagaattctctccagaggagtgggaatgcctggacccagctcagcggagtttgtatagggatgtgatgttagagaactacagaaacctgatctcccttggtgaggatagcttcaatatgcaattcctatttcacagtcttgctatgtctaagccagaactgatcatctgtctggaggcaaggaaagagccctggaacgtgaacacagagaagacagccagacactcagttttgtcttcttatcttactgaagacattttgccagagcagggcctgcaagtttcattccaaaaagtgatgctgagaagatatgaaagatgttgtcttgagaaattacgcttaaggaatgactgggaaattccatgtgaagatgtgcttgcttcccctttgccttctgccatgattctaagtttcctgaggcctccccagaagcagaagcatgtaaagcccacagaaccggtccagtcgtcgaccatcgagctgctttgaagaccctgcggaggttccgtcgctgcttgaacacagtgcctggactccctgctccgtgaggcgaatttacaccgggtccagctgcgtcagcccgagttctgaattaaaacatgcctcccaca

SEQ ID NO: 203519 - DNA, 885 bp, Homo sapiens
  Payload ID: 20130
  Gene Name: zinc finger protein 695
  ENST ID: ENST00000479214
  CDS Start-End: 149-514
tttgtctccttgcggccggcggggtgctgggttcccgtctgctgcctctcggagagtcccgggtgactgccgcaggctccatcgccctgtggcctgcaggtattgcgagatttatagggaggacgctgggacccccaaaagctgggaaatgggactattggcattcagggatgtggctctagaattctctccagaggagtgggaatgcctggacccagctcagcggagtttgtatagggatgtgatgttagagaactacagaaacctgatctcccttggtcttgctatgtctaagccagaactgatcatctgtctggaggcaaggaaagagccctggaacgtgaacacagagaagacagccagacactcagttttgtcttcttatcttactgaagacattttgccagagcagggcctgcaagtttcattccaaaaagtgatgctgagaagatatgaaagatgttgtcttgagaaattacgcttaaggaatgactgggaaattgtggccatgtgaagatgtgcttgcttcccctttgccttctgccatgattctaagtttcctgaggcctccccagaagcagaagcatgtaaagcccacagaaccggtccagtcgtcgaccatcgagctgctttgaagaccctgcggaggttccgtcgctgcttgaacacagtgcctggactccctgctccgtgaggcgaatttacaccgggtccagctgcgtcagcccgagttctgaattaaaacatgcctcccacagaatctatttctgatgaatatgaaaggaagattgttcttccatgttggtttttattgagatatctctttttttcccttttcatttggttgtcctaactccatgaatagaaaagaaaatgtattaattc

SEQ ID NO: 203520 - DNA, 2795 bp, Homo sapiens
  Payload ID: 20131
  Gene Name: zinc finger protein 696
  Uniprot ID: Q9H7X3
  ENST ID: ENST00000330143
  CDS Start-End: 410-1534
gtttccggcgcgcgacggggcggggaccgtagcgggtgcagtccagctgctctggacgctgaggccccggcttctcttgctggggtgtcgattcgggagggctgagggcgcggccgagagaacggggcggtcaccgccgccgtggcccgcgcgtcccgcgctctccttgcagtgcaggccccagccgctctcgggcgcggcgtgggggaggcggccctgcaggtgcgtacccggggtccgacacgtgcggggcttcctgcgagctgagtccccgctgcgcgtcttcaggcctttgtaagttgtcaaatttcccaccggcccagctcatcgagcttcttcccagctgtgaacaggagggcctgttccctaattcttgccgaaattgttccaactgctggtgttctgcaagatggagccaggaggagagcccacaggtgctaaagagagcagtaccctgatggagtcccttgcagctgtgaaggctgctttcctggcgcaggccccgagtggcagccggtcagccgaggtgcaggcagctcagagcacggagcctgccgcagaggcaggcgctcccgagggagagggccacagaggggggcctccccgggcgttggggtctcttggcctttgtgaaaaccaggaagccagagagaggcccggaggttcccctcgaggcccggtcacttctgagaaaactggaggacagagtggcctcgagtcagacgtccctccgaacgcaggccccggcgcagagggcgggggcagctggaaggggcggcctttcccgtgcggcgcctgtggccgcagcttcaagtgctcctcggacgcggcaaagcaccggagcatccactcgggggagaaaccgtacgagtgcagcgactgcgggaaggccttcatccacagctcgcacgtggtccggcaccagcgggcgcacagcggggagaggccctacgcgtgcgccgagtgcggcaaggccttcggccagagcttcaacctcctccggcaccagcgcgtgcacacgggcgagaagccctacgcgtgcgccgactgcggcaaggccttcggccagaggtcggacgccgccaagcaccgccgcacccacaccggggagaggctgtacgcgtgcggcgagtgcgggaagcgcttcctgcacagctcgaacgtggtccggcaccggcggacccaccacggggagaacccgtacgagtgccgggagtgcggccaggccttcagccagagctccaacctcctccagcaccagcgcgtgcacacgggggagcggcccttcgcctgccaggactgcggccgcgccttcagccgcagctccttcctccgcgagcaccgccgcatccacaccggggagaagccccaccagtgcggccactgcgggcgcgcgttccgggcgctgtcgggcttcttccggcaccagcgactccacacgggcgagaagccgttccgctgcaccgagtgcggccgcgccttccgcctgagcttccacctcatccagcaccggcgggtgcatggcgccgagtgagccggggctgcggcggaagagatgccggcggcctggtgggcgcgaggccgaggccgggggaggctcctgtccgccccgtgcgcggtgaggaagtaacagccggctgcgcgcctggttctcgggttgcgaaagcctcgccaggcctgcatccgccttggcttgggagcaatcaggagagacagggctcggggaaggcgagcgctgcccgcgggaggcgattcccagaggcggggaggtctcaggggtctgtcccgggccggccgcccgcctctgagactccccgcctcccacggtcagctgctgcggggcagtggccggtgattgaatcggtcattcctccgcaaccaggcctccatcaaaaccctgcatgagatgagggcctcgggcttcgggttggtgaaggcggggtgggggggcagttaggaagggggcgcccagacagggcatggaagcctcgcgtcctcccccgtaccttgcgggtcggtggttcatccatgtatttcaacgccttttcacagccggttcatatggtcccgacttctgtgtgcttagaaaattatggaacttggccgggtgcggtggctcccgcctgtaatcctagcactttgggaggccgaggcgggcggatcacacggtcaagagatcaagaccatcctggccaacatggcaaaacccccatctcgactaaaaatacaaaaaattaattgggcgtggtggcgtgcgcctgtaatctcagctacttgggagcctggggcaggagaatcacttgaacctgggaggcggaggttgcagtgagcggagatctgggcactgtactttagcctgggcgacagagagacccatctcaaaaaaaaaattggaacctgagaagggggtcgtggggtccccggggcccaccgtctgcacttggcatctgaagtcggggtggtcttgtgggactgaccccttaccctgtgggttctgcactagctccgggcaattggtgacagaatcgagttaaattgtaggacatcgcgttggtgtctgagagggagttggagagctggttggtgtggagggaaaggcttacacacatgtgatttcagaagcgttctgtgggtagaggaatcgttttctctttgagactgttatgagtatgtacaaatgttatttcctgtaaaatattttcattttttaaaatgttattttctagatagaaaagtagaagtgtctctttggggagcgtttttgggggcgtatagtaaagctctgtcatcatgaa

SEQ ID NO: 203521 - DNA, 1642 bp, Homo sapiens
  Payload ID: 20131
  Gene Name: zinc finger protein 696
  ENST ID: ENST00000518575
  CDS Start-End: 1031-1642
agcggagacgcgagggcggcgtcctgcagggaggcggggggcagcgcctggggcgctccaagctctcggccccaaggaagcccacgctcgggacccgcgtgctgccacagccccgggggcctggagggtcccgtgagccgagcgggacccgggacaagcgcgggacgccgcggggaacggacgggaacgcgcgtggccgccccacagcgggccttcgacacctcctgacacgtcctgcgggtgcccggtcctcagttggctcgagccggatcccggcgcgccaacggctcgaccttgccccccacgaggcagggcttcctgcccggcaggaaggactcggccggcgcctgcgggcaaccgatgagctgaaggcgccgcggctgggccgtcccgctctcccgccgccgagcgcgctgtcctcccgctgcccagagcgtcgccggaagtgccgagggggcgggccaggggtggagactggcgtttccggcgcgcgacggggcggggaccgtagcgggtgcagtccagctgctctggacgctgaggccccggcttctcttgctggggtgtcgattcgggagggctgagggcgcggccgagagaacggggcggtcaccgccgccgtggcccgcgcgtcccgcgctctccttgcagtgcaggccccagccgctctcgggcgcggcgtgggggaggcggccctgcaggtgcgtacccggggtccgacacgtgcggggcttcctgcgagctgagtccccgctgcgcgtcttcaggcctttgtaagttgtcaaatttcccaccggcccagctcatcgagcttcttcccagctgtgaacaggagggcctgttccctaattcttgccgagacggggtctcactatgttgcccaggctggtcaggaactcttgtaatcagtcagtcctccatcctgagccttttgaagtgctaggattacaactgtgagccacagcacccagccaaattacatttcttaattgcacttgagaaattgttccaactgctggtgttctgcaagatggagccaggaggagagcccacaggtgctaaagagagcagtaccctgatggagtcccttgcagctgtgaaggctgctttcctggcgcaggccccgagtggcagccggtcagccgaggtgcaggcagctcagagcacggagcctgccgcagaggcaggcgctcccgagggagagggccacagaggggggcctccccgggcgttggggtctcttggcctttgtgaaaaccaggaagccagagagaggcccggaggttcccctcgaggcccggtcacttctgagaaaactggaggacagagtggcctcgagtcagacgtccctccgaacgcaggccccggcgcagagggcgggggcagctggaaggggcggcctttcccgtgcggcgcctgtggccgcagcttcaagtgctcctcggacgcggcaaagcaccggagcatccactcgggggagaaaccgtacgagtgcagcgactgcgggaaggccttcatccacagctcgcacgtggtccggcaccagcgggcgcacagcggggagaggccctacgcgtgcgccgagtgcggcaaggccttcggccagagcttcaacctcctccggcaccagcgcgtgcacacg

SEQ ID NO: 203522 - DNA, 576 bp, Homo sapiens
  Payload ID: 20131
  Gene Name: zinc finger protein 696
  ENST ID: ENST00000523891
  CDS Start-End: 240-576
gaaagcggcacagggaacagcatgacacgggcctgaggcagggcacatttggaaaggggcgaggagagggcagtggcttctggcacggcagcagtgggcatacagaggcagtcgggacccgtctggaagagcctccgcccgggcattccagctggagatgcgtgaccttcggtctgcggcaggcggaagggcgagagacttggacaggaggtgcatcttgcccggggaaggctgaacgaatgagagctcggtccctgaaattgttccaactgctggtgttctgcaagatggagccaggaggagagcccacaggtgctaaagagagcagtaccctgatggagtcccttgcagctgtgaaggctgctttcctggcgcaggccccgagtggcagccggtcagccgaggtgcaggcagctcagagcacggagcctgccgcagaggcaggcgctcccgagggagagggccacagaggggggcctccccgggcgttggggtctcttggcctttgtgaaaaccaggaagccagagagaggcccggaggttcccctcgaggcccggtcacttctgagaaaactg

SEQ ID NO: 203523 - DNA, 545 bp, Homo sapiens
  Payload ID: 20131
  Gene Name: zinc finger protein 696
  ENST ID: ENST00000518432
  CDS Start-End: 225-545
gtagcgggtgcagtccagctgctctggacgctgaggccccggcttctcttgctggggtgtcgattcgggagggctgagggcgcggccgagagaacggggcggtcaccgccgccgtggcccgcgcgtcccgcgctctccttgcagtgcaggccccagccgctctcgggcgcggcgtgggggaggcggccctgcagaaattgttccaactgctggtgttctgcaagatggagccaggaggagagcccacaggtgctaaagagagcagtaccctgatggagtcccttgcagctgtgaaggctgctttcctggcgcaggccccgagtggcagccggtcagccgaggtgcaggcagctcagagcacggagcctgccgcagaggcaggcgctcccgagggagagggccacagaggggggcctccccgggcgttggggtctcttggcctttgtgaaaaccaggaagccagagagaggcccggaggttcccctcgaggcccggtcacttctgagaaaactggaggacagagtggcctcgagtcagacgtccct

SEQ ID NO: 203524 - DNA, 705 bp, Homo sapiens
  Payload ID: 20131
  Gene Name: zinc finger protein 696
  ENST ID: ENST00000521537
  CDS Start-End: 395-508
cggggcggggaccgtagcgggtgcagtccagctgctctggacgctgaggccccggcttctcttgctggggtgtcgattcgggagggctgagggcgcggccgagagaacggggcggtcaccgccgccgtggcccgcgcgtcccgcgctctccttgcagtgcaggccccagccgctctcgggcgcggcgtgggggaggcggccctgcaggtgcgtacccggggtccgacacgtgcggggcttcctgcgagctgagtccccgctgcgcgtcttcaggcctttgtaagttgtcaaatttcccaccggcccagctcatcgagcttcttcccagctgtgaacaggagggcctgttccctaattcttgccgaaattgttccaactgctggtgttctgcaagatggagccaggaggagagcccacaggtgctaaagagagcagtaccctgatggagtcccttgcaggtgaggggacatgtccacagtcgggcccagagttccagggcaggaattgaacaggaatacaggaaaaacaccatgtctcagtcactgacgcagagcatatactgtgtccttgggcgcagggtgagggagggaggtaaacgcaggcccatcagatctcctgggcatctgtttggtgactgtctttgccagtgaactgagagcttttggttagaaagtctggcagccccaggctctgcctctgggaagg

SEQ ID NO: 203525 - DNA, 605 bp, Homo sapiens
  Payload ID: 20131
  Gene Name: zinc finger protein 696
  ENST ID: ENST00000520333
  CDS Start-End: 377-538
gggtgcagtccagctgctctggacgctgaggccccggcttctcttgctggggtgtcgattcgggagggctgagggcgcggccgagagaacggggcggtcaccgccgccgtggcccgcgcgtcccgcgctctccttgcagtgcaggccccagccgctctcgggcgcggcgtgggggaggcggccctgcaggtgcgtacccggggtccgacacgtgcggggcttcctgcgagctgagtccccgctgcgcgtcttcaggcctttgtaagttgtcaaatttcccaccggcccagctcatcgagcttcttcccagctgtgaacaggagggcctgttccctaattcttgccgaaattgttccaactgctggtgttctgcaagatggagccaggaggagagcccacaggtgctaaagagagcagtaccctgatggagtcccttgcagagacaggatctcactatgttggccaggctggtcttgaactccaagtctcaagtggtcctcctgcctcagcctctgaaagtgcggagatacagctgtgaaggctgctttcctggcgcaggccccgagtggcagccggtcagccgaggtgcaggcagctcagagcac

SEQ ID NO: 203526 - DNA, 5041 bp, Homo sapiens
  Payload ID: 20132
  Gene Name: zinc finger protein 697
  Uniprot ID: Q5TEC3
  ENST ID: ENST00000421812
  CDS Start-End: 121-1758
accgtcccgccgaccaccgaagggggcatcagagaccctcggagaaaccaagcccagggaggagcttggaaggcaaggagaagggattcctggtcacctcccttgctcttttcttcctggatgaaacaagaagataatcagggtgtctgtgcacaccaggactcagaagacaaagggatgggttctgattttgaggactctgaggacagggaaggggacccagaagaaagagaaatgggctctaatccacatgacacaaacaagagagaaggccatccggagccggagatgggctccaacccacaggactcaaggcacagggaagcagtgcccgacatctgcacagaggggcagctgagtgaggaagaaggcgtttctgtccgtggggaagaggatgaccaatccggtgtagctgacatggcgatgttcccaggactgtctgagtctgacagcatatcccggagcctccgggaggacgacgacgagagtgctggggagaaccggctggaggaggaagaggagcagccggcccctcccgtacttccctggaggcgacatctctccctggggagtcggcaccgaggtgacaagcccgcccaccgccgcttccaccggctccaccaccccatggccgtggacctcggggagctggatagcctggtggccagcatcatggacgcgcccaccatctgccccgactgcggggagagcttcagtcctggcgccgccttcctgcagcaccagcgcattcaccgcctggctgaggccgctgccgccgccagcctggagcccttcggcctggcgggcgagtgcgacgcgatggtgggcatgatgggggtgggtgtggcggggggcttcggggccgggcccccgctggcccggcccccgcgcgaaaagcccttccgctgcggggagtgcggcaagggcttcagccgcaacacctacctgaccaaccacctgcgcctgcacacgggcgagcggcccaacctgtgcgccgactgcggcaagagcttcagctggcgcgccgacctgctcaagcaccggcgcctgcacacgggcgagaagccctacccgtgccccgagtgcggcgaggccttcagcctcagctcgcatctgttgagccaccggcgcgcgcacgcggcggccagcggcgcgggggcggcggcgctgcggcccttcgcctgcggggagtgcggcaagggcttcgtgcgccgttcgcacctggccaaccaccagcgcatccacacgggcgagaagccgcacggctgtggcgagtgcggcaagcgcttcagctggcgctcggacttggtgaagcaccagcgcgtgcacacgggcgagaagccctacatgtgctccgagtgcggcgagaccttcagcgtcagctcgcacctcttcacgcacaagcgcacgcactcgggtgagcggccctacgtgtgccgcgagtgcgggaagggcttcgggcgtaactcgcacctggtgaaccacctgcgcgtgcacaccggcgagaagcccttccgctgtggccagtgcgagaagcgcttcagcgacttctccacgctcacgcagcaccagcgcacgcacacgggcgagaagccctacacgtgcatcgagtgcggcaagagctttatccagagctcccacctgatccgccaccgccgcatccacacgggcaacaagccgcacaagtgtgcgggctgcggcaaaggcttccgctataaaacgcacctcgcgcagcaccagaagctgcacctgtgttaggggctgggtccgcgggaggctgccgtctggggagcctgtggggggtagatatcctgggactgacccaggggaaggaagtggggaaggggcgggagggacaatctgagagtgactggggagcctttggtgtttggggtttcctgaagtgggaggagtgttgagtaagttggtctttcccggtgctatacttgcctcctctccacggaagaattgttcaggagatgcgcttggggtgatgacttccttaaatacacgctgtagggggtgaagagcttggaggaccaggcactttgaggaagggcagttcgtgggctggggtgggaacaggatggcgggcaatagactagggtaggccgcgatggcctgtagaaggttgcggggagagggtttaaatgagggttatggggcgaaataaaaccaagtataagtgattctatcttggtcccaccaagagtttgcccgatctccacacatcacctgttgtctcacaaaaagtaggggaaccttgtcagtcacataggacaggatatttaatgtacttttcctttctctgagccacagttagctgctattttgaggcatccaaggggaagtgggctgaaaaacgccacactcatttcaaggggcaatgtctggggtttagaaattcatttataactggttctctgatgtgggaaatcctgattctgtcccgggttctttgctacttccttgaaaatactctagcttcatgctgggtcaaggtggtttacctggatgacccccctcccccgccctcgcccatcccaggtgtgtgccacacccagtatttctttcaggtctcaactgtggtgttttaagtgcagggaaaaggaacaatcacagctatgtgtgactttccttttcccacctcaccttgatgtaggtgtttcaagtgaactttagaccaacagttgcccagtgacctgctaaaaagtcaactagctcagagttttgctggcctttatgtgagaaatccaagaaagtgttcacttttttgggatgcgagactccttggtctcatttgccttcactttgcatttgttagtgacctccactaacccccacttccatgcatattgacgagggatctagtctaagtaagaatgtcttttgcctgcgcgtggaggcacagtagaaatctcaaggctttacccagaagagcccagtcagggagaggtgtaaatgcaaaattgccaaatagcacaaacaatgaatgttttctggttgttatatagatgccaaaatagcactttgatatttgcaaagtgctttatgctttttaataattgttagctgtttctcacatcattgtgagttagatcagtattatgaccgctgtcttagggaaggcctgggaacaggagtgtgcaggctgtcctgaagagaggctgaggacagtgtgaataattgtagcctgaccttttgcattctccagctcagctgctaggaagacttacttgtcatgatttatataataaaattaaggacactgaaaattcttatgcttgatgaaaaacttaaggctagcctagaagggccaaacatgtccttattgacaaagctggtctttgtcgcctaattagggtatcctagctatgttccatttctagtaaggggctgtagttagatgactcttgtatagatttcagttacttatgctgaagatccctgtgctaggttagcctttagaagttagagttgtggaaagcagtattgttttcttctctagtgattgttaccctacacatttcatggaagcatcttcacaaaatatcagacacagtggaagggggaaaaaaagctacgagattgtttttacacttttagcaaagtttctgtggatgctagtaatttatacttgatcagttgtattctagtaaagaacctctttggggactgtaggaaagcatgtttttgtggttataaaaacacttaaaaatcctgataattctgggcttgtataatgcctgttgatcttgccctcttaatcagtttattgttattcacaaatgcaaataggttttcaaactacagacagttttgaaagacattaattctcattttcttctagtcaggagtaatacaagcaaacaagtgtccgttttgaattctgatttgtaatctgaatactaaacatattagacccacctgaaaataatatagccaatttctaggtaatcttactgctttgtgggtttctttccatgtacatctacctcttccagctgttttaagttttctcaagtctgtgcctatgaaatctcatccaacttttgattattcatggattgattatccgctttttttttgcttttttgctgccattgctatgcctggtctcgtctgcatcaaatatactacatatcagcaactttagagaatgggttcaacagggagtggagagtgaagctaatgtaaaatagtttagtggcagtgggaatctttggacttcatttacctctctcattatttctattaccatggataaaaaagtcagctgctacgttgatatcccttctatgagcacattcttagcagaagaaaacaatccaactaccaacacccgactctattggtgcatttaaaatgtgattccattttttcttacaattcttcagggaacttacctgcattaagtgaggttaaatgcattcaggaggttgtttgtttcttctatctagttttagaataatatttcttcggcaaaccctgctaactgcggttcacccttgaaaacgttaatctgaggactttttccaccaactcattaatgatggtggaagcaagtgtattatttgtttcctggagaatttgatgaagagcagtcttcctctgctgccctttactaagcaaaacctggagcaatttaaataggctaaatggttttgattaaatcttgagctccgagttggaaggagaaaatgagaagttaaccccttgagccatgtggtctctttacaatcaagagactgtacatatgtgaaaaaatacaaattaaggacctgtgttcatagacaatctaaactgtgtttctgaagtttgtgcacatttttcttcactgtaatgttattttacagctgtttgttaaaatagtgaataatttaatgatcctaaaagtaacaggtttcgtgtgagtgtgcttgtatacgtgagatttgccttattttcaggttgttttatttaacgatggttccttggacagcattctggtgttcagcaaccaatatggaatatttgtcattaaatccatatcagtctttta

SEQ ID NO: 203527 - DNA, 2094 bp, Homo sapiens
  Payload ID: 20133
  Gene Name: zinc finger protein 699
  Uniprot ID: Q32M78
  ENST ID: ENST00000308650
  CDS Start-End: 1-1929
atggaggaagaaagaaaaactgctgagttacagaaaaatagaatacaggactcagtagtctttgaggatgtggctgtggactttacccaggaggaatgggctttgctggatcttgctcagagaaacctctacagagatgtgatgctggaaaacttccagaacctggcctcactagggtatccgctacacacaccccatctgatctcccagtgggaacaagaggaggacctgcagacagtgaagagagaacttatccagggcatctttatgggagagcaccgggaaggttttgagactcaacttaaaactaatgaatcagttgcttcacaagatatttgtggagaaaaaatatccaatgaacagaaaatagtaagattcaaaaggaatgattcctggttctccagtttacatgaaaaccaggagtcctgtggtattgattatcagaacaaaagccatgagagacatttgagaaatcatatggtagagaacatctatgaatgttatgaagaaaatcaagatggacagactttcagccaagttccaaatcttgattcactcaagagaaatactgaagtaaaatcctgtgaatgccatgagtgtggaaaggccttcgtggatcattcatcccttaagagtcacatcaggtctcatactggaagcaaaccctatcagtgcaaggaatgtgggaaggccttccattttcttgcttgtttcaagaagcatatgaaaacccccactgaagagaagccctatgaatgtaaggaatgtaccaaagccttcagctgttcctcattctttagggcacatatgaagattcacatcggaaagacaaactatgaatgtaaagaatgtgggaaaggttttagttgttcctcatcgctcacagaacacaaaagaattcacagtggagataagccttatgaatgtaaggaatgtgggaaggccttcagttgttcctcctcactctccaaacacaaaagaattcacagtggagataagccatatgaatgtaaggaatgtgggaaggcctttagctcttcctctcaccttataatacatataagaattcacactggagagaagccttatgaatgtaaagagtgtgggaaggccttcagcgagtcctcaaaactcactgtacatgggaggacacatactggagagaaaccctataaatgtaaggaatgtgggaaagcctacaattgtccctcctccttaagtatccatatgagaaaacacactggagaaaaaccgtatgaatgtctggaatgtggaaaggccttctaccttcccacttcccttaatacacatgtgaaaaatcaaagtcgagagaaaccctatgaatgtaaggaatgtgggaaggcctttagttgtccctcgtcctttagagcacatgtgagagatcacactggaaagatacagtatgaatgtaaggagtgtgggaagacctttagtcgttcctcatccctcaccgaacacctaagaactcacagcggagagaagccgtatgaatgtaaagaatgtgggaaagcctttattagttcctcccaccttacagtacatatcagaactcacactggagagaaaccctatgaatgtaagaaatgtgggaaagcctttatttatccctcagcccttaggatccacatgagaacgcacactggggaaaaaccctatgaatgtaaggaatgtgggaaagcatttcgtcattcttcataccttactgtacatgcaagaatgcacactggagagaaaccctttgaatgtctggaatgtggaaaagctttcagttgtccctcatcctttcgaaggcatgtgagaagccacactggagagaaaccctatgaatgtaaggaatgtgggaaagcctttgtttgtcctgcctactttcgaaggcatgtgaaaactcacactagagaaaacatataaatgtaaggaatatgggaatgtctgcaaagcttcagatcctaggcaacatgtgagatctcatactgtggagacaccctatgaatgtaagaaagtaggaaattgttgctcatcgttttgaagatttgaggacactttagagaaaccctgtgtatgtaagtcatgtgc

SEQ ID NO: 203528 - DNA, 3358 bp, Homo sapiens
  Payload ID: 20133
  Gene Name: zinc finger protein 699
  Uniprot ID: Q32M78
  ENST ID: ENST00000591998
  CDS Start-End: 230-2158
gctggtcccaaactcactgaatcgggaactctggtctgggtacagaaatcggggtgattctgatgcaggcgagagttggagaaccaatgtcgtagttcatcagcctccgaaagcatcctttgctctctttccagaaaggaagagcatctctgccattcgtgtctcaaggacaagcgcttcagcctcgttctctgtgagctgatctgtggatcgcggcgtgtcgggcgacatggaggaagaaagaaaaactgctgagttacagaaaaatagaatacaggactcagtagtctttgaggatgtggctgtggactttacccaggaggaatgggctttgctggatcttgctcagagaaacctctacagagatgtgatgctggaaaacttccagaacctggcctcactagggtatccgctacacacaccccatctgatctcccagtgggaacaagaggaggacctgcagacagtgaagagagaacttatccagggcatctttatgggagagcaccgggaaggttttgagactcaacttaaaactaatgaatcagttgcttcacaagatatttgtggagaaaaaatatccaatgaacagaaaatagtaagattcaaaaggaatgattcctggttctccagtttacatgaaaaccaggagtcctgtggtattgattatcagaacaaaagccatgagagacatttgagaaatcatatggtagagaacatctatgaatgttatgaagaaaatcaagatggacagactttcagccaagttccaaatcttgattcactcaagagaaatactgaagtaaaatcctgtgaatgccatgagtgtggaaaggccttcgtggatcattcatcccttaagagtcacatcaggtctcatactggaagcaaaccctatcagtgcaaggaatgtgggaaggccttccattttcttgcttgtttcaagaagcatatgaaaacccccactgaagagaagccctatgaatgtaaggaatgtaccaaagccttcagctgttcctcattctttagggcacatatgaagattcacatcggaaagacaaactatgaatgtaaagaatgtgggaaaggttttagttgttcctcatcgctcacagaacacaaaagaattcacagtggagataagccttatgaatgtaaggaatgtgggaaggccttcagttgttcctcctcactctccaaacacaaaagaattcacagtggagataagccatatgaatgtaaggaatgtgggaaggcctttagctcttcctctcaccttataatacatataagaattcacactggagagaagccttatgaatgtaaagagtgtgggaaggccttcagcgagtcctcaaaactcactgtacatgggaggacacatactggagagaaaccctataaatgtaaggaatgtgggaaagcctacaattgtccctcctccttaagtatccatatgagaaaacacactggagaaaaaccgtatgaatgtctggaatgtggaaaggccttctaccttcccacttcccttaatacacatgtgaaaaatcaaagtcgagagaaaccctatgaatgtaaggaatgtgggaaggcctttagttgtccctcgtcctttagagcacatgtgagagatcacactggaaagatacagtatgaatgtaaggagtgtgggaagacctttagtcgttcctcatccctcaccgaacacctaagaactcacagcggagagaagccgtatgaatgtaaagaatgtgggaaagcctttattagttcctcccaccttacagtacatatcagaactcacactggagagaaaccctatgaatgtaagaaatgtgggaaagcctttatttatccctcagcccttaggatccacatgagaacgcacactggggaaaaaccctatgaatgtaaggaatgtgggaaagcatttcgtcattcttcataccttactgtacatgcaagaatgcacactggagagaaaccctttgaatgtctggaatgtggaaaagctttcagttgtccctcatcctttcgaaggcatgtgagaagccacactggagagaaaccctatgaatgtaaggaatgtgggaaagcctttgtttgtcctgcctactttcgaaggcatgtgaaaactcacactagagaaaacatataaatgtaaggaatatgggaatgtctgcaaagcttcagatcctaggcaacatgtgagatctcatactgtggagacaccctatgaatgtaagaaagtaggaaattgttgctcatcgttttgaagatttgaggacactttagagaaaccctgtgtatgtaagtcatgtgctaaagcctttatgaacattgcttattatgtataagaaaatctctactagaaatgaagatcagtgcctcatccttaaagtagaatgctggctcgttgattaccagtgttttctgataggaacattgaaggtgataaatttaccttttcagctctagccacatactttttagtatgaggtgctttaattttggttctgatgtaaatatgatttccattacaaaatcttttggatcatggaggacacgaaatattttttctgtataggcagcagtggtcttttttaaaaaagtggtttctaattaatgttcattgttctttaaatgggtagtcgttataatattgacaaaccaatataatattgacaaaccaaaaaccaaatattgatttttgttgatgttttgtttttagtctacatggcagataatggaacttgcccactcaatatttttcttcctattcttttttgctaagagacgttagagtttctgagatgataaatttttactattaaaagcttttattgtctagtgagtaatttcagcagaaattaatttaatatactatttttatattttattctttgtccttgctcgtggctgggaattggatccagtgttttgagtgtaaaaattgtgttacattaactacatttcccagaatcacttttttctccagttctaggttagacttgtctaaaataagagtttgtacgagatttggaaggcataagggaagaaaaagctgttatgctatgtttagtggggccatcagacagagagacagatgtataaaggcctggtgacctctagttttcagctcatttttctgactgttggactcattgatcaatatttgctcaaaactgaatgttatagctggacgtgatggtgcatacctgtggtcccagctactcagggagctgaggctggaggatcacttgagcccaggagtttgaggctgcagtgaactatgatcatgccactgcactccagcctgagtgatagagtgagaccctttctcaaaaacaaaacaaaa

SEQ ID NO: 203529 - DNA, 592 bp, Homo sapiens
  Payload ID: 20134
  Gene Name: zinc finger protein 7
  ENST ID: ENST00000325217
  CDS Start-End: 96-575
gtttccggcggcgtcgcgcgtttgcgagcctcgggtggtcctcagggagggtctctcggccagaacacgtggatgcccacccaccactgagcctcatgggattcctggggtgctggtgtgtgtcctttcaggaggtggtaacatttggcgatgtggctgtgcacttctctcgggaggagtggcagtgtctggaccctggccagagggccctctacagggaagtgatgctggagaaccacagcagtgtggctggactagcaggattcctggttttcaagcctgagctgatctctcggctggagcagggagaagagccatgggtcctcgacctgcagggagcagaggggacagaggcaccaaggacctccaagacaggctttctgggccgcccaaccatgggacaagagccaaggcacccacatgcaccgcctgcaactcctgttcctggccttccaaaacactgctcacaaagactgaccctgcctcctcctgggctctcgtcatctcctcttggccacttcctggttcatgatcaggacagaaggaggggaacgtcagccatatggatggtctgaaaattccagattctgtg

SEQ ID NO: 203530 - DNA, 2242 bp, Homo sapiens
  Payload ID: 20134
  Gene Name: zinc finger protein 7
  Uniprot ID: P17097
  ENST ID: ENST00000446747
  CDS Start-End: 97-2190
cgtttccggcggcgtcgcgcgtttgcgagcctcgggtggtcctcagggagggtctctcggccagaacacgtggatgcccacccaccactgagcctcatgggattcctggggtgctggtgtgtgtcctttcaggaggtggtaacatttggcgatgtggctgtgcacttctctcgggaggagtggcagtgtctggaccctggccagagggccctctacagggaagtgatgctggagaaccacagcagtgtggctggactagcaggattcctggttttcaagcctgagctgatctctcggctggagcagggagaagagccatgggtcctcgacctgcagggagcagaggggacagaggcaccaaggacctccaagacagattctacgattaggactgaaaatgagcaggcctgtgaggacatggacatcctaaaatcagaatcctatgggacagtggtcagaatctccccacaggactttcctcagaatcctggctttggagacgtttctgattctgaggtctggttagacagtcatctgggcagtcccgggctgaaagtgacaggctttaccttccaaaataactgtttgaatgaggagactgtggttcccaagaccttcaccaaggacgcaccccagggatgtaaggagctgggaagcagcggcctggattgtcagcctcttgaaagtcagggagagagtgcggaagggatgtcccagagatgcgaggagtgtggcaaaggcatcagagccacttcagatatcgctctgcattgggaaattaatacacagaaaattagcagatgtcaagaatgccaaaaaaagttatctgactgcttgcaggggaaacatacaaataactgccatggagagaagccgtacgaatgtgcagagtgtgggaaagtcttcaggctctgctcgcagcttaatcagcatcagagaatccacacgggagagaaaccctttaaatgcactgagtgtggaaaagccttccgcctgagctcaaaacttattcagcatcaaagaatccacactggggagaagccctacagatgtgaggaatgtggaaaagcttttggtcagagctcaagcctcatccaccatcagagaatccacacaggagagaggccctatggttgtcgtgagtgtgggaaagccttcagccagcagtcgcagctggttagacaccagagaactcacactggggagaggccctacccttgcaaggagtgtgggaaggccttcagccagagctccaccctagcccagcatcaaaggatgcatactggggagaaagctcaaattctaaaagcctcagacagtccaagccttgttgcacatcagagaattcacgctgtagagaaaccatttaagtgtgatgagtgtgggaaagcttttaggtggatctctcgcctgagtcagcatcagctgattcacactggagagaagccttataaatgcaacaagtgtacaaaagcctttggttgtagttcacggcttattcgccatcagagaactcacactggagaaaaaccatttaaatgtgatgagtgtggcaaaggctttgttcagggctcacaccttattcagcatcagcgaatccacactggagagaaaccctatgtgtgtaatgactgtggaaaagccttcagtcagagttccagccttatttaccatcagagaatccataaaggagagaagccctacgaatgcctccaatgcggaaaagccttcagtatgagcacacagcttacaatacatcaaagggttcacactggagagaggccctataaatgtaatgaatgtgggaaagccttcagtcaaaactcaacccttttccaacaccagataattcatgcaggggtgaagccctatgagtgcagtgagtgtggaaaagccttcagccggagctcatatcttattgaacaccagagaatacacactagggcccagtggttttacgaatatgggaatgccctggaagggtccacctttgtgagccgtaaaaaggttaatactataaagaaactgcatcagtgtgaagactgtgagaagatatttaggtggcgttcacacctaattatacaccagagaattcacaccggggagaagccttataaatgcaatgactgtggcaaagcttttaatcgtagctcaaggcttacccagcatcaaaaaattcacatgggatagaccacttacatataaatgtgtatatatgtgaataaacctatagccttaactt

SEQ ID NO: 203531 - DNA, 915 bp, Homo sapiens
  Payload ID: 20134
  Gene Name: zinc finger protein 7
  ENST ID: ENST00000532777
  CDS Start-End: 192-915
aggcggggctgagaaccacagagatggccgggcctccgagcggcccagggcggccggaagtttgcggggcggggcggacgcgggtggccaaggcccgtttccggcggcgtcgcgcgtttgcgagcctcgggtggtcctcagggagggtctctcggccagaacacgtggatgcccacccaccactgagcctcatggaggtggtaacatttggcgatgtggctgtgcacttctctcgggaggagtggcagtgtctggaccctggccagagggccctctacagggaagtgatgctggagaaccacagcagtgtggctggactagcaggattcctggttttcaagcctgagctgatctctcggctggagcagggagaagagccatgggtcctcgacctgcagggagcagaggggacagaggcaccaaggacctccaagacagattctacgattaggactgaaaatgagcaggcctgtgaggacatggacatcctaaaatcagaatcctatgggacagtggtcagaatctccccacaggactttcctcagaatcctggctttggagacgtttctgattctgaggtctggttagacagtcatctgggcagtcccgggctgaaagtgacaggctttaccttccaaaataactgtttgaatgaggagactgtggttcccaagaccttcaccaaggacgcaccccagggatgtaaggagctgggaagcagcggcctggattgtcagcctcttgaaagtcagggagagagtgcggaagggatgtcccagagatgcgaggagtgtggcaaaggcatcagagccacttcagatatcgctctgcattgggaaattaatacacagaaaattagcagatgtcaagaatgccaaaaaaagttatctgactgcttgcaggggaaacatacaa

SEQ ID NO: 203532 - DNA, 2905 bp, Homo sapiens
  Payload ID: 20134
  Gene Name: zinc finger protein 7
  Uniprot ID: P17097
  ENST ID: ENST00000528372
  CDS Start-End: 241-2301
gcgcggcgggcgcggactcgggttgccctcggtccgagtgatccctggtcgcttccttagccctcccgccttcggcattggggtccccgcgtcccccgggcctccaggcgggaaagcgcgggggctttgcggggccttgagcgcctggtgtgggaggtggtcgagcccagccaccctcccccgcggcggcgcgaggtctctcggccagaacacgtggatgcccacccaccactgagcctcatggaggtggtaacatttggcgatgtggctgtgcacttctctcgggaggagtggcagtgtctggaccctggccagagggccctctacagggaagtgatgctggagaaccacagcagtgtggctggactagcaggattcctggttttcaagcctgagctgatctctcggctggagcagggagaagagccatgggtcctcgacctgcagggagcagaggggacagaggcaccaaggacctccaagacagattctacgattaggactgaaaatgagcaggcctgtgaggacatggacatcctaaaatcagaatcctatgggacagtggtcagaatctccccacaggactttcctcagaatcctggctttggagacgtttctgattctgaggtctggttagacagtcatctgggcagtcccgggctgaaagtgacaggctttaccttccaaaataactgtttgaatgaggagactgtggttcccaagaccttcaccaaggacgcaccccagggatgtaaggagctgggaagcagcggcctggattgtcagcctcttgaaagtcagggagagagtgcggaagggatgtcccagagatgcgaggagtgtggcaaaggcatcagagccacttcagatatcgctctgcattgggaaattaatacacagaaaattagcagatgtcaagaatgccaaaaaaagttatctgactgcttgcaggggaaacatacaaataactgccatggagagaagccgtacgaatgtgcagagtgtgggaaagtcttcaggctctgctcgcagcttaatcagcatcagagaatccacacgggagagaaaccctttaaatgcactgagtgtggaaaagccttccgcctgagctcaaaacttattcagcatcaaagaatccacactggggagaagccctacagatgtgaggaatgtggaaaagcttttggtcagagctcaagcctcatccaccatcagagaatccacacaggagagaggccctatggttgtcgtgagtgtgggaaagccttcagccagcagtcgcagctggttagacaccagagaactcacactggggagaggccctacccttgcaaggagtgtgggaaggccttcagccagagctccaccctagcccagcatcaaaggatgcatactggggagaaagctcaaattctaaaagcctcagacagtccaagccttgttgcacatcagagaattcacgctgtagagaaaccatttaagtgtgatgagtgtgggaaagcttttaggtggatctctcgcctgagtcagcatcagctgattcacactggagagaagccttataaatgcaacaagtgtacaaaagcctttggttgtagttcacggcttattcgccatcagagaactcacactggagaaaaaccatttaaatgtgatgagtgtggcaaaggctttgttcagggctcacaccttattcagcatcagcgaatccacactggagagaaaccctatgtgtgtaatgactgtggaaaagccttcagtcagagttccagccttatttaccatcagagaatccataaaggagagaagccctacgaatgcctccaatgcggaaaagccttcagtatgagcacacagcttacaatacatcaaagggttcacactggagagaggccctataaatgtaatgaatgtgggaaagccttcagtcaaaactcaacccttttccaacaccagataattcatgcaggggtgaagccctatgagtgcagtgagtgtggaaaagccttcagccggagctcatatcttattgaacaccagagaatacacactagggcccagtggttttacgaatatgggaatgccctggaagggtccacctttgtgagccgtaaaaaggttaatactataaagaaactgcatcagtgtgaagactgtgagaagatatttaggtggcgttcacacctaattatacaccagagaattcacaccggggagaagccttataaatgcaatgactgtggcaaagcttttaatcgtagctcaaggcttacccagcatcaaaaaattcacatgggatagaccacttacatataaatgtgtatatatgtgaataaacctatagccttaacttacttattttatatggaatcgtttatactgacaaacatgtagaatgttggtaaaggttcagaattgctctcaagaatatccaacttcaggccgagtgtggtggcttatgcctgtcatcccagcactttgggaggccaaggcgggcacatcacgaggtcaggaggttgagaccatcctgggtaacaggtgaaaccccatctctactaaaaatacaaaaatttagctgggcgtggtggcaggcacctgtggtcccagctgctcgggaggctgaggcaggagaatggcatcagcccaggaggcggagcttgcagtgagctgagatcgcgccactgcactccagcctgggtgacagagtgagactccctctcaaaaaaaaaaaaaaaaaaaaaaatccaacttcatacaaaatgtatgtttatttcctgaaatgtttgaccttaacctgttcaataaagcctgtgtccctcaaaatcagggtgcagtctgcagttttgagttgacaggtccctgtgaatgaggaagcagcacaaggagggctctacgagcgctgcta

SEQ ID NO: 203533 - DNA, 1134 bp, Homo sapiens
  Payload ID: 20134
  Gene Name: zinc finger protein 7
  ENST ID: ENST00000528130
  CDS Start-End: 47-451
ggtctctcggccagaacacgtggatgcccacccaccactgagcctcatggaggtggtaacatttggcgatgtggctgtgcacttctctcgggaggagtggcagtgtctggaccctggccagagggccctctacagggaagtgatgctggagaaccacagcagtgtggctggactagcaggattcctggttttcaagcctgagctgatctctcggctggagcagggagaagagccatgggtcctcgacctgcagggagcagaggggacagaggcaccaaggacctccaagacagctgtggaggccggaaatctgaaaccggggggtcagcaagcagggccgtgcccccctgtgaaggctttagggaaggatcctgtcctgcctctccgggcagctggtggttttctggcagtccttgggttccttggcttgtggatgcgtccctcactctgatctccgactccttcacacggctgccttctccctgcgtgtctgtgttcatgtggccatctccttagaaggacaccagtcatggtgggttaggggccaccccagtgacctcatggtgactaattaatctgcaacgactgtgtttccaaacaaggtcacattctgaggtgcttcaagttaggacttcagcctatcttggggtcctcagccctaaccagggcacccactgcctccggcatcagctcctgctgggcaggcgcccggcctggtgctctgctcccctgcttagccggtgtgctgcccagcatgacaagggagatgggtctgcgtgcatctcagctgcagaaaggaagcccctcacctccctttcagttgctgctgggtcatcaccgtcactcctgcagcagggcaggaccaggtcctacagaggccaccggcttgtaggggcctcgggaagcaagttggacagtccaaagttgtgaaaagtaggggccgtggagccgggcatggtggctcacgccggccattctagcgatttgggaggccgaggtgggcggatcacgaggtcaggagatcgagaccatcctggccaacacggtgaaaccctgtgtctactaaaaatacaaaaaattaaccaggcgtggtggcaggcgcctgtagtcccagctactcgggaggccgaggca

SEQ ID NO: 203534 - DNA, 516 bp, Homo sapiens
  Payload ID: 20134
  Gene Name: zinc finger protein 7
  ENST ID: ENST00000533314
  CDS Start-End: 77-516
gtttgcgagcctcgggtggtcctcagggagggtctctcggccagaacacgtggatgcccacccaccactgagcctcatggaggtggtaacatttggcgatgtggctgtgcacttctctcgggaggagtggcagtgtctggaccctggccagagggccctctacagggaagtgatgctggagaaccacagcagtgtggctggactagcttttagtgaccccactctctggtttggttatctgtgtccatgctttccacgtgatggcaacctgtgggcctggccatctagaggtgctgcagcttttccaggattcctggttttcaagcctgagctgatctctcggctggagcagggagaagagccatgggtcctcgacctgcagggagcagaggggacagaggcaccaaggacctccaagacagattctacgattaggactgaaaatgagcaggcctgtgaggacatggacatcctaaaatcagaatcctatgggacagtggtcagaatctccccaca

SEQ ID NO: 203535 - DNA, 545 bp, Homo sapiens
  Payload ID: 20134
  Gene Name: zinc finger protein 7
  ENST ID: ENST00000527218
  CDS Start-End: 77-545
gtttgcgagcctcgggtggtcctcagggagggtctctcggccagaacacgtggatgcccacccaccactgagcctcatggaggtggtaacatttggcgatgtggctgtgcacttctctcgggaggagtggcagtgtctggaccctggccagagggccctctacagggaagtgatgctggagaaccacagcagtgtggctggactaggattcctggttttcaagcctgagctgatctctcggctggagcagggagaagagccatgggtcctcgacctgcagggagcagaggggacagaggcaccaaggacctccaagacagattctacgattaggactgaaaatgagcaggcctgtgaggacatggacatcctaaaatcagaatcctatgggacagtggtcagaatctccccacaggactttcctcagaatcctggctttggagacgtttctgattctgaggtctggttagacagtcatctgggcagtcccgggctgaaagtgacaggctttaccttccaaaataactgtttgaatgaggagactg

SEQ ID NO: 203536 - DNA, 1874 bp, Homo sapiens
  Payload ID: 20134
  Gene Name: zinc finger protein 7
  Uniprot ID: P17097
  ENST ID: ENST00000525266
  CDS Start-End: 97-543
cgtttccggcggcgtcgcgcgtttgcgagcctcgggtggtcctcagggagggtctctcggccagaacacgtggatgcccacccaccactgagcctcatggaggtggtaacatttggcgatgtggctgtgcacttctctcgggaggagtggcagtgtctggaccctggccagagggccctctacagggaagtgatgctggagaaccacagcagtgtggctggactagcaggattcctggttttcaagcctgagctgatctctcggctggagcagggagaagagccatgggtcctcgacctgcagggagcagaggggacagaggcaccaaggacctccaagacaggctttctgggccgcccaaccatgggacaagagccaaggcacccacatgcaccgcctgcaactcctgttcctggccttccaaaacactgctcacaaagactgaccctgcctcctcctgggctctcgtcatctcctcttggccacttcctggttcatgatcaggacagaaggaggggaacgtcagccatatggatggtctgaaaattccagattctgtgctaaccataatgctgtgttcttttcactaacagcaaccagccaaaaaggggctggggtgcaagcttcattctgcttcagcacctggattctctctggattgacatggtcctaagtcaggggctggcaaaccattcgtagctttttacatttctgaatggttggggagaaaataagagacttgtgacatttgaaaactatgttaaaatcgaatttgactgtgcacagtgtccctgggcttggtgatgcccaagcgtcttcatggagcctctggcggctttcttgctgcagcagtgtttaccacaccagccaagtcaccttgaacttggaaaatgacttcatgccctccagccactgaaggattatttttcctctcagcccttagtggtttctttacctaaatgtcacggtacaactgagaataaggcagctgggtcagttcaatagaagtaaacctaaagtccaacaatccaggttagatattagccacggagggatgggaggaggagtcttctttttttttgagacggaatctcgctctgtccctcaggctgaagtgcagtggtgcggtctcggctcactgcaagctccgccacctgggttcacgccattctcctgcctcagcctcccgagtagctgggactacaggtgcctgctaccacgcccggctaatttttttgtatttttaatagagacggggtttcactgtgttagccagctggtctcgatcttctgacctcgtgatccgcccgcctcggcctccctaagtgctgggatgacaggcgtgagccaccatgccgagctgaggaggagtcctcttctagctgcacgatgtggaaatgacacatcatgtccatggggcagcttgctgagagccaagggtgtgagcacatgacttaaattcaagctactgcacagctttgagatctgagtatcacatggaagcatccaggtggcccctggcacacaggctggtggttcttttgtggagagggagaggaagaggggctgctcatggggtagtgcaggtgctagaatatcctgttaacctgttcacactgcactgcaattcgggcttcggtaagctcatctaaagagtttccaggccaggcacggtggctcacgcctgtaattccagcactttgagaggccaaggaaggatcacgtgaccccaggagttcggagaccacagtgagctgtgatcgcaccactgcactctagcctgggtgacagagtgaggccctgtctccacaatatataaataaaaacattttgggtttctgttttggagacaataaattaaatctataacctag

SEQ ID NO: 203537 - DNA, 513 bp, Homo sapiens
  Payload ID: 20134
  Gene Name: zinc finger protein 7
  ENST ID: ENST00000529819
  CDS Start-End: 122-382
tttgcgagcctcgggtggtcctcagggagggcctaggataagtgacagtggaggaaggaacggtgccttgggtggggtctctcggccagaacacgtggatgcccacccaccactgagcctcatggaggtggtaacatttggcgatgtggctgtgcacttctctcgggaggagtggcagtgtctggaccctggccagagggccctctacagggaagtgatgctggagaaccacagcagtgtggctggactaggattcctggttttcaagcctgagctgatctctcggctggagcagggagaagagccatgggtcctcgacctgcagggagcagaggggacagaggcaccaaggacctccaagacaggggaaacatacaaataactgccatggagagaagccgtacgaatgtgcagagtgtgggaaagtcttcaggctctgctcgcagcttaatcagcatcagagaatccacacgggagagaaaccctttaaatgcactgagtgtggaaaagcct

SEQ ID NO: 203538 - DNA, 2125 bp, Homo sapiens
  Payload ID: 20134
  Gene Name: zinc finger protein 7
  ENST ID: ENST00000544249
  CDS Start-End: 299-2071
cggaagtttgcggggcggggcggacgcgggtggccaaggcccgtttccggcggcgtcgcgcgtttgcgagcctcgggtggtcctcagggagggtctctcggccagaacacgtggatgcccacccaccactgagcctcatgcaggattcctggttttcaagcctgagctgatctctcggctggagcagggagaagagccatgggtcctcgacctgcagggagcagaggggacagaggcaccaaggacctccaagacagattctacgattaggactgaaaatgagcaggcctgtgaggacatggacatcctaaaatcagaatcctatgggacagtggtcagaatctccccacaggactttcctcagaatcctggctttggagacgtttctgattctgaggtctggttagacagtcatctgggcagtcccgggctgaaagtgacaggctttaccttccaaaataactgtttgaatgaggagactgtggttcccaagaccttcaccaaggacgcaccccagggatgtaaggagctgggaagcagcggcctggattgtcagcctcttgaaagtcagggagagagtgcggaagggatgtcccagagatgcgaggagtgtggcaaaggcatcagagccacttcagatatcgctctgcattgggaaattaatacacagaaaattagcagatgtcaagaatgccaaaaaaagttatctgactgcttgcaggggaaacatacaaataactgccatggagagaagccgtacgaatgtgcagagtgtgggaaagtcttcaggctctgctcgcagcttaatcagcatcagagaatccacacgggagagaaaccctttaaatgcactgagtgtggaaaagccttccgcctgagctcaaaacttattcagcatcaaagaatccacactggggagaagccctacagatgtgaggaatgtggaaaagcttttggtcagagctcaagcctcatccaccatcagagaatccacacaggagagaggccctatggttgtcgtgagtgtgggaaagccttcagccagcagtcgcagctggttagacaccagagaactcacactggggagaggccctacccttgcaaggagtgtgggaaggccttcagccagagctccaccctagcccagcatcaaaggatgcatactggggagaaagctcaaattctaaaagcctcagacagtccaagccttgttgcacatcagagaattcacgctgtagagaaaccatttaagtgtgatgagtgtgggaaagcttttaggtggatctctcgcctgagtcagcatcagctgattcacactggagagaagccttataaatgcaacaagtgtacaaaagcctttggttgtagttcacggcttattcgccatcagagaactcacactggagaaaaaccatttaaatgtgatgagtgtggcaaaggctttgttcagggctcacaccttattcagcatcagcgaatccacactggagagaaaccctatgtgtgtaatgactgtggaaaagccttcagtcagagttccagccttatttaccatcagagaatccataaaggagagaagccctacgaatgcctccaatgcggaaaagccttcagtatgagcacacagcttacaatacatcaaagggttcacactggagagaggccctataaatgtaatgaatgtgggaaagccttcagtcaaaactcaacccttttccaacaccagataattcatgcaggggtgaagccctatgagtgcagtgagtgtggaaaagccttcagccggagctcatatcttattgaacaccagagaatacacactagggcccagtggttttacgaatatgggaatgccctggaagggtccacctttgtgagccgtaaaaaggttaatactataaagaaactgcatcagtgtgaagactgtgagaagatatttaggtggcgttcacacctaattatacaccagagaattcacaccggggagaagccttataaatgcaatgactgtggcaaagcttttaatcgtagctcaaggcttacccagcatcaaaaaattcacatgggatagaccacttacatataaatgtgtatatatgtgaataaacctatagccttaacttac

SEQ ID NO: 203539 - DNA, 6924 bp, Homo sapiens
  Payload ID: 20135
  Gene Name: zinc finger protein 70
  Uniprot ID: Q9UC06
  ENST ID: ENST00000341976
  CDS Start-End: 462-1802
gccaggcagcgtcggccgcgtcggccgcgggttggagcagctcaggtgcggccccgccccgcccgcctgcggccccgccccggcccaggtgagctgccccgccccggcccaggtgagtggccccgcgtccgccggtgtgacctgagtccgcctgaccacctgtccctccggtggccctgggtgtgcgtgtccccaatcgcggggaagcctgtaggggcgccacgtcgccgcctgggcagcgtgtgcgggtccgtggcaactcttgggcccccagccaggaaaccttgactgcactaagagtttgcagggtgcccaggccctagggactctctggaggatgggatgacagatgcaggaggacccggagaaggccccgacagagattgtgagaacagtaagtgtggcccaaagaagaacatttttaaagaaatacaaccattggggatgatagcagattcacaatggaggttcccccagcaacaaagtttggtgagacctttgcatttgagaacaggttagagtcacaacaagggcttttcccaggggaggacctgggggacccttttcttcaggaaagaggtttggagcaaatggctgtgatctacaaggagatccctcttggtgagcaggacgaagaaaatgatgattacgaggggaatttcagtttgtgctcaagccctgttcagcatcaaagtatccccccaggaaccagaccccaggatgatgagctcttcggacaaaccttcctccagaaatccgacctcagcatgtgtcagataatccacagtgaagagcccagtccatgcgattgtgcagaaacagacagaggggactcaggacctaacgcacctcacagaaccccacaaccagccaagccctatgcgtgtcgagagtgtgggaaggccttcagccagagctcgcacctgctccgacacctggtgatccacactggggagaagccctatgagtgctgtgagtgcgggaaggccttcagccagagctcccacctgctcaggcaccagatcatccacaccggggagaagccctacgagtgccgggagtgtgggaaggccttccgccagagctcagccctcacgcaacaccaaaagatccacaccggaaagaggccctacgagtgcagggaatgcgggaaagatttcagccggagctccagcctcagaaaacacgagagaattcatacaggagagagaccttatcagtgtaaggaatgtgggaaatccttcaaccagagctcaggcctgagccagcatcggaagatccacaccctaaagaaacctcacgagtgcgatctctgtgggaaagccttttgtcacaggtcacacctcatccgacaccagcggatccacactgggaagaaaccatacaaatgcgatgagtgcgggaaggccttcagccagagctccaacctcattgagcaccgcaagacccacactggcgagaagccctacaaatgccagaagtgtgggaaagccttcagccagagctcctccctcattgagcaccagcgcatccacaccggtgagaagccctacgagtgctgtcagtgtggcaaggccttttgccacagctctgcgctgatccagcaccagagaatccacaccggcaagaagccctacacctgcgagtgtggcaaagccttccggcaccggtcagccctcattgagcactataaaacccacaccagagagaagccctacgtgtgcaatctgtgcggcaagtccttccgggggagctcgcacctgattcgccatcagaagattcattctggggagaagctatagaaagaggagcccacacaaagcttgaaagcctgtgccagatggagcctttattccacgtcgcgtggtctccaagaccccacctacctccctgatgctgaatggaaaccttcccacctaagcgctcttgaacatcccactagcaggaaggccctgtgtggccctgggccaagcacgccagctctcagcaggttttctgcatggaagggaaggtggggtgatagggagggcagccagaaaagacagctggccttcagtttctccttcttgcatttgactcccaagcctacaggatttcattttgccctgtcttcacatttcccagaatctagaagaataaatgccaagagggagaaagttgaattaaacccaggaaaatatcagaagaactctttaaaacaggctgcagtctggcacttttagaagacagaaaccacactcacagtccaaagcagtagaagaaaaatgaattcaaaagtagatgtgtcagcagcaaagtagaattttctcactgcgttgggcattggtggggacaaccaaaacaggtctgcagagcaaaggcaggtctggagggtgggtcttgagattggggatgagggtggtgagcccctgggcgtggcctcttaaccctctccttagccctagggcagtttccctcagacagctctgttacaggaggatagagatttgatcctgttggccagaggatgtttgacacccagccgtgactcagcctggacaccggacatgactgccctccaggaataacccctccctgagacatagtgtccccaagaccacagtgtgccttggacatcagcagggcctgggtctggtctgttctggcaatgatgcagccctcctgccccagtgtcaggggacctgggaagctgggtggcttgttggaggaggctgtgttctaatcagaaggtctgggttcaagtcctagttccaccccctcctacctgggtgagcttgaacaagtcctgtaacttccccaggctccattcccccatccaagagttggggtaatgggaactggccacgtgcctctaagggttggtgccaggctgtcattcagaacacagccactgtgaaagtgctttggcaactgtgagcagtcatggtgactgaggacagagacccagagtgacccctgccccacccctgtgcatttccacggactggagagatgttcccgtctggtttctgagcagtgggacctctcattgaacagggctttctctccctccaccccttgcagcctgggctgtgtatgcctgcggatgcagtgtcccacacaaggacacttcctctaggatgccatcctgagcctcctgtagcagcagtgtcattctgcacttccacattctgtctgtcttccccgcctgccaactaggagttcacgtggggcttgtttaaacagtaccattgcttgtgtcccacctggaccagttcagtcagccccagtggtggcatgttttaaagctccccaggtgattataacttcctagtgtgcagccaggctgtgggccctgtgctgggcttttttttttgagatggagtgttgccctgttgccaggctggaatgcagtggcgtgatcttggcttactgcaagctctgcctcctgggttcaagcgattcccctgcttcagcctcctgagtagctgggactacaggtgcgtgccaccatgcctggctaattttttgtatttttagtacagacggggtttcaccatgttggccaggatggtctcgatctcttgacctcgtgatctgcccgccttgacctcccaaagtgccgggattacaggcatgagcctccacacctggcccatgctgggtttttgtgcatccctcgacagcttccaatgtcagcctgctggctttggctgagcagagcttgaaggccattctgtctcagtgccctcactccctgctccccgcacccggagcctcagggatgggctcaggctgatggtcagctgggcgcttggaaagtgtttggctggggccttggggatctctttagtcctggcttcccttgggctcctcagagctagtggggaaggaggcagtctaggctgttttgaagtttcctaaacatttatggctgggctaacatgaactcatcatggtaacactgggtatttcagctgatcagaagctcagcatggccattatgcctagttttgatgaataaacatgggaaagccataactgttactaagtgggtcttgataggccagagatttccaaatgacagatatgatgggctggagaggtcatggtgggagttccagccatgcctctgtccagcccctgtctttgctacgtatgtgaaacatttaacatttaaccagcactccattgtccaccagaaccctctgtgtaaccagttggactgactggatggtgccctgggcattgcctgcaagtggcctgtcatttcaggcctgtctctatcaagagtgaagagagaatgctaggatgcagtggggacagcaggcggcatcaagcaggggtccctgaaagatctacctcctctttacacctgcccctcttccccaccgttatcatctggcaaatgtctgttacctatctttggtttctccctccccatccttcctgcacaccccagccaaattgatttttaaagcatcattttgcacaagtcaccactctccttaaaaccaactttcaggagctttcctgcacgtaaaccctcgtttcagccaacctggtttacccactctgagcaagccgcatggagatcaggccgcccctgcccactccagcatcactcccagctcataattctgtgctgttcttgcattttgaaatgtgcactttctcctcctctccctccctctctctttctaatttttgtgtaacgtggagatgaagatcccccctctctcccaagggttaacagataaacatggtaagaccaggttcttttttggaagtatgaccagagcctcattccctctgttcaaattctttccttgttttattagtttttttttttttttttttttttttgagacagagtctcactgtcacccaggctggagtgcagtggtgcgatcttggcttgctgcaacctctgcctcccgggttcaagtgattctcctgcctcagcctcctgagtagctgggattacaggcatgtgccaccacgcctggctaacttttgtatttttagtagagatggggtttcaccatgttggccaggctggtctcgaactcctgacctcctgatctgcctgccttggcctcctgaagtgttgggattacaggcgtgagccatgtgcccagccagcttattagatttttttttttaaactctctcattctatttagattctcaaacagtgtaaagttataaaagatcatccctggcaatattttaatcaattatcttttaatttagttgttctttgtttttgttgtcctacctttttttttcttttttcttttttctttttttgagatggagtcttgctttgtcacccaggctgtagtgcagtggggcgatctcggcttactgcaagctctacctcccaggttcagaccattctcctgcctcagcctcccaagtagctgggactacaggcacccgccaccacgcccggctaattttttgtatttttaatagagacggggtttcaccgtgttagccaagatggtatctatctcctgagctcgtgatccgcccgcctcggcctcccaaagtgctgggattacaggtgtgagccaccgcgctcggcatttttttatttcttcttctccttagagtgacagctttgtctgcactccgtaagttttgacgtggtgttttttgttatagtattaagaatttccttttgcccaaatgttattatttaaaaatatttctaagtgggccgggcatggtgactcacacctgtaatcccagcactttggaaggccgaggtgggtggatcacgaggtcaggagtttaagaccagcctggccaacatggtgaaaacccgtctctactaaaaatacaaaaattaactgggcatggtggcgggtgcctgtaatcccagctacacgggaggctgaggcaggagaatcgcttgaacccgggaggcggaggttgcagtgagccaagattgtgccactacccttcagcctgggtgacagggcaagactccatctcggggaaaacaacaacaacaaaaacaaaaaatagccgggagcggtggctcaagcctgtaatcccagcactttgggaggccaagacgggcagatcatgaggtcaggagatcgaaaccatcctggctaacacgatgaaaccctgtctctattaaaaatacaaaaaattagccgtgcgtggtggctacaggcagctgtgcgcctgtagtcccagctacttgggaggctgaggcaggagaatggtgtgaacccgggaggcagagcttgcagtgagccgaggtggtgccactgcactccagcctgggcaaaagagctagactctgtctcaaaaaaaatatatataaaaaaaatttctaagtgatgaatgcttagggtattgctgcttatttcttactgtactgtggtgtcaacatttctaagtgtccataggacttctttgggcctgaatatattatcagtttttataaaagcatttgtgtaatctcaaaatgtgtttttattctaccagttctatttgttaactcaattttttcattattttattcaaatccatattttctctgactttcatttactttagagttcttaatctgggggtccatggcctgcctaggagtctttagcatgtaggggtttaggagttgcagacccctagggatcgaacaaagctgggtatgtgcttgaaggaattttgctgggacaaggatctgtagtatttactatatttttaaatgcctctgtgacaccaaagcagttcagaacactcatttacctgatctaatcatagtttgatgtttgtgtgttatatctctatgtattcctgtttcacttttaatttctgtatgtgtattgtcgctatgttgtgcagtttttctcaagtcatttttgagaaataggcagggtatgaattatcaataaataagtatcatgtttggggcatata

SEQ ID NO: 203540 - DNA, 2882 bp, Homo sapiens
  Payload ID: 20136
  Gene Name: zinc finger protein 700
  Uniprot ID: Q9H0M5
  ENST ID: ENST00000254321
  CDS Start-End: 144-2372
actgcccacagttcatccggaaatggagggggtcgctttcctcaccttcctcgctgcgcgggcggcggttggtaaccggtcagaccagcccgagagggacctggtgcctgtacccaggcttctgtcgctctgtcgcctgcgctatgccctgctgtagtcacaggagctgtagagaggaccccggtacatctgaaagccgggaaatggacccagtggcctttgaggatgtggctgtgaacttcacccaggaagagtggacattgctggatatttcccagaagaatctcttcagggaagtgatgctggaaactttcaggaacctgacctctataggaaaaaaatggagtgaccagaacattgaatatgagtaccaaaaccccagaagaagcttcaggagtctcatagaagagaaagtcaatgaaattaaagaagacagtcattgtggagaaacttttacccaggttccagatgacagactgaacttccaggagaagaaagcttctcctgaagtaaaatcatgtgacagctttgtgtgtgcagaagttggcataggtaactcatcttttaatatgagcatcagaggtgacactggacacaaggcatatgagtatcaggaatatggaccaaagccatataagtgtcaacaacctaaaaataagaaagccttcaggtatcgcccatccattagaacacaagaaagggatcacactggagagaaaccctatgcttgtaaagtctgtggaaaaacctttattttccattcaagcattcgaagacacatggtaatgcacagtggggatggaacttataaatgtaaattttgtgggaaagccttccattctttcagtttatatcttatccatgaaagaactcacactggagagaaaccatatgaatgtaaacaatgtggtaaatcctttacttattctgctacccttcaaatacatgaaagaactcacactggggagaagccctatgaatgtagcaaatgtgataaagcatttcatagttctagttcctatcatagacatgaaagaagtcacatgggagagaagccttatcaatgcaaagaatgtggaaaagcatttgcatataccagttctcttcgtagacatgaaaggacccactctgggaaaaaaccgtatgaatgtaagcaatatggggaaggcttatcctatcttataagttttcaaacacacataagaatgaactctggagaaagaccttataaatgtaagatatgtgggaaaggcttttattctgccaagtcatttcaaacacatgaaaaaactcacactggagagaaacgctataaatgcaagcaatgtggtaaagccttcaatctttccagttcctttcgatatcatgaaaggattcacactggagagaaaccctatgagtgtaagcagtgtgggaaagccttcagatctgcctcacagcttcgagtgcacggtgggactcacactggagagaaaccctatgaatgtaaggaatgtgggaaagccttcagatctacctcacaccttcgagtgcatggtaggactcatactggagagaaaccctatgaatgtaaggaatgtgggaaagccttcagatatgtgaagcaccttcaaattcatgaaaggacagaaaaacacataagaatgccctctggagaaagaccttataaatgtagtatatgtgagaaaggcttttattctgccaagtcatttcaaacacatgaaaaaactcacactggagagaaaccctatgaatgcaaccaatgtggtaaagccttcagatgttgcaattcccttcgatatcatgaaaggactcacactggagagaaaccctatgagtgtaagcaatgtgggaaagccttcagatctgcctcacaccttcgaatgcatgaaaggactcacactggagagaaaccctatgagtgtaagcaatgtgggaaagccttcagttgtgcctcaaaccttcgaaagcatggtaggactcacactggagagaaaccctatgagtgtaagcaatgtgggaaagccttcagatctgcctcaaaccttcagatgcatgaaaggactcacactggagagaaaccctatgaatgtaaggaatgcgaaaaagcattctgtaaattctcttcttttcaaatacatgaaaggaagcacagaggagagaagccctatgaatgtaagcattgtgggaatggattcacatctgccaagattcttcaaatacatgcaagaacacacattggagagaaacactatgaatgtaaggaatgcggaaaagcattcaattatttttcttccttgcatatacacgcaaggactcatatgggagagaagccatatgaatgtaaggattgtgggaaagcattcagctagcctggttccttttatggacatgaatagactcacactggaaggaagcactatgaatgcaagcaatgtggcaaaactttcacattttccagttcttttcgatatcatgaaaggactcacactggggagaaaccctatcaatgtaagcagtgtgggaaagccttcattccttttacttcttttcaatgtcatgaaaggactcacacgggagagaaaccctatgagtgtattctagttccgtttgatatcatgaaaggacttacactggagtgaaaccctatgaatgtaagcaatgtgggaaagccttcagatgtgcctcgcaccttcaacggcatggaagggttcacacttgggagaaactctatgaatgtaagcagtatgggaaagccttcagatctgccaagattctttgaatacagataattaatgtaaacaattatcataagtatactaacatgttattctttttaaataagaaggtataataaaatatcccattggttttatgtatta

SEQ ID NO: 203541 - DNA, 3113 bp, Homo sapiens
  Payload ID: 20136
  Gene Name: zinc finger protein 700
  ENST ID: ENST00000482090
  CDS Start-End: 419-2593
taacatagttcctagtggggtgggcttactttgtgtctgacccatttttctttcgagacaagacaacactcacactacaagagggaaagggtaaaggtcactcacgcgtggtggtacatgcctataatcccagctactcgggaggctgaggcaggagaatcgcttgaaccccggtggtgagccaatatcacgccattgtactccagcctgggcaacaagagtgaaactctgtctcaaaaaataaataaataaataaattgctttatggaagaaagtaagtatagatggagagaaagggatctgataaccgaagcagggaataaatgtttggagtccacagcatcctgagaacttcttgggaatagagtctaggcctccagtgctgtcactctcacccatcttcctctacacatgtgagatgtttcaggacccagtggcctttgaggatgtggctgtgaacttcacccaggaagagtggacattgctggatatttcccagaagaatctcttcagggaagtgatgctggaaactttcaggaacctgacctctataggaaaaaaatggagtgaccagaacattgaatatgagtaccaaaaccccagaagaagcttcaggagtctcatagaagagaaagtcaatgaaattaaagaagacagtcattgtggagaaacttttacccaggttccagatgacagactgaacttccaggagaagaaagcttctcctgaagtaaaatcatgtgacagctttgtgtgtgcagaagttggcataggtaactcatcttttaatatgagcatcagaggtgacactggacacaaggcatatgagtatcaggaatatggaccaaagccatataagtgtcaacaacctaaaaataagaaagccttcaggtatcgcccatccattagaacacaagaaagggatcacactggagagaaaccctatgcttgtaaagtctgtggaaaaacctttattttccattcaagcattcgaagacacatggtaatgcacagtggggatggaacttataaatgtaaattttgtgggaaagccttccattctttcagtttatatcttatccatgaaagaactcacactggagagaaaccatatgaatgtaaacaatgtggtaaatcctttacttattctgctacccttcaaatacatgaaagaactcacactggggagaagccctatgaatgtagcaaatgtgataaagcatttcatagttctagttcctatcatagacatgaaagaagtcacatgggagagaagccttatcaatgcaaagaatgtggaaaagcatttgcatataccagttctcttcgtagacatgaaaggacccactctgggaaaaaaccgtatgaatgtaagcaatatggggaaggcttatcctatcttataagttttcaaacacacataagaatgaactctggagaaagaccttataaatgtaagatatgtgggaaaggcttttattctgccaagtcatttcaaacacatgaaaaaactcacactggagagaaacgctataaatgcaagcaatgtggtaaagccttcaatctttccagttcctttcgatatcatgaaaggattcacactggagagaaaccctatgagtgtaagcagtgtgggaaagccttcagatctgcctcacagcttcgagtgcacggtgggactcacactggagagaaaccctatgaatgtaaggaatgtgggaaagccttcagatctacctcacaccttcgagtgcatggtaggactcatactggagagaaaccctatgaatgtaaggaatgtgggaaagccttcagatatgtgaagcaccttcaaattcatgaaaggacagaaaaacacataagaatgccctctggagaaagaccttataaatgtagtatatgtgagaaaggcttttattctgccaagtcatttcaaacacatgaaaaaactcacactggagagaaaccctatgaatgcaaccaatgtggtaaagccttcagatgttgcaattcccttcgatatcatgaaaggactcacactggagagaaaccctatgagtgtaagcaatgtgggaaagccttcagatctgcctcacaccttcgaatgcatgaaaggactcacactggagagaaaccctatgagtgtaagcaatgtgggaaagccttcagttgtgcctcaaaccttcgaaagcatggtaggactcacactggagagaaaccctatgagtgtaagcaatgtgggaaagccttcagatctgcctcaaaccttcagatgcatgaaaggactcacactggagagaaaccctatgaatgtaaggaatgcgaaaaagcattctgtaaattctcttcttttcaaatacatgaaaggaagcacagaggagagaagccctatgaatgtaagcattgtgggaatggattcacatctgccaagattcttcaaatacatgcaagaacacacattggagagaaacactatgaatgtaaggaatgcggaaaagcattcaattatttttcttccttgcatatacacgcaaggactcatatgggagagaagccatatgaatgtaaggattgtgggaaagcattcagctagcctggttccttttatggacatgaatagactcacactggaaggaagcactatgaatgcaagcaatgtggcaaaactttcacattttccagttcttttcgatatcatgaaaggactcacactggggagaaaccctatcaatgtaagcagtgtgggaaagccttcattccttttacttcttttcaatgtcatgaaaggactcacacgggagagaaaccctatgagtgtattctagttccgtttgatatcatgaaaggacttacactggagtgaaaccctatgaatgtaagcaatgtgggaaagccttcagatgtgcctcgcaccttcaacggcatggaagggttcacacttgggagaaactctatgaatgtaagcagtatgggaaagccttcagatctgccaagattctttgaatacagataattaatgtaaacaattatcataagtatactaacatgttattctttttaaataagaaggtataataaaatatcccattggttttatgtattagatcaagctt

SEQ ID NO: 203542 - DNA, 2901 bp, Homo sapiens
  Payload ID: 20136
  Gene Name: zinc finger protein 700
  ENST ID: ENST00000622593
  CDS Start-End: 144-2381
actgcccacagttcatccggaaatggagggggtcgctttcctcaccttcctcgctgcgcgggcggcggttggtaaccggtcagaccagcccgagagggacctggtgcctgtacccaggcttctgtcgctctgtcgcctgcgctatgccctgctgtagtcacaggagctgtagagaggaccccggtacatctgaaagccgggaaatgatgtttcaggacccagtggcctttgaggatgtggctgtgaacttcacccaggaagagtggacattgctggatatttcccagaagaatctcttcagggaagtgatgctggaaactttcaggaacctgacctctataggaaaaaaatggagtgaccagaacattgaatatgagtaccaaaaccccagaagaagcttcaggagtctcatagaagagaaagtcaatgaaattaaagaagacagtcattgtggagaaacttttacccaggttccagatgacagactgaacttccaggagaagaaagcttctcctgaagtaaaatcatgtgacagctttgtgtgtgcagaagttggcataggtaactcatcttttaatatgagcatcagaggtgacactggacacaaggcatatgagtatcaggaatatggaccaaagccatataagtgtcaacaacctaaaaataagaaagccttcaggtatcgcccatccattagaacacaagaaagggatcacactggagagaaaccctatgcttgtaaagtctgtggaaaaacctttattttccattcaagcattcgaagacacatggtaatgcacagtggggatggaacttataaatgtaaattttgtgggaaagccttccattctttcagtttatatcttatccatgaaagaactcacactggagagaaaccatatgaatgtaaacaatgtggtaaatcctttacttattctgctacccttcaaatacatgaaagaactcacactggggagaagccctatgaatgtagcaaatgtgataaagcatttcatagttctagttcctatcatagacatgaaagaagtcacatgggagagaagccttatcaatgcaaagaatgtggaaaagcatttgcatataccagttctcttcgtagacatgaaaggacccactctgggaaaaaaccgtatgaatgtaagcaatatggggaaggcttatcctatcttataagttttcaaacacacataagaatgaactctggagaaagaccttataaatgtaagatatgtgggaaaggcttttattctgccaagtcatttcaaacacatgaaaaaactcacactggagagaaacgctataaatgcaagcaatgtggtaaagccttcaatctttccagttcctttcgatatcatgaaaggattcacactggagagaaaccctatgagtgtaagcagtgtgggaaagccttcagatctgcctcacagcttcgagtgcacggtgggactcacactggagagaaaccctatgaatgtaaggaatgtgggaaagccttcagatctacctcacaccttcgagtgcatggtaggactcatactggagagaaaccctatgaatgtaaggaatgtgggaaagccttcagatatgtgaagcaccttcaaattcatgaaaggacagaaaaacacataagaatgccctctggagaaagaccttataaatgtagtatatgtgagaaaggcttttattctgccaagtcatttcaaacacatgaaaaaactcacactggagagaaaccctatgaatgcaaccaatgtggtaaagccttcagatgttgcaattcccttcgatatcatgaaaggactcacactggagagaaaccctatgagtgtaagcaatgtgggaaagccttcagatctgcctcacaccttcgaatgcatgaaaggactcacactggagagaaaccctatgagtgtaagcaatgtgggaaagccttcagttgtgcctcaaaccttcgaaagcatggtaggactcacactggagagaaaccctatgagtgtaagcaatgtgggaaagccttcagatctgcctcaaaccttcagatgcatgaaaggactcacactggagagaaaccctatgaatgtaaggaatgcgaaaaagcattctgtaaattctcttcttttcaaatacatgaaaggaagcacagaggagagaagccctatgaatgtaagcattgtgggaatggattcacatctgccaagattcttcaaatacatgcaagaacacacattggagagaaacactatgaatgtaaggaatgcggaaaagcattcaattatttttcttccttgcatatacacgcaaggactcatatgggagagaagccatatgaatgtaaggattgtgggaaagcattcagctagcctggttccttttatggacatgaatagactcacactggaaggaagcactatgaatgcaagcaatgtggcaaaactttcacattttccagttcttttcgatatcatgaaaggactcacactggggagaaaccctatcaatgtaagcagtgtgggaaagccttcattccttttacttcttttcaatgtcatgaaaggactcacacgggagagaaaccctatgagtgtattctagttccgtttgatatcatgaaaggacttacactggagtgaaaccctatgaatgtaagcaatgtgggaaagccttcagatgtgcctcgcaccttcaacggcatggaagggttcacacttgggagaaactctatgaatgtaagcagtatgggaaagccttcagatctgccaagattctttgaatacagataattaatgtaaacaattatcataagtatactaacatgttattctttttaaataagaaggtataataaaatatcccattggttttatgtattagatcaagctt

SEQ ID NO: 203543 - DNA, 2610 bp, Homo sapiens
  Payload ID: 20137
  Gene Name: zinc finger protein 701
  Uniprot ID: Q9NV72
  ENST ID: ENST00000301093
  CDS Start-End: 36-1631
atcccgtggagtgaaggtcgcaccgcggcgtagagatggggtttctccatgttggtcaggatggtctcgaactcccgacatcaggtgatccgcctgcctcggcctcccaaagtgctgggattacaggtgtgagccaccgcactcagcctccctgttttgaaggattgacttctaaagacttggtacgtgaggaaaaaacacggaagaggaagaggaaagcaaaggagtcagggatggctcttcttcagggtctactgacattcagggatgtggccatagaattctctcaggaggagtggaaatgcctggaccctgctcagaggactctatacagagacgtgatgctggagaattataggaacctggtctccctggatacctcttccaaatgcatgatgaagatgttctcatcaacaggacaaggcaatacagaagtggtccacacagggacattgcaaatacatgcaagtcatcacattggagatacttgcttccaggaaattgagaaagatattcatgactttgtgtttcagtggcaagaaaatgaaacaaatggccatgaagcactcatgacaaaaaccaaaaagttgatgagtagtacagagcgacatgatcaaaggcatgctggaaacaaacctattaaaaatgagcttggatcaagctttcattcgcatctgcctgaagtgcacatatttcaccccgaagggaaaattggtaatcaagttgagaaggctatcaacgatgctttctcagtttcagcatcccaacgaatttcctgtaggccaaaaactcgtatttctaataagtataggaataatttcctccagtcttcattactcacacaaaaacgggaagtacacacaagagaaaaatctttccaacgtaatgagagtggcaaagcctttaatggtagctcactcttaaaaaaacatcagataatccatttaggagacaaacagtataaatgtgatgtatgcggcaaggactttcatcagaagcgataccttgcatgccatagatgtcacactggtgagaatccttacacgtgtaatgagtgtggcaagacattcagtcacaattcagccctgttagttcacaaggcaattcatactggagagaaaccttacaagtgtaatgaatgtggcaaggtttttaatcaacaatcaaaccttgcacgtcatcatagagttcatactggagagaaaccttacaaatgtgaagaatgtgacaaagttttcagtcgcaaatcacaccttgaaagacataggagaattcacactggagagaaaccatacaaatgtaaggtttgtgacaaggctttcagacgtgattcacacctggcacaacatactgtaattcacactggagagaaaccttacaagtgtaatgagtgtggcaagacctttgttcaaaattcatctcttgtaatgcataaggtcattcatactggagagaaacgttacaagtgtaatgaatgtggcaaggtttttaatcacaaatcaaaccttgcatgtcatcgtagacttcatactggagagaaaccttacaagtgtaatgaatgtggcaaggtttttaatcgaaaatcaaaccttgaacgtcatcatagacttcatactggaaagaaatcttagaagtgtaaatttgcaaggtttttaggcaacagtcaaaccttgcatgtcatcatagactttatactggagagaaaccttacaaatgtgaagaatgtgacaaaagttttcaatttcaaatcactccttgaaatacataggagagttcatactggagagaaaccatacaaatgtaaggtttgtgacaaggatttcgggtgtgattcacacctggcccaacatactggaattcacactggaaaggaactgtacaagtgtaatgagtgtggcagagcctttggtggtcagtcaacacttactcaccatcaagcaatccatggtatagggaaacttgactaatgtaatgattgtcacaaagtcttcagtaatattacagccattgcaaaacattggagaatccataatgaaggaggtcttacaagtgtaataaatgtggcaagtttttcagacatcattcataacttgcagttcattggcgatcttatacaggagagaaatcttacaaatgtgatgattgtggcaaggtcttcagtcaagcttcatcttttgcaaaacgggagaattcatacaggagagaaacctcacaagtgtgatgattgtgagcaaagcctttacttcacgttcacaccacattagatatcagaggatccatactggacagaaatcttacaaacgtcctatgtgtggcaaggtcttcagtccgaggttactccttgcagaatatcataacgttcatttttgaggtaatagttacaaatgcggtgagcacagcaaaccatcaaggattgacagtagagtcaattcagaattgacttgagtttgagttgacttaaaacattcagttgaagcattaattgacattaaagtgtttatgttaagaggattgggccaggcgtgtggctcacgcctgtaaatccagcactttaggagcccaaggtggatagatcacttgaggtcatgagtttgagatcagcctggccaa

SEQ ID NO: 203544 - DNA, 2634 bp, Homo sapiens
  Payload ID: 20137
  Gene Name: zinc finger protein 701
  Uniprot ID: Q9NV72
  ENST ID: ENST00000391785
  CDS Start-End: 128-1525
acacatccgcgcagaccaggaagcggatcccgtggagtgaaggtcgcaccgcggcggattgacttctaaagacttggtacgtgaggaaaaaacacggaagaggaagaggaaagcaaaggagtcagggatggctcttcttcagggtctactgacattcagggatgtggccatagaattctctcaggaggagtggaaatgcctggaccctgctcagaggactctatacagagacgtgatgctggagaattataggaacctggtctccctggatacctcttccaaatgcatgatgaagatgttctcatcaacaggacaaggcaatacagaagtggtccacacagggacattgcaaatacatgcaagtcatcacattggagatacttgcttccaggaaattgagaaagatattcatgactttgtgtttcagtggcaagaaaatgaaacaaatggccatgaagcactcatgacaaaaaccaaaaagttgatgagtagtacagagcgacatgatcaaaggcatgctggaaacaaacctattaaaaatgagcttggatcaagctttcattcgcatctgcctgaagtgcacatatttcaccccgaagggaaaattggtaatcaagttgagaaggctatcaacgatgctttctcagtttcagcatcccaacgaatttcctgtaggccaaaaactcgtatttctaataagtataggaataatttcctccagtcttcattactcacacaaaaacgggaagtacacacaagagaaaaatctttccaacgtaatgagagtggcaaagcctttaatggtagctcactcttaaaaaaacatcagataatccatttaggagacaaacagtataaatgtgatgtatgcggcaaggactttcatcagaagcgataccttgcatgccatagatgtcacactggtgagaatccttacacgtgtaatgagtgtggcaagacattcagtcacaattcagccctgttagttcacaaggcaattcatactggagagaaaccttacaagtgtaatgaatgtggcaaggtttttaatcaacaatcaaaccttgcacgtcatcatagagttcatactggagagaaaccttacaaatgtgaagaatgtgacaaagttttcagtcgcaaatcacaccttgaaagacataggagaattcacactggagagaaaccatacaaatgtaaggtttgtgacaaggctttcagacgtgattcacacctggcacaacatactgtaattcacactggagagaaaccttacaagtgtaatgagtgtggcaagacctttgttcaaaattcatctcttgtaatgcataaggtcattcatactggagagaaacgttacaagtgtaatgaatgtggcaaggtttttaatcacaaatcaaaccttgcatgtcatcgtagacttcatactggagagaaaccttacaagtgtaatgaatgtggcaaggtttttaatcgaaaatcaaaccttgaacgtcatcatagacttcatactggaaagaaatcttagaagtgtaaatttgcaaggtttttaggcaacagtcaaaccttgcatgtcatcatagactttatactggagagaaaccttacaaatgtgaagaatgtgacaaaagttttcaatttcaaatcactccttgaaatacataggagagttcatactggagagaaaccatacaaatgtaaggtttgtgacaaggatttcgggtgtgattcacacctggcccaacatactggaattcacactggaaaggaactgtacaagtgtaatgagtgtggcagagcctttggtggtcagtcaacacttactcaccatcaagcaatccatggtatagggaaacttgactaatgtaatgattgtcacaaagtcttcagtaatattacagccattgcaaaacattggagaatccataatgaaggaggtcttacaagtgtaataaatgtggcaagtttttcagacatcattcataacttgcagttcattggcgatcttatacaggagagaaatcttacaaatgtgatgattgtggcaaggtcttcagtcaagcttcatcttttgcaaaacgggagaattcatacaggagagaaacctcacaagtgtgatgattgtgagcaaagcctttacttcacgttcacaccacattagatatcagaggatccatactggacagaaatcttacaaacgtcctatgtgtggcaaggtcttcagtccgaggttactccttgcagaatatcataacgttcatttttgaggtaatagttacaaatgcggtgagcacagcaaaccatcaaggattgacagtagagtcaattcagaattgacttgagtttgagttgacttaaaacattcagttgaagcattaattgacattaaagtgtttatgttaagaggattgggccaggcgtgtggctcacgcctgtaaatccagcactttaggagcccaaggtggatagatcacttgaggtcatgagtttgagatcagcctggccaacagacgtgagtcacttttcccagcctgctttttgtttctttaacaaaaaccaataggggtttttataggtattgtgttgaatctgaatcacattggcttatataataacaatattgatttttccaaacca

SEQ ID NO: 203545 - DNA, 5538 bp, Homo sapiens
  Payload ID: 20137
  Gene Name: zinc finger protein 701
  Uniprot ID: Q9NV72
  ENST ID: ENST00000540331
  CDS Start-End: 226-1821
gtctcaacctttaggcgcctgaagcgcaaacgtcgcgatcccagtctcagggaggccgagttctctgcctggtgctgggatcttgtggaccccaccgaaggcgtcgtcgcaccccacctcccgcctcatgctgggccttgctgcaccccaagtctccccttagcagtcaccactttccttgagccagcgttggggaggtgccaggggccagtcctgtgacacgagatggggtttctccatgttggtcaggatggtctcgaactcccgacatcaggtgatccgcctgcctcggcctcccaaagtgctgggattacaggtgtgagccaccgcactcagcctccctgttttgaaggattgacttctaaagacttggtacgtgaggaaaaaacacggaagaggaagaggaaagcaaaggagtcagggatggctcttcttcagggtctactgacattcagggatgtggccatagaattctctcaggaggagtggaaatgcctggaccctgctcagaggactctatacagagacgtgatgctggagaattataggaacctggtctccctggatacctcttccaaatgcatgatgaagatgttctcatcaacaggacaaggcaatacagaagtggtccacacagggacattgcaaatacatgcaagtcatcacattggagatacttgcttccaggaaattgagaaagatattcatgactttgtgtttcagtggcaagaaaatgaaacaaatggccatgaagcactcatgacaaaaaccaaaaagttgatgagtagtacagagcgacatgatcaaaggcatgctggaaacaaacctattaaaaatgagcttggatcaagctttcattcgcatctgcctgaagtgcacatatttcaccccgaagggaaaattggtaatcaagttgagaaggctatcaacgatgctttctcagtttcagcatcccaacgaatttcctgtaggccaaaaactcgtatttctaataagtataggaataatttcctccagtcttcattactcacacaaaaacgggaagtacacacaagagaaaaatctttccaacgtaatgagagtggcaaagcctttaatggtagctcactcttaaaaaaacatcagataatccatttaggagacaaacagtataaatgtgatgtatgcggcaaggactttcatcagaagcgataccttgcatgccatagatgtcacactggtgagaatccttacacgtgtaatgagtgtggcaagacattcagtcacaattcagccctgttagttcacaaggcaattcatactggagagaaaccttacaagtgtaatgaatgtggcaaggtttttaatcaacaatcaaaccttgcacgtcatcatagagttcatactggagagaaaccttacaaatgtgaagaatgtgacaaagttttcagtcgcaaatcacaccttgaaagacataggagaattcacactggagagaaaccatacaaatgtaaggtttgtgacaaggctttcagacgtgattcacacctggcacaacatactgtaattcacactggagagaaaccttacaagtgtaatgagtgtggcaagacctttgttcaaaattcatctcttgtaatgcataaggtcattcatactggagagaaacgttacaagtgtaatgaatgtggcaaggtttttaatcacaaatcaaaccttgcatgtcatcgtagacttcatactggagagaaaccttacaagtgtaatgaatgtggcaaggtttttaatcgaaaatcaaaccttgaacgtcatcatagacttcatactggaaagaaatcttagaagtgtaaatttgcaaggtttttaggcaacagtcaaaccttgcatgtcatcatagactttatactggagagaaaccttacaaatgtgaagaatgtgacaaaagttttcaatttcaaatcactccttgaaatacataggagagttcatactggagagaaaccatacaaatgtaaggtttgtgacaaggatttcgggtgtgattcacacctggcccaacatactggaattcacactggaaaggaactgtacaagtgtaatgagtgtggcagagcctttggtggtcagtcaacacttactcaccatcaagcaatccatggtatagggaaacttgactaatgtaatgattgtcacaaagtcttcagtaatattacagccattgcaaaacattggagaatccataatgaaggaggtcttacaagtgtaataaatgtggcaagtttttcagacatcattcataacttgcagttcattggcgatcttatacaggagagaaatcttacaaatgtgatgattgtggcaaggtcttcagtcaagcttcatcttttgcaaaacgggagaattcatacaggagagaaacctcacaagtgtgatgattgtgagcaaagcctttacttcacgttcacaccacattagatatcagaggatccatactggacagaaatcttacaaacgtcctatgtgtggcaaggtcttcagtccgaggttactccttgcagaatatcataacgttcatttttgaggtaatagttacaaatgcggtgagcacagcaaaccatcaaggattgacagtagagtcaattcagaattgacttgagtttgagttgacttaaaacattcagttgaagcattaattgacattaaagtgtttatgttaagaggattgggccaggcgtgtggctcacgcctgtaaatccagcactttaggagcccaaggtggatagatcacttgaggtcatgagtttgagatcagcctggccaacagacgtgagtcacttttcccagcctgctttttgtttctttaacaaaaaccaataggggtttttataggtattgtgttgaatctgaatcacattggcttatataataacaatattgatttttccaaaccatcaatgtgggttgtatatatatgtttttaatcattttggttaatgtttgtagatttcaaggtgtgaaattctcagtttttttatgtttattcctaagtatttcttactttaagatctctagcaaatggaagtgttttttaattttcgtttaaattttttattgtttatggaaattcaattaatttttggtgctgctattgcattgtgcaaatccactgaatgtgttgattagttccagtagtattttggttgactcaggccccgcccacctcttcgcctcccgtctggcctgacccaggccccgcccacctcctcgggggtctccccgcgggtctggcttctgtactgtgctgattggcacagacccggaagctgatggcatggactgaaggttgccccgttgagtttgcgcttcccagttctctggtactgctataccggggacgtgggtgtctccacagacctggaaattccggcccctctttctcaactcagagcaaattgagacgtccgggtgggagtccgtgagtcttttccttttgagtttaaagtcgccctgaggctggtcccgtcccggtcttttctgcagtagggccgtgcagacacctcctgtagcgaaactttccttctcaaaacccttcccgacccgtcctcccgcctcgcgctgtttcaggtcctcaccagcgagttggactctcgccctgggctcctcatcggcgcctggagggcagcgctgcagccccactcccgggaaggccgcgtcctctgcctggtcctgggatcctgcagaccccacccctgtccgaaggcgccatcgcccaccacctccctcctcgtgccggccctgcttctccccagttccaaccccaggaaaacgtgcttctcctggaggcaaccctctttttccaccctcgccctgttgttcccggaaggcaggcctggaatgtgaagtttccaggtagatggatattaaacatagaattgaagaaaaaaaaaaaaaccccacaaagtaacaaaagaatgaagcggcgaaagcagaaatttactcaaccaagaaagcaccccacagggtgggggtgggcccaagcgagcgtctccagggccccatttacaaagtttttggaggttatttttttttgaggtccctatgggctaccccttatctggatgaagaatttggcccttggccaaggaaataactgaggtaaattggcctgaggccagagcagatgggtgccctatgcagatgaaggggtggccggtgcttggccttggccactcctgggctctttctctttccacctgcgacctggtggaagggggagggtgttagggagagtagcctttgatcctttgttactttgggtgggaagatggggtttttccttttagtctagttttggaaagttcgcgttaattggttttagattccctgcctccctagacccaggacccatgtggttttttttgtttttgtttttgtttttttgatggagatggggtcttactctgctgcgcaggccgaagagcggtgaccggatcacagctcactgcagcttcaacctcctgggctcaagggatcctcccacctcagcctgcagagtagctgggaccacagccgcgcgccaccacaccgcgccaatttttgtgttcttggtagagaccgggttttgccttgttgtctaggttgggctccaactgcagggctaaagcgatccaagagcatcagcctcccaaagtgctgggattacaggcttgagccaccatgcccgccttatttcttaatttaaaaaaaaaaatgtatatgtagactgaacgcggtggctcatgcctgtcatcccagcactttgtgaggccgattctcctctatccaggagacgggtttcaccattttgccaggtttgtctcaaactcctcggcttaactgatccgcttgctttggccttccaaagtgctaggattacaggagtgagccaccacacgtagccagtcctggcattttgtagaaggatggccaacgcagcctgttgacccttcctggccatcacatgaaaatcagcgactcttccttcttacaaaactcggagcttctcaggataacttggtgaaacgtcccccgctgtgaacctcagtgagcccacctgtaatatacaggtgagggagaagaccagaaaagctcagtcagagtgacactgacccctgaaatgatgggcacaatggagtgtgtggcttttcctgtaggacagggaggtatttagttgtagtttgaactttaaaggattccagtcctccgaaaaacaggattagactcaaatcaccttgaaccttatcatctcatggctttgacccacctacatggctccgtgtcccctgcaggcctcgccccggagctctacaatcctgtgtgcagttgtctccgcagctctctgctgggacatcaaacaggcatctccaccttcatgtgtctataagtgacttcctaaacccccaaacacattcccttacagtcctacacatctcagatgagggtgacagtgtacttctgggtgcttagctgaggttgacaccatgtattttaaatatggaaaataaattacattatttgtaa

SEQ ID NO: 203546 - DNA, 863 bp, Homo sapiens
  Payload ID: 20137
  Gene Name: zinc finger protein 701
  ENST ID: ENST00000593941
  CDS Start-End: 226-863
gtctcaacctttaggcgcctgaagcgcaaacgtcgcgatcccagtctcagggaggccgagttctctgcctggtgctgggatcttgtggaccccaccgaaggcgtcgtcgcaccccacctcccgcctcatgctgggccttgctgcaccccaagtctccccttagcagtcaccactttccttgagccagcgttggggaggtgccaggggccagtcctgtgacacgagatggggtttctccatgttggtcaggatggtctcgaactcccgacatcaggtgatccgcctgcctcggcctcccaaagtgctgggattacaggtgtgagccaccgcactcagcctccctgttttgaaggattgacttctaaagacttggtacgtgaggaaaaaacacggaagaggaagaggaaagcaaaggagtcagggatggctcttcttcagggtctactgacattcagggatgtggccatagaattctctcaggaggagtggaaatgcctggaccctgctcagaggactctatacagagacgtgatgctggagaattataggaacctggtctccctggatacctcttccaaatgcatgatgaagatgttctcatcaacaggacaaggcaatacagaagtggtccacacagggacattgcaaatacatgcaagtcatcacattggagatacttgcttccaggaaattgagaaagatattcatgactttgtgtttcagtggcaagaaaatgaaacaaatggccatgaagcactcatgacaaaaaccaaaaagttgatgagtagtacagagcgacatgatcaaaggcatgctggaaacaaacctattaaaaatgagcttggatcaagctttcattcgca

SEQ ID NO: 203547 - DNA, 579 bp, Homo sapiens
  Payload ID: 20137
  Gene Name: zinc finger protein 701
  ENST ID: ENST00000596514
  CDS Start-End: 144-579
gcacacatccgcgcagaccaggaagcggatcccgtggagtgaaggtcgcaccgcggcggccaccatgtaagaattccgttacatcttttcactcatctcagaccttctcagcgtgactcggtgaaaatgtccccgttctgaggatgtcacagctaaatctaaagcagatcatagtctcgctctgtcctccaggctgtgagtgcagtcttgtgatcttggctcactgcaacctttgtctcctgagttcaagcaattcttgtgccttagtctcccaagtagctgagattacaggattgacttctaaagacttggtacgtgaggaaaaaacacggaagaggaagaggaaagcaaaggagtcagggatggctcttcttcagggtctactgacattcagggatgtggccatagaattctctcaggaggagtggaaatgcctggaccctgctcagaggactctatacagagacgtgatgctggagaattataggaacctggtctccctggatacctcttccaaatgcatgatgaagatgttctcatcaacaggacaaggcaatacagaagtggtccacacaggga

SEQ ID NO: 203548 - DNA, 3349 bp, Homo sapiens
  Payload ID: 20138
  Gene Name: zinc finger protein 703
  Uniprot ID: Q9H7S9
  ENST ID: ENST00000331569
  CDS Start-End: 230-2002
gctatttgacgtgcggctcgaggaaggcgaaggtttttgtgttgctagccggggccagcggcggtggcggcggcggcggaggcgtcggtggaggaggggaggcggcgaggaggcgcagctcccgctgcaccgcgatcgacgctgcggagcgagcccacccgccccgggagctcgcctccccggtgctcccccgccctccccgcccccccagcggcgctgcctcctccaaatgagcgattcgcccgctggatctaacccaaggacacccgaaagcagcggcagcggcagcggcggcggcgggaagaggccggcggtgccggcagcggtgtccctcttgccaccggcggaccccctgcgccaggcgaaccggctcccgatcagggtcctgaagatgctgagcgctcacaccggtcacctcctgcacccggagtacctgcagccgctgtcctccactcccgtcagccccattgagctggacgccaagaagagccccttggcgctgctggctcagacctgctcgcagatcggcaagccggacccgccgccctcctccaaactcaactcggtggcggcggcggccaacgggctgggagcggagaaggaccccggccgctcagccccgggcgccgcctccgcagccgcggccctgaagcagctgggggactcaccggccgaggacaagtccagcttcaagccctactccaagggctccggcggcggcgactcccgcaaagacagcggctcctcctcggtgtcttccacctcctcctcgtcctcctcgtccccgggagacaaggcgggcttcagggtccccagcgccgcctgcccgccctttcccccgcatggagcgccggtctccgcatcctcgtcctcgtcgtcgcccggcggctcccgcggcggctccccgcaccactctgactgcaagaacggcggcggggttggcggcggggagctggacaagaaagaccaggagcccaagcccagcccggagccggcagccgtgagccgcggcggcggtggggagcccggggcgcacggtggcgccgagtccggggcctccgggcgcaagtccgagccgccctcggcgctggtgggggccggccacgtggcgccggtgtctccctacaagccgggccactcggtgttcccgctgccgccctccagcattggctaccacggctccatcgtgggcgcctacgccggctacccgtctcagttcgtgcctggcctggatcctagcaagtccggcctcgtgggaggccagctgtctgggggcctgggcctgccgccgggcaagccccccagctccagcccgctcaccggggcctccccgccctccttcctgcagggattatgccgcgacccctattgcttgggaggttaccacggcgcctcgcacctcggcggctccagctgctccacctgcagcgcgcacgaccctgccgggcccagcctgaaggcggggggctacccgctggtgtaccccgggcacccgctgcagcccgccgcgctctcgtccagcgccgcccaggccgcgctccccggccacccgctctacacctacggcttcatgctgcagaacgaaccgctgccgcacagctgcaactgggtggcagccagtgggccgtgcgacaagcgcttcgccacctcggaggagctgctcagccacctacggacccacacggccctgccgggagccgagaaacttctggccgcctaccccggggcctcgggcctgggcagcgccgccgccgccgccgccgccgccgcctcctgccatctgcacctccccccgcccgccgcccccggcagccccgggtcgctgtccttgcggaatccacacactttgggcctaagccggtaccacccctatggcaagagccacttatccacagcggggggcctggccgtgccgtccctccccacagccggaccctactattcgccatacgcgctgtatggacagagactagcttcagcctcggcgctgggataccagtaactacagctcttcctccaccccagccccctcaccctcctccctctccctcctcctccctccccacctgccgtcgccgctgcaacctccactactgcttgaccctgccgggattccccacccagcccttccccaccggactgtgtatttatttactataatgttagcttacaagctgggaatataagtgcattaacggcccacatgagtcaatggtatgcaaaaagtctgtgttctcccaaataataatattaatcccacaaataacgacatgatccccgcccctgttcctttctgttattttttcttagatataagttttacattttttattccttttcctctttttttggttttgattggtttggtttgagggagagttggggtctttgggttcttctagacgttttgttttcccttcctggggagtttcttgcatgagtcttaacttaaaactacgtttccgccttctctttttccctcttcccccttcattccctcttgtttccttccatttgcggttctgtttttgttttttgttttgttttgttttgttttttcctttgttgtacaagtaacagagaggaggttttttttgtaactcattttgggggtggagggggccacctgggtggcaggggccctggagctctattgacctggtacactgctccgggactcctcccccgccaccctccgcgcatagggtccttggtctggaccctgccccccaaaagtagggccttgctcctctaccttgctctgagcacggagagccctgaccccaccagtaggctcgcccccagaagggcccaagtggccgtctaccgtcaccttccagactcccgcccctaacacccagtggctacagtgcgcctgtcggggcacctggagcgctcacctggttgaattcaaagtcccagaaggccccgctggcgtgaagccggccccttacattttgcgaagtgcattatagtccttgtttttctctccctcgtgggggcaacgacccctcccctggcagtaggggtggggtaggtgactctcgctagatccctccaaagcagaccggtggcgatgtcagcggatgtcacgagctcgttagctgcgttcggggaaggttggggcgtcagggagctctcggatcacagcagcccccgccctctcctaggcctggcccggcagagcccccagagtggaccccccagcgactggggtcttctccccactcctccctccttctggtctgatgcggcagcgcgggggctgcggggcctgtttgggacgaacagagctctcccttggtaagacttattttgttaataaatggaatacttggctatattcaca

SEQ ID NO: 203549 - DNA, 14386 bp, Homo sapiens
  Payload ID: 20139
  Gene Name: zinc finger protein 704
  Uniprot ID: Q6ZNC4
  ENST ID: ENST00000327835
  CDS Start-End: 233-1471
acacaagctcaggagtagctgccatgcacatcagtgtccattaaaatgacttgtagcaaatctctacgttcaaagtctaactttgacagacaaccttacttccagcgaagtctactcccctccctccggagggaagaatgggctgcggttaagcgtttgccctggtgtcagggccaactgcttcgaagcgccagactttcggagactgtgggtggggagcattaagcgggaaatgaccttcacatttcagtcagaggacttaaaacgtgactgtggtaaaaaaatgtctcatcaacacgtgttttccttggccatggaggaagatgtgaaaacagcagacaccaaaaaagccagccggatccttgaccatgaaaaagaaaacactcgctccatctgtctccttgagcaaaaaagaaaagttgtttcctccaacattgatgttcctccagcaaggaaatcttcagaggaactagacatggacaaggtgacagcagcaatggtactaaccagcttgtcgactagccctttggttcgaagtcctcccgtgcggccgaacgagagcctcagcggatcctggaaggagggcggctgcgtgccttccagcaccagcagcagcggctactggagctggagcgcccccagcgaccagtccaacccgtccacgccgtcgccgccgctctcggctgacagcttcaagcccttccgcagccccgcgcagccagacgacggcatcgacgaggcggaggccagcaacctgctcttcgacgagcccattcccaggaaaagaaagaattccatgaaggtgatgttcaaatgcctctggaaaaactgtgggaaggtgctgagcactgcagcaggtatccagaaacacatccgaaccatccatctggggcgcgttggagactctgactacagtgatggagaagaggacttttactacactgagatcaagctcaacacagactcagtggcagacgggctgagcagcctggccccggtctcaccttcccagtccctggcttcacctcctactttccccatcccagattcaagccgaacagaaactccttgtgccaaaacggagactaagttgatgacgccgttgagccgctcagctcccaccaccctctacctcgtgcacactgaccatgcttaccaggccacaccccctgtgaccattccaggatcggccaagttcacccccaatggcagcagcttcagcatttcctggcaatctcctccggtcactttcacaggcatcccagtgtcacccacacatcatccggtgggcacaggagagcagagacagcatgcgcacacggtcctgtcctccccacccagaggcacagtcagcttaaggaagcccaggggagagggcaaaaagtgtcggaaggtgtacgggatggagaaccgagacatgtggtgtaccgcctgccgctggaagaaggcctgccagaggttcctcgactgagagacccccaggcagaggggctcagggccctgagccgctcctgccctggcctgccactgcaggtgttggaaagagcttttcctactgaataaaacacagttgaagccaggaaaagccctttcaggaaccttggaggaataacagcaaaaacacagaaaaattgtttaagtcaccacctatgacaaaagaaagttgctcttactgagaacccagcttggagcagctataactagttttttttccttcaaaagaaaagtcaactttttttgctgtatgtctagacttaaaactgtggacttctgtagcaattgaaccaacaaagcccattttacctagaaaggaggcatattttgataagctttctgaattatgccattttcaagatttttttgacacttaaaaaacaagctacaggttattcagtagcatttgtacaaagatcaatacttacttttgttgtgaataatcttttccgtatcttccatttgacttcttggagcagtatatgtcaggatgtgttgcaagacagcgcagcactctgggcatcttttctatggctttttgtttgtttttcttttaagaatggccccacactgaaccatggtagagctattagtttgtagggccccagatggcataaactcgagaagggattgtccacggaaatcaccagcagacttcagcccgaagctgagttcaggaagtccagctgtcactgttgggaaacatctaggagtcttccttggatccataagaagctcttcccctaaaggcagcacagctaactctactctctacctgccacaactcagtcaagaattggcacctgtagccatctgggtaagcctcgatgcttctttcagggatgtgacacaaatggcaactcggagctatttgttactgcttgtctgtcaagattgtagccaggttaatgggtcattttccttctctccagactccaccactgactgatttcagaagaggtagagaactccaaactgtcccagcaggtttgctttagacaacagagcacagcccacatggccctacctgttcagaaagtcatgttagatcaacaaaccacttccattctgagtgcacttttataggttttatgctttagcatgtccgggagatgagttaattaacaatataaacattatgtgagtaaatggaaggtccaaactttaagtttttcttataaaaatattggagctattcatttaagaatttgctcaaaagggaacataacgccaaaaggaaaatgcatgtaggtataggaatttctcagtttagtagggccagggcttgcactatgttccatttattgggcttcgtaacttacttgcttgtttgtttgggggatagtggtgtggggagaggggagtcgtcaagccctataaataagctcattctctatctacccgactctcaattgccctgctaaagagttatttctcctatacctatgcaaagtaggaagagcaccttataggaggcactgtatagggacaggggacatgggatcagccataggaatgttaaatgaaattgcacagaggaaagtttaatatatgtctagagattatacatacacttttttaagcgtaaaaagaagacatctagtaatgacagatattctttttatatacaagcaaaagaaagtataaggaggttctacagtgcaacatccacaatctgtgcattcacatattatgggacttttattttttaaactctcatataaattttttaaaattactccttggaagagatcctggtttttttcttcatttatttttttctttaaaaacatttattttaagagaagagaaaaagagcttcatctaattttgcatcttgattaccaatcagtactagtcacagcaccagcaatactgtatgttttagactgacaaggtcagccaggaaatggcatttttttaaacgcagaaatgtgtttgtttcctctactctaacacgtcctttctcctcctggtgtcctgtcaccccccatgcagcaccactgatgcgagatgatgctctggcctggtccaggaagccctgagccatgggcagattgcccagtggccttgggcggccagagcttgtcacctgtttaaacaagttcaccatgtgtttaaatgacagggtacagtcctggaccagaggtttttctcttcagcaaagctccctggcccttgatcgttggactgttactaatagaaaaagattcaagtcatgaagtataaaatccatcccccatcccagaactttgaaacacaaggagggagagatctttgctatggagcagtcctggagcaaagccccgtggcttccacccccagatatataccccataagtagtgctgagctccagcttagctgagccaagctcagtccttatctggtgttcagccagtgcacaggtataagcagaactacagagctgaatgtagcttccctgggatctcttctcctttctaaagcatttttcacacagttctgtacctcctacccaagttggggctgctttctgcctgctagcccacggctctgtgtactttcttttctggcttcaggtgcagacagaccctcagtaccttcctggacacagacacatattccctggaccaaggcgtggaataactagtagaccaccaagccacaggtggctggtcttgaagaaaagggattatactccttacaggccacccagaaagctatgaattccaatatacaccactgatcgtgcaagttagggttttttttttttaaacgtagcattattttgttatattttggaactaaatgaagtgccaaattaaccagacattcgtttgatgccatctctgtggaaccaagttctctgtgtgtgttcgtttggctgggaggagggggaggactgggcagactgctcccacagcaggctggcagtggaactggagccctggccaccgcagggagctcagaggccaatctacgcaaaaggcatgcaaaacaatggattctggtcccaaaatatttctaagtaaggcatgatgtagccttttgattttttttttatcctttgacaccccagccttcagaaaaggtttttcatctctctccaaagaagtcatttcatagtgactgacaggacattctccagagagcgacaaagcagagtggccagcaggcagtggtgttaagccttgggccttcccagcagatgtgtgctgcattggtgggtgggaggcagtgtgacagcctggagaaaacacacaggtagcaagggagtcaggggggaggtacaagagggctgtggacacctggctcttgctcatcttcttggtgctgatcagctggtggtcaccatccctaagtacctcccagggagctgccattttctcctctgggagcagctgcctgaagcaaggagagaatgacctgaagggaagtacctccggccaagagtgcagggctgctgtgcctagcctgagcgggccatctctagcagatatggacttctctccaccacactagctgaaaagttttctcccttggttggcaaaagccagtgtcaggaaaaaagctgtgggtttctgaccaagaatgtgtgcgcttagctgcaaagtgcctgtcagcagctccaggcaccaacaaggtgcccttttattagacaattcctgcccgaacataaccatattgcagatgaaaattttcaatagagaatgacacaattcttgacctttctaaaaacttttcaaagagatagtcacatgtgtatatgttgcaaaagatttttgaaactgaaatgtcctccattaaatctcaagagcactcgagttttaagtctgctgtttctggtgtcacactaagacacacttttgaaagcagccctgggttctgaattagttggcactgctgaatccatgttcccccttcatcagactccaaagtgcagcattcacttgcaaaggttgagagaaaagtggccagaattgtacatataacagagaataccttgagaatagtagcaaaatactgtaaataatattcatttcctcagggaaaaataaagggcatgcaaaaataggtctggagactcctgaaactaggaagaattttgttatcactaaagtcttttatagtcagaacaatttttttttcaaatgaacatggtatcatttcaagacaaatttatgtgaactgggcagtactgacatttgtgaggcataggggagtgccctgggaaaacggtttggagctgacctgtagcctaaggctaacatttgaaccacaggtgcaatgcctgggggtgggggagggggacggggtgggggtggtattcctagactcacgtaaggctttttctgaatgtaattgtgaatacaaagccttgctggtcctttttatcattacccaatggatgactgtttattagctatcagcagaattccgtaggcgaaagcaagccgtgaacgatgtacattttgctttaatagcatgttagcgaacaaacttccatggacttttgtggacaaggtgctgctttttctcatgaccctgtagaattgctatcgaccacatcttctgtagcactgacctgtgtgaactcagggaagaatttgtgcatacaaatgagtggaaacagagcaggattcatgaatatgaatgagaatgtgaatcattttggagaatgccctgggcacacgggtcaactggaaatttcatttctctaagaaagtagccctaccagcggcacggactgttcctgttcctcatacctgtggggattcctccatattggaactgtttcatgtatcttttttgcattgtaactagccaaacctgaagtcagtaaataaaatgagattagcactttttttaggtaccagttgtatcactgagtaatgcacaccaatagagcaagaaagtataaaatgtatttaagaccaactggtttgcttattatgactgactttgaaaaagcccatatccaatgatatacatgctttaaaaggtatatctatcgtaggaccaggaaccaaaatgggaattttacttctggtcctgttttgtaaatagttcctttttttgaagacaatctcatgttttataacttttgttgtgggtctgagaatcacaatggtaatatgtcttggcaaaacataacctttaaatacaaaaacaattataacttaattttccaaataaaacaagaaatacactgattaggcttctacagttctaagagacatgacactttggtaataagcgtcagtactctacttctcaagttaactggaaatattttacaagatgcagtgttttgtaatcacaaagaacgcagacattttgtgagaaatgaccttggttttatacattgtagcttattttttaaaatatagtattttaccaggcaggaagtattaatattataagtaattcttgctcaccaaacaaagggctatgtctcttttaagcaaatgttttgatgcatatctttttaattaaccctctgcagcaagggtagaaatacagatcagatggaatgggtattataggagaatcaagatagcaacagctactccttttaccattactagtgtgttttcaaagtatggaaaaagatgcctgaagagtcattttatatattttaaatctaaaaagtgttaacaggtatgcttataggccatgggagaaatattcttataaattttttagtgtaaaatgataaattctgtgtcacaaagacaagtttaccacttgacctaccagaatcacagatacttgcatttaactagcaagtatcatttggtggaaatttctaaaatcatagtagacaggcccaaagatagaattcttaggtgatcagtagtgtttaaaataattttgtcctcagcactaactatataactgtaatttctacataagaacaagtgcttccaaaatatagtggagggaaaaaataaaaaaggaaaataaaaaaacaaaacaaaaagaacaagtgcttgatttttcactgtgaagaactagcaggcacatgaggttgtgatcagaaagtgactgagttcccaagaaccaggaaacagaggggagttgtgaagagtttattaaaactgtacaaataattcagagctttgccaaaaccatttcataatgctgtacagttttttcaagcccactcactgttaaaacaagaaagcaccttttctttctaagattttagtaatccaaaagctagcctaattagccaagtatgcagataacatcaaaagcaaagctgagatagaacagccatacacccgttgggcagctcttatgaggtggtcagaaggtcactcagaccttggtttcaaataggctttagaatctgcacacttgaggactagaaatgcacagagttagggaaagccatgtacaggcttggctcctagtctttgagatgaggcgtcttgcaaatctctgttttcactccttggaatgtctccattgttagcattaaagtccccaagaagtttttattgctgtacggttttgaacccaatgagtctcatttccaaaagattcctaattctatataggagaggttgcaaatgtcagtgcctcagaaggaccaggcaagttctgtaaatgattgatgtggataaggcaaagaggaacacaagaatggtggagaccaggttgaactgcagaacacatgccctctttgaaggggtgcccacactcagctctagacaatcagaaccatgcagaaatcaggcccagggctgctagatcttctgacgtggaagtatgatattacctgacacgtaagtgttgacaactaactcaaactcttggccaacactgtgcagaccaaagagaagctgtacacagacaggtgcagcctgcagcccccagtttcaactattgggaaaagtggatttcacattccacagttgtcaggtcaggttcatccatcagccccacaaactcacatgtcggcactatctgggcaactaaaataaaagaggggaaagagatcatttctccccagatatcattctcatggcagacttgaatatagatacgctgagttatccagctctctcactctgcctccttttggcatgcccaggctgtgccccgtaaagtgttgaatcactgttatcctaattttcttagtgttttctaccgtggccactgtgatgaggggctggcaaagagcagcctcgtgccttccgagaaggctgccaggagcctctgaagcttgaagcgagcacacattgcctccttgtgccaaagcccttggccagcctccccacactccttccctctccatccggcctcatgagtcttcgttaccaagtaaaattaccactgcttcacctctgatacagcagaagccttgcttcagaactggtaggcatttaggctatttcagagtgtccactaacctcaaaaggaggtttttccacatacaaaaccctagcatctttgaggggaaagcaaaatgagaataaattatgtcatgaaaaaaattagaagttgcttccttcatttagatggactaagttattttaaactctatcttacatcagagtcctgatggtgttgggatagtcactgaccctttcacgtatgtaataagatacgtctcgttcacacactatttcatttgatctttgtaagaacccagtgtagaataggaatatttaaaatcaacattacccacctccaaggccaacccagagtagtcttgaacctgagtcagcctcagtattgcttgcaaggaagagggaaggggctcattaaaggcctggctcaaaccttagtcttccagactgactagggacgtaagaagacccagggacccaccatgttctcaaaccatctattcagtccaggcctttcagcatagacataaagagcccacccgttactcagtcatgttgccaagtgcaaactgatttatccccagatgaatccctttactgtagcagatccctaatccctaaatttcagccaatttggtagttaattataggagtttattagctaaatgtatgttctgagtaaaagttttgactctttggggaaaatttattttgctgctagcatacaacatttgctatgtatataaacttaagtcaatgccagaaattttaaaaccagctcaaatttataatctgtaatgatcaaatcaaaacatactgtaaactcagagttggaaacgcctggtaatatggttaagtcatgtttaaatatgaatgcaatttaaatgacattggcaatgcctgagatttctttcattgtgaatgattaaaaggcagtccaatatatgaatggatttcatcttacctttctcccgttaatttactaggtgtaacatcttgagtgtaaagtcattcacaggcagttgggttgtggagctagaaggagcctcaaaaaaaaactttttggccagactcctacatcatgaacagggtttttgatgaataatatttattattatgtttctaaagtaatacagtgttggagaatgaaacagtttagtcctttcctcttctgatggaaaagaatcatagcgccgttgccatgacaataacaggatgtagaaagacccatgaagaaagaaagaagaaagctatggttccgaaagcaggtaaccacagattttgaaaggaggcagagatggtgattaaactgtagtccttgttttttaaaatgttctttcatgttaggcaccaccacatagttaataactaccaacttctaaagagaagatccccttgatttatttatatcatgaaaatactaaaaatcaattctcaagtctaattaactattacattatcttgctaggtccttttccctaaatttttaattcagaaaattaaccagaattggccagatgcagtggttcacgcctataatcccagcactttgggagtccaaggcagatggatcacttgaggtcagtagttcaagaccagcctggccaacagaggaagaaagagtgaaaacaaaagaagaaagagggaaaccctgtctttactaaaaatacaaaaattagtcgggcgtggtggcgcacacctgtaattccagctacttgagaggctgaggcaggagaatcccttgaaactgcaggcagaggttgcagtgagccaagatttcactgctgcacctggggtgagactaccattaaggaaggaaatttcctttaaacagaaaaaaacaaaggtgctcatctatttcttctgaattctctctacatccttgacttaagaggaaaaccagcactcaagaaacagctttaaaagagaacagtccccattctagctaccagtcttgctttcccccatcttggcaagccccagtgaatttgccattgaaagattaccctcccctttgccctcatctgcctgagctagaggccaggctgttgttaatgttttttcagttccaaagcccctgatgggacattcttgtttctgtgctactgctttctctctcttaaattaaggtgcaaggggataaatattactataactgggatgtaaggctcagtcagtgtggctattccctcccttcgggggaaatattccatctgtctgaacggttttaggtgatcatgaggagagcggcttagtcacacagccagccacgctcatcacaaaagatttgttcagactcactgtaaagaatgacaaggcagatagctaatcctttcactgtgcctcaaagcccgccgtgcaagtcaccaaccctaccggtcctctccacgtgcgaggctaatagagtgatcagaaccaggaatgtgagctgggttccaccttaggaggggacaatgaggacagagcaagagggctccatgtttaattactccaggctctgacttctgcccacaattacagagcatgaaagcagaattggcctttagtaagtgaaaaggaagtggctcctgcagcatataattgttataatttcgtatttatggaaagagaaaaggacttcagtccactcatgttgttaagcacttgtccctcactccactggagcccccttcctatgttttgggcacagatggctgggaccgagaggaaagaggaagagcggctgccagagtgtgaatatacccctcagggatatacagcggagtttcatgataaactacccatactttcccaaaaaaggttgaggagcaatacataactttgcagattacaaacccttgttttactttttaaaccttttttccatactctgcttattggaaatcgatggctgtgatgtgaccaacacctgtgatgatagcaaagcccctcctttcacagtctcctgactgttcggggaacctccttggtcattggtagaaagctttagaaaagacttagctttttagggaagaactaaaaaatctccaaaacatactagtcccatgacttcgataactgaaaatgtcctgggtgtaaactaacccaggaatgtggatcatacatgttttttttaaaaaaaatccctgaatcaatattttcctacaacacaccctaaaattcctatttttgtaattaatggttggacagtgatcagccatttaaacataggctttctggaataaccagacactagaatagtttccaaagtgttttgcgtatcaaaatcctatatacttagaagaagaactcaggataagaaaaaatcgctaggtcccaaagggttcatgactatcatcagatgcaactgcgagtggcctacggtcattttttcaaatgagaagactggagagagagaacaacagtaatcacaaaacctctgttgcccttagtccatgacaatgtttaaggaaactttaaaaaattaagccatcttctgaattgttttctacaccaaatctaaaatattaaaatgaaattattaaatatttaaaatggggtatttagtggaaatgcaatcagtagaaaacattgctttttagtgcctgctaaacaagtaaaggagaaagaatgaagagaaaacagcagtccttcctgtgtgacactcgtgtggaaatgacaggcattcacatgtcattgagtgctaactcaaaagctaggtggcaatgctgtccaatgtttagagatcttttgaaatataattttaccaccattcagaggtaagtacttgcttaacagaagtctttaatgttagtgaatgaatgtataaaattataaactatgcattttcaaagagtagcatgtattttgtatcgaatccaagtaaatttttttcatagctacctaccacaactgcaaattattcaaaataaacttggatacatatccttatggggatatgggaagcccatctatattctcctacttgatgtttttaaagattgaaactttattctgaaacatcaggctctaaaaaattccatcattaagatgaataaatgggaaatggtttatttgttacttcgtaagcataaatgggaaatgttggctgttagaaaatgtgcccagttctttaaaggtggatgttctagtaacactggattaacaagcaaacaaaactgcatgaagtgaacgaatatttcattggataaagttagcataggttttatctgctgggtttaattctcaatcccagaaaaaaatattcttcaaggggtatcagttatagtttcaaagaacaaaatatgaaaatattgtccagcaaagcaaatcattgatcttttttcaaaattacttatattttggaaagtctatatagaatatccacaaatttcttcagccctcttgttgatttcatattttcatgaaactttttcccctaataatttgtcttcgctctttaatcagtgctttactacattactcagcctgaaaaaatatcttttccttcatctgacaatgtggaaataaagaactccatttctgtcattctggttctcttcagtgtccattgagaaagtttctcaactgtttgtaaaatacggggggaaaaaaacacgcatttctaaacctggtacttaaggttatactggattgtttgctacctaattagaagttattggggaaggggcattgtgtctttttatatgatttttagccaaatccagatgttctgatacacatttctgaatacctgtctgactgtaaatacagcctgtggaggttcaggttgataaacctttcacctgactgctccacagccatgctccttgccagcttctggcacattgtacatagatttgttgaatgtttaaatgatgttgtttttctaaatgctgttctctaaaacaattttttgaatttcttttgctttccattgttttggactttgtgtgttcgttttttaaaaaaaaaaatgtttcctaaatatttaacaccaggaaaaatatttttaaatacactggtgctaattgaaacagaaggaaattttcagatcgaagatgtacaatgttaaatgttcataccagttaaactgcactttcccaaggggacagctggcatctacttgaaatgggcatcaagagaccaccaaatgtttacagtttctgtggcccgtttaagtgtaaaatgcagaagtggctctgtccccccagagttaaggatttgctacactggtcctctggaagcatttaagtagaagaaaaggcttatagtcagaatcactttagtaatcgtcttctggtccttggacttttctgttctgtaatgcttgtaacaatgaatatggtgttgccaatctagtctgatatcattgttgacctgtacttactttgtggatggttctacctggggttgcactggcacaaacagagccagaacactggactttcaaaagaccattttgacttctacagtgtccacacacatgaatttaaatgcacttgtaactggttaattaccatgaagtaagtctaacttccacttaataaaagtttttgtgtatctgcttcta

SEQ ID NO: 203550 - DNA, 712 bp, Homo sapiens
  Payload ID: 20139
  Gene Name: zinc finger protein 704
  ENST ID: ENST00000519936
  CDS Start-End: 144-712
acgaggaggtggtcgtcgaggtggtggacggcgacgaagacgacgaggacggcgaggagcgtttcgtgcccctcggacccggccacgcagtccccaggggcccggcccggggcgcgttgaaggtggggagcattaagcgggaaatgaccttcacatttcagtcagaggacttaaaacgtgactgtggtaaaaaaatgtctcatcaacacgtgttttccttggccatggaggaagatgtgaaaacagcagacaccaaaaaagccagccggatccttgaccatgaaaaagaaaacactcgctccatctgtctccttgagcaaaaaagaaaagttgtttcctccaacattgatgttcctccagcaaggaaatcttcagaggaactagacatggacaaggtgacagcagcaatggtactaaccagcttgtcgactagccctttggttcgaagtcctcccgtgcggccgaacgagagcctcagcggatcctggaaggagggcggctgcgtgccttccagcaccagcagcagcggctactggagctggagcgcccccagcgaccagtccaacccgtccacgccgtcgccgccgctctcggctgacagcttcaagcccttccgcagccccgcgcagccagacgacggcatcgacgaggcggaggccagcaacctgctcttcgacgagcccattcccaggaaaagaaagaattccatgaa

SEQ ID NO: 203551 - DNA, 3455 bp, Homo sapiens
  Payload ID: 20140
  Gene Name: zinc finger protein 705A
  Uniprot ID: Q6ZN79
  ENST ID: ENST00000359286
  CDS Start-End: 90-992
ttctttctccaacctcagcttttcttagtgcctaaagtgtctgcacatggaaatccagaggtagacagagagaaactgagttccggacaatgcattcactaaagaaagtgacttttgaagatgtagctattgacttcacccaggaagagtgggccatgatggacacatccaagagaaagctgtacagagatgtgatgctggaaaatatcagtcacctggtgtccctcgggtaccagataagcaaatcctatataattttgcagctggagcaaggaaaagagctgtggcgggaaggaagagaatttcttcaagaccagaatccagacagggaaagtgcccttaagaaaaaacacatgatatccatgcatcctatcaccagaaaagacgcatccaccagtatgacaatggagaactctctcattctggaggatccttttgaatgtaatgattcgggagaagattgcactcacagttccacaataactcagcgtttgttaactcacagtggaaagaaaccctatgtcagcaaacagtgtggaaaatctcttcgtaatcttttctcccctaaaccacataaacaaattcatactaaaggtaaatcatatcaatgtaatctatgtgaaaaggcctatactaattgctttcgccttagacggcacaagatgactcacactggagagaggccatatgcatgtcatctatgtggaaaagccttcactcagtgttctcaccttagaagacatgagaaaactcacacgggagagagaccatataagtgtcatcaatgtgggaaagcctttattcaatcctttaaccttcgaagacatgagagaactcaccttggaaaaaagtgttatgaatgtgataaaagtgggaaagcctttagtcaaagctctggctttagaggaaacaaaataattcacactggagagaaaccacatgcttgtcttctatgtgggaaggccttcagtctgtcttccgaccttagatgacatgagagaacatgcactggagaaaagccatatgaatgccatttatgtgggaaagccttcagtcaatgtactagtcttaaatagcatcagaaaattcacgctggagagaaaattataaacttcttcagaacatattctgactttagatgacactgtgttaggaatgacgaaggtaaggaatgtggaagagacttcagctgtagttgtagcatctaaacatgccaaaggactcatattttgaagaaatactggaatcaacatggaagatacttcagttacctttattcttcagtccacatcaataaattcatatggaagagaaattgtatgacatgtatgtaccaaagacttgttagtgatctgagcataaatgacatgagagagctgaaactgtcaacatagtcaactaaaagtcttcagcaacagctttaacttaaaacatgtgggactttcaggtagagaatctctaactctgcattcagtgtgaaaatatttttatttgcaatttattgtcaaataacatgagaaaactttacttggatgaaccctttatttgtattttctgtgaataaacattcagccaagcaccaggcttgatgttcacaagaaaacagagtgataaaatgctgctaaaatggaaaataagagaggaaagccttcataagctaaataagaagggaaagtctttccaagggcaatgaattctcttggaataccaaatacttcttactggagaagttatgcaatgaaaaatcatgagaaatcctttcttcatagagcaacacttgtggcacatgtgagatttcacactggacaaaacatggttagcatcctgaaaggagaaaattctttagtggtaattcatttcttagttgacattaagtttctcacattgaggagctatcaaacttgaaaatcactgtggagaaacctgatagatttctcatcagaaaagtgagtcaagaaggtggacctctagaaaaaactcttaacacatactttagcaaaataattcagaaatttgagaaaatatctattcataaaaatgtggcatataaatgcataatagtaaagtgaccagggaataaattgaatgcagaattatataagaaatctcattaaacttttccaaaagatcaatacttacaaatattgaaagaatacaatctgttgttgaaaaaacttagtatgttggcgaagcccttgtttcatttatgcagccctaacaaatcgatttgcatctgcactccttgggtgagattcttggtcgagattctaccccaacttctgagtctccccagtctttaacagctctttcctcacagctcacctccctttacttcaacgtccactaaaaccacttgtttccatccaaccctcgagttgacacaccagggatcttcagccccacttgctagatttctcagtgtgtcattgcatagatttagcagggaaatggaggctgtatcaaagacccctagtatatgcatttgggtgtccgcagcccttgcctctgtctctgagcagttacctgggatcagagaataaggcagctcttctcttctatccctcagaaggctcttgaaattttgtccctggagcctctctaactggaagtagcagttcatctcatgacaccccacattttattcaggtgagtcctgagttattacacagagacagacacagctgtgctccttttactgcagtccagaagataaaacaccagcatgataaaacagccgaacctgtcagccaccttgcaagcctttcctatattcgattcaatgtacttttcccgaagcaaaatgaaagttctcacagaggggccctcctctgccttgtcctcagaattggaaaatgtattgtccgtgaaggagcctcagtactgaacctaaaactcaagagaaaatgtttcctgaatatcaagtgggatgacttgaaattttgccaaacaggcacaatcttaatacgatcggccttactaaggctaaatggccttatccgtggttgaagttgacaaatcaatatattaaaaaatctccacaagtgattgattttactctgcagccagggtttatgtcaagtgtgaggataatgagcaagaaattcaagcccttggcaaactggttggagaggcaaggactgtgtccaggcagagctcatatcattatttattgtttaatctatttaattaaatatgtaatttacccacaaactgtggctgacattatatgtactcctgagccacattgagatgtactatttgtgctatgaaattctatgggatttgacaaatgcatggtggcagatctccagccattattaaagcgtaacacagaatgcttctcttattcaagctcatcttccctccacatagagggaatcaatcgacttttgtatactgatttttgaatttgcttctttatttccatcttcttcaattaaagcacaagatatcgt

SEQ ID NO: 203552 - DNA, 751 bp, Homo sapiens
  Payload ID: 20140
  Gene Name: zinc finger protein 705A
  ENST ID: ENST00000396570
  CDS Start-End: 131-751
taatggaaaattgcaaggggtttttcctgatctactttgaaatgcaattccgcttaaagcttttcttagtgcctaaagtgtctgcacatggaaatccagaggtagacagagagaaactgagttccggacaatgcattcactaaagaaagtgacttttgaagatgtagctattgacttcacccaggaagagtgggccatgatggacacatccaagagaaagctgtacagagatgtgatgctggaaaatatcagtcacctggtgtccctcgggtaccagataagcaaatcctatataattttgcagctggagcaaggaaaagagctgtggcgggaaggaagagaatttcttcaagaccagaatccagacagggaaagtgcccttaagaaaaaacacatgatatccatgcatcctatcaccagaaaagacgcatccaccagtatgacaatggagaactctctcattctggaggatccttttgaatgtaatgattcgggagaagattgcactcacagttccacaataactcagcgtttgttaactcacagtggaaagaaaccctatgtcagcaaacagtgtggaaaatctcttcgtaatcttttctcccctaaaccacataaacaaattcatactaaaggtaaatcatatcaatgtaatctatgtgaaaaggcctatactaattgctttcgccttagacggcacaagatgactcacactggagagaggccatatgcatgtcatctatgtggaaaa

SEQ ID NO: 203553 - DNA, 499 bp, Homo sapiens
  Payload ID: 20140
  Gene Name: zinc finger protein 705A
  ENST ID: ENST00000402465
  CDS Start-End: 268-499
cagattctggcatccacgtgagcccagtgatcccaatgagcgctgcgttgtgctaaattttcgtaaatcacccaaaagatggggctggaatgatgttaattgtcttggtcctcaaagtgactcgtcaaaaatctgcataatggaaaattgcaaggggtttttcctgatctactttgaaatgcaattccgcttaaagcttttcttagtgcctaaagtgtctgcacatggaaatccagaggtagacagagagaaactgagttccggacaatgcattcactaaagaaagtgacttttgaagatgtagctattgacttcacccaggaagagtgggccatgatggacacatccaagagaaagctgtacagagatgtgatgctggaaaatatcagtcacctggtgtccctcgggtaccagataagcaaatcctatataattttgcagctggagcaaggaaaagagctgtggcgggaaggaagagaatttcttcaagaccagaatc

SEQ ID NO: 203554 - DNA, 339 bp, Homo sapiens
  Payload ID: 20140
  Gene Name: zinc finger protein 705A
  ENST ID: ENST00000398526
  CDS Start-End: 1-305
cagacagggaaagtgcccttaagaaaaaacacatgatatccatgcatcctatcaccagaaaagacgcatccaccagtatgacaatggagaactctctcattctggaggatccttttgaatgtaatgattcgggagaagattgcactcacagttccacaataactcagcgtttgttaactcacagtggaaagaaaccctatgtcagcaaacagtgtggaaaatctcttcgtaatcttttctcccctaaaccacataaacaaattcatactaaaggaaatcccacttccagctggatgtctggatgaactcctgaaagctgctgagtgtcctgcagcaggt

SEQ ID NO: 203555 - DNA, 3378 bp, Homo sapiens
  Payload ID: 20140
  Gene Name: zinc finger protein 705A
  Uniprot ID: Q6ZN79
  ENST ID: ENST00000610508
  CDS Start-End: 117-1019
attttctcaagcaatttttaaatttcattcatttaccttattgagcttttcttagtgcctaaagtgtctgcacatggaaatccagaggtagacagagagaaactgagttccggacaatgcattcactaaagaaagtgacttttgaagatgtagctattgacttcacccaggaagagtgggccatgatggacacatccaagagaaagctgtacagagatgtgatgctggaaaatatcagtcacctggtgtccctcgggtaccagataagcaaatcctatataattttgcagctggagcaaggaaaagagctgtggcgggaaggaagagaatttcttcaagaccagaatccagacagggaaagtgcccttaagaaaaaacacatgatatccatgcatcctatcaccagaaaagacgcatccaccagtatgacaatggagaactctctcattctggaggatccttttgaatgtaatgattcgggagaagattgcactcacagttccacaataactcagcgtttgttaactcacagtggaaagaaaccctatgtcagcaaacagtgtggaaaatctcttcgtaatcttttctcccctaaaccacataaacaaattcatactaaaggtaaatcatatcaatgtaatctatgtgaaaaggcctatactaattgctttcgccttagacggcacaagatgactcacactggagagaggccatatgcatgtcatctatgtggaaaagccttcactcagtgttctcaccttagaagacatgagaaaactcacacgggagagagaccatataagtgtcatcaatgtgggaaagcctttattcaatcctttaaccttcgaagacatgagagaactcaccttggaaaaaagtgttatgaatgtgataaaagtgggaaagcctttagtcaaagctctggctttagaggaaacaaaataattcacactggagagaaaccacatgcttgtcttctatgtgggaaggccttcagtctgtcttccgaccttagatgacatgagagaacatgcactggagaaaagccatatgaatgccatttatgtgggaaagccttcagtcaatgtactagtcttaaatagcatcagaaaattcacgctggagagaaaattataaacttcttcagaacatattctgactttagatgacactgtgttaggaatgacgaaggtaaggaatgtggaagagacttcagctgtagttgtagcatctaaacatgccaaaggactcatattttgaagaaatactggaatcaacatggaagatacttcagttacctttattcttcagtccacatcaataaattcatatggaagagaaattgtatgacatgtatgtaccaaagacttgttagtgatctgagcataaatgacatgagagagctgaaactgtcaacatagtcaactaaaagtcttcagcaacagctttaacttaaaacatgtgggactttcaggtagagaatctctaactctgcattcagtgtgaaaatatttttatttgcaatttattgtcaaataacatgagaaaactttacttggatgaaccctttatttgtattttctgtgaataaacattcagccaagcaccaggcttgatgttcacaagaaaacagagtgataaaatgctgctaaaatggaaaataagagaggaaagccttcataagctaaataagaagggaaagtctttccaagggcaatgaattctcttggaataccaaatacttcttactggagaagttatgcaatgaaaaatcatgagaaatcctttcttcatagagcaacacttgtggcacatgtgagatttcacactggacaaaacatggttagcatcctgaaaggagaaaattctttagtggtaattcatttcttagttgacattaagtttctcacattgaggagctatcaaacttgaaaatcactgtggagaaacctgatagatttctcatcagaaaagtgagtcaagaaggtggacctctagaaaaaactcttaacacatactttagcaaaataattcagaaatttgagaaaatatctattcataaaaatgtggcatataaatgcataatagtaaagtgaccagggaataaattgaatgcagaattatataagaaatctcattaaacttttccaaaagatcaatacttacaaatattgaaagaatacaatctgttgttgaaaaaacttagtatgttggcgaagcccttgtttcatttatgcagccctaacaaatcgatttgcatctgcactccttgggtgagattcttggtcgagattctaccccaacttctgagtctccccagtctttaacagctctttcctcacagctcacctccctttacttcaacgtccactaaaaccacttgtttccatccaaccctcgagttgacacaccagggatcttcagccccacttgctagatttctcagtgtgtcattgcatagatttagcagggaaatggaggctgtatcaaagacccctagtatatgcatttgggtgtccgcagcccttgcctctgtctctgagcagttacctgggatcagagaataaggcagctcttctcttctatccctcagaaggctcttgaaattttgtccctggagcctctctaactggaagtagcagttcatctcatgacaccccacattttattcaggtgagtcctgagttattacacagagacagacacagctgtgctccttttactgcagtccagaagataaaacaccagcatgataaaacagccgaacctgtcagccaccttgcaagcctttcctatattcgattcaatgtacttttcccgaagcaaaatgaaagttctcacagaggggccctcctctgccttgtcctcagaattggaaaatgtattgtccgtgaaggagcctcagtactgaacctaaaactcaagagaaaatgtttcctgaatatcaagtgggatgacttgaaattttgccaaacaggcacaatcttaatacgatcggccttactaaggctaaatggccttatccgtggttgaagttgacaaatcaatatattaaaaaatctccacaagtgattgattttactctgcagccagggtttatgtcaagtgtgaggataatgagcaagaaattcaagcccttggcaaactggttggagaggcaaggactgtgtccaggcagagctcatatcattatttattgtttaatctatttaattaaatatgtaatttacccacaaactgtggctgacattatatgtactcctgagccacattgagatgtactatttgtgctatgaaattctatgggatttgacaaatgcatggtggcagatctccagccattattaaagcgtaacacagaatgcttctcttattcaa

SEQ ID NO: 203556 - DNA, 1207 bp, Homo sapiens
  Payload ID: 20141
  Gene Name: zinc finger protein 705B
  Uniprot ID: P0CI00
  ENST ID: ENST00000400120
  CDS Start-End: 283-1185
gtccttgtcccaagggacatacagcacacagcctgtggagggtggaggaaccaactgcaagatcacttgtcctcctcaattgatgtacactgaagaaagagccaccttcaggctgtaaggtcatcgtataatcctgaccactcatttcccatcatgacactgctgttccttctctttctccttcttggatgtctgatacaaacagcctcagcttttcttagtgcctaaagtgtctgcaagtggaaatccagaggaagacagagagaaactgagttcctgacaatgcattcactagagaaagtgacttttgaagatgtagctattgacttcacccaggaagagtgggacatgatggacacatccaaaagaaagctgtacagagatgtgatgctggaaaatatcagtcacctggtgtccctcgggtaccagataagcaaatcctatataattttgcagctggagcaaggaaaagagctgtggtgggaaggaagagtatttcttcaagaccagaatccagacagggaaagtgcccttaagaaaaaacacatgatatccatgcatcctatcatcagaaaagacacatccaccagtatgacaatggagaactctctcattctggaggatccttttgaatataatgattcgggagaagattgcactcacagttccacaataactcagtgtttgttaactcacagtggaaagaaaccctgtgtcagcaaacagtgtggaaaatcccttcgtaatcttttgtcccctaaaccacgtaaacaaattcatactaaaggtaaatcatatcaatgtaatctatgtgaaaaggcctatactaattgcttttaccttagacggcacaagatgactcacactggagagaggccatatgcatgtcatctatgtggaaaagccttcactcagtgttctcaccttagaagacatgagaaaactcacacgggagagagaccatataagtgtcatcaatgtgggaaagcctttattcaatcctttaaccttcgaagacatgagagaactcaccttggacaaaagtgttatgaatgtgataaaagtgggaaagcctttagtcaaagctctggctttagaggaaacaaaataattcacattggagagaaaccacctgcttgtcttctatgtgggaaggccttcagtctgtcctccgaccttagatgacatgagagaacacgcactggag

SEQ ID NO: 203557 - DNA, 3377 bp, Homo sapiens
  Payload ID: 20142
  Gene Name: zinc finger protein 705D
  Uniprot ID: P0CH99
  ENST ID: ENST00000400085
  CDS Start-End: 117-1019
attttctcaagcaatttttaaatttcattcttttaccctattgagcttttcttagtgcctaaagtgtctgcaagtggaaatccagaggaagacagagagaaactgagttcctgacaatgcattcactagagaaagtgacttttgaagatgtagctattgacttcacccaggaagagtgggacatgatggacacatccaagagaaagctgtacagagatgtgatgctggaaaatatcagtcacctggtgtccctcgggtaccagataagcaaatcctatataattttgcagctggagcaaggaaaagagctgtggcgggaaggaagagtatttcttcaagaccagaatccagacagggaaagtgcccttaagaaaaaacacatgatatccatgcatcctatcatcagaaaagacgcatccaccagtatgacaatggagaactctctcattctggaggatccttttgaatataatgattcgggagaagattgcactcacagttccacaataactcagtgtttgttaactcacagtggaaagaaaccctgtgtcagcaaacagtgtggaaaatcccttcgtaatcttttgtcccctaaaccacgtaaacaaattcatactaaaggtaaatcatatcaatgtaatctatgtgaaaaggcctatactaattgcttttaccttagacggcacaagatgactcacactggagagaggccatatgcatgtcatctatgtggaaaagccttcactcagtgttctcaccttagaagacatgagaaaactcacacgggagagagaccatataagtgtcatcaatgtgggaaagcctttattcaatcctttaaccttcgaagacatgagagaactcaccttggacaaaagtgttatgaatgtgataaaagtgggaaagcctttagtcaaagctctggctttagaggaaacaaaataattcacattggagagaaaccacatgcttgtcttctatgtgggaaggccttcagtctgtcctccgaccttagatgacatgagagaacacgcactggagaaaagccatatgaatgccatttatgtgggaaagccttcagtcaatgtactaatcttaaaaagcatcagaaaattcaccctggagagaaaattataaacttcttcagaacatattctgactttagatgacacagtgttaggaatgacgaaggtaaggaatgtggaagagacttcagctgtagttgtagcatctaaacatgccaaaggactcacattttgaagaaatactgtaatcaacatggaagatacttcagttgcctttattcttcagcccacatcaataaattcatatggaagagaaattgtatgacatgtatgtaccaaagacttgttagtgatctgagcataaatgacatgagagagctgaaactgtcagcataatcaactaaaagtcttcagcaacagctttaacttaaaacatgtgggactttcaggtagagaatctctaactctgcattcagtgtgaaaatgtttttatttgcaatttattgtcaaataacatgagaaaactttacttggatgaaccctttatttgtatttttctgtgaatgaacattcagccaagcaccaggcttgatgttcacaagagaagagtgacaaaatgctgctaaaatggaaaataagagaggaaagccttcataagctaaataacaagggaaagtctttccaagggcaatgaattctcttggaataccaaatacttcttactggagaagttatgcaatgaaaaatcatgagaaatcctttcttcatagagcaacacatgtggcacatgtgagatttcacactggacaaaacagggttagcatcttgaaagaagaaaattctttagtggtaattcatttcttagttgacattaagtttctcacgttgaggagctatcaaacttgaaaatcactgtggagaaacctgatagatttctcatcagaaaagtgagtcaagaaggtggacctctagaaaaaactcttaacacatactttagcaaaataattcagaaatttgagaaaatatctattcataaaaatgtggcatgtaaatgcataatagcaaagtgaccaaggaataaattgaatgcagaattatataagaaatctcattaaacttttccaaaagaccaatacttacaaatattgaaagaatacaatctgttgttgaaaaaacttagtatgttggtgaagcccttgtttcatttatgcagccctaacaaactgatttgcatctgaactccttgggtgagattcttggtggagattctaccccaacttctgagtctccccagtcttcaacagctctttcctcacagctcacctccctttacttcaacgtccaccaaaaccacttgtttccatccaaccctcgagttgacacaccagggatcttcagccccacttgctagatttctcagtttgtcattgcatagatttagcagggaaatggaggctgtatcaaagacccctagtatatgcatttgggtgtccccagctcttgcctctgtctctgagcagttacctgggatcagagaataaggcagctcttctcttctatccctcagaaggctcttgaaattttgtccctggagcctctctaactggaagtagcagttcatctcatgacaccccacattttattcaggtgagtcctgagttattacacagagacagacacagctgtgctccttttactgcagtccagaagataaaacaccagcatgataaaacagccgaacctgtcagccaccttgcaagccttttctatatttgattcaatgtacttttcccgaagcaaaatgaaagttctcacagaggggccctcctctgccttgtcctcagaattggaaaatgtattgtccgtgaaggagcctcaccactgaacctaaaactcaagagaaaatgtttcctgaatatcaagtgggatgacttgaaattttgtcaaacaggcagaatcttaatacgatcggccttactaaggctaaatggccttatccatggttgaaattgacacatcatcatattaaaaaatctccacgagtgattgattttactctgcagccagggtttatgtcaagtgtgaggataatgagcaagaaattcaagcccttggcaaactggttggagaggcaaggactgtgtccaggcagagctcatatcattatttattgtttaatctatttaattaaatatgtaatttacccacaaactgtggctgacattatatgtactcctgagccacattaagatgtactatttgtgctgtgaaattctatgggatttgacaaatgcatggtggcagatctccagcgattattaaagcgtaacacagaatgcttctcttattcaa

SEQ ID NO: 203558 - DNA, 925 bp, Homo sapiens
  Payload ID: 20142
  Gene Name: zinc finger protein 705D
  Uniprot ID: P0CH99
  ENST ID: ENST00000400078
  CDS Start-End: 23-925
gagagaaactgagttcctgacaatgcattcactagagaaagtgacttttgaagatgtagctattgacttcacccaggaagagtgggacatgatggacacatccaagagaaagctgtacagagatgtgatgctggaaaatatcagtcacctggtgtccctcgggtaccagataagcaaatcctatataattttgcagctggagcaaggaaaagagctgtggcgggaaggaagagtatttcttcaagaccagaatccagacagggaaagtgcccttaagaaaaaacacatgatatccatgcatcctatcatcagaaaagacgcatccaccagtatgacaatggagaactctctcattctggaggatccttttgaatataatgattcgggagaagattgcactcacagttccacaataactcagtgtttgttaactcacagtggaaagaaaccctgtgtcagcaaacagtgtggaaaatcccttcgtaatcttttgtcccctaaaccacgtaaacaaattcatactaaaggtaaatcatatcaatgtaatctatgtgaaaaggcctatactaattgcttttaccttagacggcacaagatgactcacactggagagaggccatatgcatgtcatctatgtggaaaagccttcactcagtgttctcaccttagaagacatgagaaaactcacacgggagagagaccatataagtgtcatcaatgtgggaaagcctttattcaatcctttaaccttcgaagacatgagagaactcaccttggacaaaagtgttatgaatgtgataaaagtgggaaagcctttagtcaaagctctggctttagaggaaacaaaataattcacattggagagaaaccacatgcttgtcttctatgtgggaaggccttcagtctgtcctccgaccttagatga

SEQ ID NO: 203559 - DNA, 3644 bp, Homo sapiens
  Payload ID: 20143
  Gene Name: zinc finger protein 705G
  Uniprot ID: A8MUZ8
  ENST ID: ENST00000400156
  CDS Start-End: 283-1185
gtccttgtcccaagggacatacagcacacagcctgtggagggtggaggaaccaactgcaagatcacttgtcctcctcaattgatgtacactgaagaaagagccaccttcaggctgtaaggtcatcgtataatcctgaccactcatttcccatcatgacactgctgttccttctctttctccttcttggatgtctgatacaaacagcctcagcttttcttagtgcctaaagtgtctgcaagtggaaatccagaggaagacagagagaaactgagttcctgacaatgcattcactaaagaaactgacttttgaagatgtagctattgacttcacccaggaagagtgggccatgatggacacatccaagagaaagctgtacagagatgtgatgctggaaaatatcagtcacctggtgtccctcgggtaccagataagcaaatcctatataattttgcagctggagcaaggaaaagagctgtggagggaaggaagagtatttcttcaagaccagaatccaaacagggaaagtgcccttaagaaaacacacatgatatccatgcatcctatcaccagaaaagacgcatccaccagtatgacaatggagaactctctcattctggaggatccttttgaatgtaatgattcgggagaagattgcactcgcagttccacaataactcagtgtttgttaactcatagtggaaagaaaccctatgtcagcaaacagtgtggaaaatcccttcgtaatcttttgtccactgaaccacataaacaaattcatactaaaggtaaatcatatcagtgtaatctatgtgaaaaggcctatactaattgctttcaccttagacggcacaagatgactcacactggagagaggccatatgcatgtcatctatgtagaaaagccttcactcagtgttctcaccttagaagacacgagaaaactcacacgggacagagaccatataagtgtcatcaatatgggaaagtctttattcaatcctttaaccttcaaagacatgagagaactcaccttggaaaaaagtgttatgaatgtgataaaagtgggaaagcctttagtcaaagctctggctttagaggaaacaaaataattcacactggagagaaaccacatgcttgtcttctatgtgggaaggccttcagtctgtcttccaaccttagatgacatgagagaacacgcactggagaaaagccatatgaatgccatttatgtgggaaagccttcagacaatgtactaatcttaaagagcatcagaaaattcaccctggagagaaaattataaacttcttcagaacatattctgactttagatgacacggtgttaggaatgacaaaggtaaggaatgtggaagagacttcagctgtagttgtagcatctaaacatgccaaaggactcacattttgaagaaatactgtaatcaacatggaagatacttcagttacctttattcttcagtccacatcaataaattcatatggaagagaaattgtatgacatgtatgtaccaaagacttgttagtgatctgagcataagtgacatgagagagctgaaactgtcaatataatcaactaaaagtcttcagcaacagctataacttaaaacatgtgggactttcaggtagagaatctctaactctgcattcagtgtgaaaatgtttttatttgcaatttattgtcaaataacatgagaaaactttacttggatgaaccctttatttgtattttctgtgaatgaacattcagccaagcaccaggcttgatgttcacaagagaagagtgacaaaatgctgctaaaatggaaaataagagaggaaagccttcatgagctaaataagaagggaaaatctttccaagggcaatgaattctcttggaataccaaatacttcttactggagaagttatgcaatgaaaaatcatgagaaatcctttcttcatagagcaacacatgtggcacatgtgagatttctcactggacaaaacatggttagcatcttgaaaggagaaaattctttagtggtaattcatttcttagttgacattgagtttctcacattgaggagctatcaaacttgaaaatcactgtggagaaacctgatagatttctcatcagaaaagtgagtcaagaagttggacccctagaaaaaactcttaacacatactttagcaaaataattcagaaatttgagaaaatatctattcataaaaatgtggcatgtaaatgcataatagcaaagtgaccagggaataaattgcgtgcagaattatataagaaatctcattaaacttttccaaaagatcaatacttacaaatattgaaagaatacaatctgttgttgaaaaaacttagtatgttggcaaagcccttgtttcatttatgcggccctaacaaatggatttgcacctgcactccttgggtgagattcttggtcgagattctaccccaacttctgagtctccccagtcttcaacagctctttcctcacagctcacctccctttacttcaacgtccactaaaaccacttgtttccatccaaccctcgagttgacacaccagggatcttcagccccacttgctagatttctcagtgtgtcattgcatagatttagcagggaaatggaggctgtatcaaagacaccttgtatatgcatttgggtgtccgcagccctttcctctgtctctaggcagttaactgggatcagagaataaggcagctcttctcttctatccctcagaagactcttgaaattttgtccctggagcctctctaactggaagtagcagttcatctcataacaccccacattttattctggtaagtcctgagttattacacagagacagacacagctgtgctccttttactgcagtccagaagataaaacaccagcatgataaaacagccgaacctgtcagccaccttgcaagcctttcctatatttgattcaatgtacttttcctgaagcaaaatgaaagttctcacagaggggccctcctctgccttgtcctcagaattgaaaaatgtattgtccgtgaaggagcctcaccactgaacctaaaactgaagagaaaatgtttcctgaatattaagtgggatgacttgaaattttgccaaacaggcacaatcttaatacgatcggccttactaaggctaaatggccttatccatggttgaagttgacacatcattatattttaaaatctctacaagtgattgattttactctgcagccagggtttatgtcaagtgtgaggataatgagcaagaaattcaagcccttggcaaactggttggagaggcaaggactgtgtccaggcagagctcatatcattatttattgtttaatctatttaattaaatatgtaatttacccacaaactgtgactgacattatatgtactcctgaaccacattaagatgtactatttgtgctgtgaaattctatgggatttgacaaatgcatggtggcagatctccagccattattaaagcgtaacacagaatgcttctcttattcaagctcgtcttccctccacatagagggaatcaatcggcttttgtatactgatttttgaatttgcttctttatttccatcttctttaattaaagcacaaggtatc

SEQ ID NO: 203560 - DNA, 3647 bp, Homo sapiens
  Payload ID: 20143
  Gene Name: zinc finger protein 705G
  ENST ID: ENST00000612855
  CDS Start-End: 283-1185
gtccttgtcccaagggacatacagcacacagcctgtggagggtggaggaaccaactgcaagatcacttgtcctcctcaattgatgtacactgaagaaagagctaccttcaggctgtaaggtcatcgtataatcctgaccactcatttcccatcatgacactgctgttccttctctttctccttcttggatgtctgatacaaacagcctcagcttttcttagtgcctaaagtgtctgcaagtggaaatccagaggaagacagagagaaactgagttcctgacaatgcattcactagagaaagtgacttttgaagatgtagctattgacttcacccaggaagagtgggacatgatggacacatccaaaagaaagctgtacagagatgtgatgctggaaaatatcagtcacctggtgtccctcgggtaccagataagcaaatcctatataattttgcagctggagcaaggaaaagagctgtggtgggaaggaagagtatttcttcaagaccagaatccagacagggaaagtgcccttaagaaaaaacacatgatatccatgcatcctatcatcagaaaagacacatccaccagtatgacaatggagaactctctcattctggaggatccttttgaatataatgattcgggagaagattgcactcacagttccacaataactcagtgtttgttaactcacagtggaaagaaaccctgtgtcagcaaacagtgtggaaaatcccttcgtaatcttttgtcccctaaaccacgtaaacaaattcatactaaaggtaaatcatatcaatgtaatctatgtgaaaaggcctatactaattgcttttaccttagacggcacaagatgactcacactggagagaggccatatgcatgtcatctatgtggaaaagccttcactcagtgttctcaccttagaagacatgagaaaactcacacgggagagagaccatataagtgtcatcaatgtgggaaagcctttattcaatcctttaaccttcgaagacatgagagaactcaccttggacaaaagtgttatgaatgtgataaaagtgggaaagcctttagtcaaagctctggctttagaggaaacaaaataattcacattggagagaaaccacatgcttgtcttctatgtgggaaggccttcagtctgtcttccgaccttagatgacatgagagaacacgcactggagaaaagccatatgaatgccatttatgtgggaaagccttcagtcaatgtactaatcttaaaaagcatcagaaaattcaccctggagagaaaattataaacttcttcagaacatattctgactttagatgacacagtgttaggaatgacgaaggtaaggaatgtggaagagacttcagctgtagttgtagcatctaaacatgccaaaggactcacattttgaagaattactgtaatcaacatggaagatacttcagttgcctttattcttcagcccacatcaataaattcatatggaagagaaattgtatgacatgtatgtaccaaagacttgttagtgatctgagcataaatgacatgagagagctgaaactgtcagcataatcaactaaaagtcttcagcaacagctttaacttaaaacatgtgggactttcaggtagagaatctctaactctgcattcagtgtgaaaatgtttttatttgcaatttattgtcaaataacatgagaaaactttacttggatgaaccctttatttgtatttttctgtgaatgaacattcagccaagcaccaggcttgatgttcacaagagaagagtgacaaaatgctgctaaaatggaaaataagagaggaaagccttcataagctaaataacaagggaaagtctttccaagggcaatgaattctcttggaataccaaatacttcttactggagaagttatgcaatgaaaaatcatgagaaatcctttcttcatagagcaacacatgtggcacatgtgagatttcacactggacaaaacagggttagcatcttgaaagaagaaaattctttagtggtaattcatttcttagttgacattaagtttctcacgttgaggagctatcaaacttgaaaatcactgtggagaaacctgatagatttctcatcagaaaagtgagtcaagaaggtggacctctagaaaaaactcttaacacatactttagcaaaataattcagaaatttgagaaaatatctattcataaaaatgtggcatgtaaatgcataatagcaaagtgaccaaggaataaattgaatgcagaattatataagaaatctcattaaacttttccaaaagagcaatacttacaaatattgaaagaatacaatctgttgttgaaaaaacttagtatgttggtgaagcccttgtttcatttatgcagccctaacaaactgatttgcatctgaactccttgggtgagattcttggtggagattctaccccaacttctgagtctccccagtcttcaacagctctttcctcacagctcacctccctttacttcaacgtccaccaaaaccacttgtttccatccaaccctcgagttgacacaccagggatcttcagccccacttgctagatttctcagtttgtcattgcatagatttagcagggaaatggaggctgtatcaaagacccctagtatatgcatttgggtgtccccagctcttgcctctgtctctgagcagttacctgggatcagagaataaggcagctcttctcttctatccctcagaaggctcttgaaattttgtccctggagcctctctaactggaagtagcagttcatctcatgacaccccacattttattcaggtgagtcctgagttattacacagagacagacacagctgtgctccttttactgcagtccagaagataaaacaccagcatgataaaacagccgaacctgtcagccaccttgcaagccttttctatatttgattcaatgtacttttcccgaagcaaaatgaaagttctcacagaggggccctcctctgccttgtcctcagaattggaaaatgtattgtccgtgaaggagcctcaccactgaacctaaaactcaagagaaaatgtttcctgaatatcaagtgggatgacttgaaattttgtcaaacaggcagaatcttaatacgatcggccttactaaggctaaatggccttatccatggttgaaattgacacatcatcatattaaaaaatctccacgagtgattgattttactctgcagccagggtttatgtcaagtgtgaggataatgagcaagaaattcaagcccttggcaaactggttggagaggcaaggactgtgtccaggcagagctcatatcattatttattgtttaatctatttaattaaatatgtaatttacccacaaactgtggctgacattatatgtactcctgagccacattaagatgtactatttgtgctgtgaaattctatgggatttgacaaatgcatggtggcagatctccagccattattaaagcgtaacacagaatgcttctcttattcaagctcgtcttccctccacatagagggaatcaatcgacttttgtatactgatttttgaatttgcttctttatttccatcttctttaattaaagcacaagatatcgt

SEQ ID NO: 203561 - DNA, 2615 bp, Homo sapiens
  Payload ID: 20144
  Gene Name: zinc finger protein 706
  Uniprot ID: Q9Y5V0
  ENST ID: ENST00000311212
  CDS Start-End: 185-415
gggcgcgcggcggcggcgggcgtgcgaggctgttgtgctcccggctctcgtgtttcccctcctgagcgggtggaggaggcccaagcggtgctgggcgcgctcccccttcctttccctccggcgtcctctcccggccctctcgcgctgcactgtctctccgacgcaagactgtcccggcccggatatggctcgtggacagcagaaaattcagtctcagcagaaaaatgccaaaaagcaagctggacaaaagaagaaacaaggacatgaccaaaaggctgctgccaaagctgccttaatatatacctgcactgtctgtaggacacaaatgccagaccctaagaccttcaagcagcactttgagagcaagcatcctaagactccacttcctccagaattagctgatgttcaggcataaggttgtttacaggtgaattcatgacacctttgactcttctactgtctcagaccttaggtaacatacctgcagctgcttttctaacaaactgttgatcagcaaaaataaaggggctacagaaacactcatttttatgctgttccctcttgggcttcatgcaaagacaattctgtgtaaatgtacagttgactctgatttggaaatatgaaaatcagtccatccttgttataaaaaatttttttacaattgtaattatattgatgttcatattgtgtaaaataactcatttaataaaatagtactttgatttacgacatcacaggataaatggttttagaaattctgttctaactttccacattatttgccttataaaaatctaatgaattcatcagctagaattgcaagtgcaattcttatatccctttctctgctcagtggcaggttcctcagttaaactagagcagactgattcattaaaattgtgcatacgattttatgggcagctgatgatctaggtgaaaaatgacttatctgctgccttagtatattgcggttatgtgtcattgtacccctctgatcatttcctgtgtttgagttggaatatttaaaattgcagtatgacctggctctaactgccagtcaggtgtaccctgtagataactgatagcttcctaaaagcggttggattgtcagtgagcccttgtgaaaggttaggttctaatgtatatgccgtaatgaaataatcattaagcctattgtttaatgcaaaatatggaacaaatgtgaactggtaaaggtcgatcttgatactatattctttgaaaattcttgaagttctttaatttgaaattgaaacattaatttttgaggtttttggaagttactatttggccatttttacaaatggattttgcattaacaggaagattggaatgacttgtggctggattaattcccagaaccctctccctcctttcttttctaagtgagttgttgattttaggagtttgctttgtgctgttacctaaaatcagagactggtgtacagtatgacttccatctgaacttgaaaagtattaaaatgggtcaatattcacattcttttagatctcaggatgggaaaatgggtttgttcagatggatatggtaaatcttacccaattaaggaaggctaattttagagttcttctaatttgcttgtgtcaactcttaacttgtaaaactgctgttaactcggtttaaatttttaaattaatataatagaaagaacactaaaatacttactggtaactgcttagagccatttatctgatcctgtggattacagaatgcattccctcttctgctgtagcttatcattgctttgttttgtagctctgcatattttgcccaccttgtcttccctgtaagtttaagacgtttccaaggaaaagcttcagggctgatagtttcttagcaattcctattcttatgcccttactttaaaatagtccttttattttgtgtattttatttcctaagtttcagatgtaatatctgttgtttcctaacatgtcgattaccagaacgttagaattttacctaatttcttgtggatattgcagaagttctggttaaatcacaacttaaaagtttttaaaagtgctttgagcatatgtatatgtttagtgacaaatcatataaaaccattcacaagttttggttttttttttttcgtttgttttagtgactaattcaggatgaaagtttttttgttcttgtatttaacccttttttataagcagctgaagacaccatatttaacactatatctcagtgatagggaaatagctgcattgatcttacatgagcataatcatccttatacttcatgaggggattattagtacaatccccattttactgtgtttgagttaaaaaccaaacatccctgtaatttaatttgaagattctttaacagattgcagcaaagttcattataaaactgttatggtgtcttcaaagacttgataaaataacactgagagagaattggtccatttgtatgctgtatttctattacttgccaaaaggaatggggttaagattaaacttgtttccattctcttcacatggatattcatccccatgtttaactgacacactgggggctcagttgtgtgctgtaatgtcttattaaagaagatattaaagaaaa

SEQ ID NO: 203562 - DNA, 782 bp, Homo sapiens
  Payload ID: 20144
  Gene Name: zinc finger protein 706
  Uniprot ID: Q9Y5V0
  ENST ID: ENST00000520984
  CDS Start-End: 30-260
ctccgacgcaagactgtcccggcccggatatggctcgtggacagcagaaaattcagtctcagcagaaaaatgccaaaaagcaagctggacaaaagaagaaacaaggacatgaccaaaaggctgctgccaaagctgccttaatatatacctgcactgtctgtaggacacaaatgccagaccctaagaccttcaagcagcactttgagagcaagcatcctaagactccacttcctccagaattagctgatgttcaggcataaggttgtttacagggtttcccaaactctcgattgcctcttgcaagcagatgacctgggagcaaatgttatggcagaacgatggactcctagcaagggccgaagcgtgccctgtgaagactggaaagaatatatgcttgtcagagatttggtaacctcatcaagaccttaaactgcagtttaagagggtggaaaaattactcaagtgaaactataagccctgttattcgtaagaaaacgtatgacacagagcaattggagaatctcttaatttgcatgcaaaaataacaggaggaaaaagtaaggaatgttatatctgatttcaagtgtgaatatgaagcaaaggaacttgagatgttaacacctgaaagaaatcaagatttcctagatacccctgaaacacagggctcaggactagaatatggaagccctgagagaacagatagcagaggagcattatatgtccaaaatgtctgaaagtgcacagaaagccagaagcctgcacgaagaggtgggatggagaat

SEQ ID NO: 203563 - DNA, 488 bp, Homo sapiens
  Payload ID: 20144
  Gene Name: zinc finger protein 706
  ENST ID: ENST00000519103
  CDS Start-End: 1-156
caaaaggctgctgccaaagctgccttaatatatacctgcactgtctgtaggctctcttttgcacaattttttgttagacacaaatgccagaccctaagaccttcaagcagcactttgagagcaagcatcctaagactccacttcctccagaattagctgatgttcaggcataaggttgtttacaggtgaattcatgacacctttgactcttctactgtctcagaccttaggtaacatacctgcagctgcttttctaacaaactgttgatcagcaaaaataaaggggctacagaaacactcatttttatgctgttccctcttgggcttcatgcaaagacaattctgtgtaaatgtacagttgactctgatttggaaatatgaaaatcagtccatccttgttataaaaaatttttttacaattgtaattatattgatgttcatattgtgtaaaataactcatttaataaaatagtactttgatttacgac

SEQ ID NO: 203564 - DNA, 604 bp, Homo sapiens
  Payload ID: 20144
  Gene Name: zinc finger protein 706
  Uniprot ID: Q9Y5V0
  ENST ID: ENST00000517844
  CDS Start-End: 55-285
ctttgcagccccctcggaaaaccacactgagagttgcattaaaaaccagcatatatggctcgtggacagcagaaaattcagtctcagcagaaaaatgccaaaaagcaagctggacaaaagaagaaacaaggacatgaccaaaaggctgctgccaaagctgccttaatatatacctgcactgtctgtaggacacaaatgccagaccctaagaccttcaagcagcactttgagagcaagcatcctaagactccacttcctccagaattagctgatgttcaggcataaggttgtttacaggtgaattcatgacacctttgactcttctactgtctcagaccttaggtaacatacctgcagctgcttttctaacaaactgttgatcagcaaaaataaaggggctacagaaacactcatttttatgctgttccctcttgggcttcatgcaaagacaattctgtgtaaatgtacagttgactctgatttggaaatatgaaaatcagtccatccttgttataaaaaatttttttacaattgtaattatattgatgttcatattgtgtaaaataactcatttaataaaatagtactttgatttacgacatca

SEQ ID NO: 203565 - DNA, 501 bp, Homo sapiens
  Payload ID: 20144
  Gene Name: zinc finger protein 706
  Uniprot ID: Q9Y5V0
  ENST ID: ENST00000518336
  CDS Start-End: 214-444
agcctgggaggagcgggaaaagggtcgcagcgcctgaggcccggccgccgcccgagtggatgagcgagcgagcgacttgtgaaacacgccgcggcccggtcaccaaccaggaccgggatcacgtggctcccagggctgggtgaagaagccgcccggaccgagcgcgccggagaggaggggcgcctggggacagaaggcgacgtcccctgaaatatggctcgtggacagcagaaaattcagtctcagcagaaaaatgccaaaaagcaagctggacaaaagaagaaacaaggacatgaccaaaaggctgctgccaaagctgccttaatatatacctgcactgtctgtaggacacaaatgccagaccctaagaccttcaagcagcactttgagagcaagcatcctaagactccacttcctccagaattagctgatgttcaggcataaggttgtttacaggtgaattcatgacacctttgactcttctactgtctcagaccttag

SEQ ID NO: 203566 - DNA, 959 bp, Homo sapiens
  Payload ID: 20144
  Gene Name: zinc finger protein 706
  Uniprot ID: Q9Y5V0
  ENST ID: ENST00000519882
  CDS Start-End: 416-646
cagaaaggcacatgggcggggctgcgaggagcaggcggggcgggggcgccgaggagagcggcgcggcgtgcgcgggcacgaggcgtagtggtctcccctaaggctgaggcggcggcgggcgcgcggcggcggcgggcgtgcgaggctgttgtgctcccggctctcgtgtttcccctcctgagcgggtggaggaggcccaagcggtgctgggcgcgctcccccttcctttccctccggcgtcctctcccggccctctcgcgctgcactgtctctccgacgcaagactgtcccggcccggagtctcactgtcgcccaggctgcagtgcagtggtgccatcacgcgtcactgcaacctctgcctcccggattcaagcaattctccacctcagcctcccaagtagctggaattacagatatggctcgtggacagcagaaaattcagtctcagcagaaaaatgccaaaaagcaagctggacaaaagaagaaacaaggacatgaccaaaaggctgctgccaaagctgccttaatatatacctgcactgtctgtaggacacaaatgccagaccctaagaccttcaagcagcactttgagagcaagcatcctaagactccacttcctccagaattagctgatgttcaggcataaggttgtttacaggtgaattcatgacacctttgactcttctactgtctcagaccttaggtaacatacctgcagctgcttttctaacaaactgttgatcagcaaaaataaaggggctacagaaacactcatttttatgctgttccctcttgggcttcatgcaaagacaattctgtgtaaatgtacagttgactctgatttggaaatatgaaaatcagtccatccttgttataaaaaatttttttacaattgtaattatattgatgttcatattgtgtaaaataactcatttaataaaatagtactttgatttacg

SEQ ID NO: 203567 - DNA, 493 bp, Homo sapiens
  Payload ID: 20144
  Gene Name: zinc finger protein 706
  ENST ID: ENST00000523922
  CDS Start-End: 367-493
gaggggtcgcggggggcggcagggcccggcccggggcgggccgcgggaaggggatgagttcgggcgcctgccaggccctgcaggtggccgggtcgcaggccagccgcggaagcggagcggagctttggggcagagcttacttgttgcctcctacgagagcgcctcattttagaactcgtttcttccactacttccctctttgcagccccctcggaaaaccacactgagagttgcattaaaaaccagcatagtctcactgtcgcccaggctgcagtgcagtggtgccatcacgcgtcactgcaacctctgcctcccggattcaagcaattctccacctcagcctcccaagtagctggaattacagatatggctcgtggacagcagaaaattcagtctcagcagaaaaatgccaaaaagcaagctggacaaaagaagaaacaaggacatgaccaaaaggctgctgccaaagctgccttaatatatacctgcactg

SEQ ID NO: 203568 - DNA, 785 bp, Homo sapiens
  Payload ID: 20144
  Gene Name: zinc finger protein 706
  ENST ID: ENST00000519744
  CDS Start-End: 137-283
cgtgtttcccctcctgagcgggtggaggaggcccaagcggtgctgggcgcgctcccccttcctttccctccggcgtcctctcccggccctctcgcgctgcactgtctctccgacgcaagactgtcccggcccggatatggctcgtggacagcagaaaattcagtctcagcagaaaaatgccaaaaagcaagctggacaaaagaagaaacaaggacatgaccaaaaggctgctgccaaagctgccttaatatatacctgcactgtctgtagggtgaattcatgacacctttgactcttctactgtctcagaccttaggtaacatacctgcagctgcttttctaacaaactgttgatcagcaaaaataaaggggctacagaaacactcatttttatgctgttccctcttgggcttcatgcaaagacaattctgtgtaaatgtacagttgactctgatttggaaatatgaaaatcagtccatccttgttataaaaaatttttttacaattgtaattatattgatgttcatattgtgtaaaataactcatttaataaaatagtactttgatttacgacatcacaggataaatggttttagaaattctgttctaactttccacattatttgccttataaaaatctaatgaattcatcagctagaattgcaagtgcaattcttatatccctttctctgctcagtggcaggttcctcagttaaactagagcagactgattcattaaaattgtgcatacgattttatgggcagctgatgatctaggtgaaaaa

SEQ ID NO: 203569 - DNA, 488 bp, Homo sapiens
  Payload ID: 20144
  Gene Name: zinc finger protein 706
  ENST ID: ENST00000520454
  CDS Start-End: 463-488
gggccggggccgcggtgtcctgggtggcggggctccgggaatgtgactcagccaccgcggccccgcgatccgctcccgggccagcgcctcagtcggtgccgaggagggcggcgccgagacgggcgcgtcagcctgggaggagcgggaaaagggtcgcagcgcctgaggcccggccgccgcccgagtggatgagcgagcgagcgacttgtgaaacacgccgcggcccggtcaccaaccaggaccgggatcacgtggctcccagggctgggtgaagaagccgcccggaccgagcgcgccggagaggaggggcgcctggggacagaaggcgacgtcccctgaaaccagagtctcactgtcgcccaggctgcagtgcagtggtgccatcacgcgtcactgcaacctctgcctcccggattcaagcaattctccacctcagcctcccaagtagctggaattacagatatggctcgtggacagcagaaaattca

SEQ ID NO: 203570 - DNA, 732 bp, Homo sapiens
  Payload ID: 20144
  Gene Name: zinc finger protein 706
  Uniprot ID: Q9Y5V0
  ENST ID: ENST00000521272
  CDS Start-End: 410-640
gaggagagcggcgcggcgtgcgcgggcacgaggcgtagtggtctcccctaaggctgaggcggcggcgggcgcgcggcggcggcgggcgtgcgaggctgttgtgctcccggctctcgtgtttcccctcctgagcgggtggaggaggcccaagcggtgctgggcgcgctcccccttcctttccctccggcgtcctctcccggccctctcgcgctgcactgtctctccgacgcaagactgtcccggcccggccccctcggaaaaccacactgagagttgcattaaaaaccagcatagtctcactgtcgcccaggctgcagtgcagtggtgccatcacgcgtcactgcaacctctgcctcccggattcaagcaattctccacctcagcctcccaagtagctggaattacagatatggctcgtggacagcagaaaattcagtctcagcagaaaaatgccaaaaagcaagctggacaaaagaagaaacaaggacatgaccaaaaggctgctgccaaagctgccttaatatatacctgcactgtctgtaggacacaaatgccagaccctaagaccttcaagcagcactttgagagcaagcatcctaagactccacttcctccagaattagctgatgttcaggcataaggttgtttacaggtgaattcatgacacctttgactcttctactgtctcagaccttaggtaacatacctgcagctgcttttctaacaaactgt

SEQ ID NO: 203571 - DNA, 3502 bp, Homo sapiens
  Payload ID: 20144
  Gene Name: zinc finger protein 706
  Uniprot ID: Q9Y5V0
  ENST ID: ENST00000520347
  CDS Start-End: 2958-3188
gcgggaaggggatgagttcgggcgcctgccaggccctgcaggtggccgggtcgcaggccagccgcggaagcggagcggtaaccttacccccggcgacagccgccggtcagctgccagagtgtggcgctcccggtggacgcaggggccgggtttcgggcagtctcggcctccaggaggcgcgtcttggtccagggtccgtgaggactggctagatgggggctgcgtggcctttggtggcagggaggaggagggggtctccgaggcgggagaggcgggtttgggaaggaaggtgcgccaggctgaagctggggtcggagaagtgttgggtggagacctcactgtgggtgcgttcctcctctcctctccccaaaacgatggtgttaaaagctagggtcaggatgtggagcgctgcctgggcctcttcctttccgatggttatggagaatgagcctacttcctggacccaaaatccttttcttctgttactcatttatgttggttttaaaaggagctttggggcagagcttacttgttgcctcctacgagagcgcctcattttagaactcgtttcttccactacttccctctttgcagccccctcggaaaaccacactgagagttgcattaaaaaccagcatgtaggtatttgtaagtgactttttccctccagtttgtcgcatttaatcaaggagcggttgtagctgcctacgattttgtagaaaattgtgttggcttgagagcaagtcctaagttgagctgtccaaaagcaggtggttggttcgtttgaatttctgctttcagaaaggaaatcgatggggcgtgttgtcagaagttaggggcctacctcatgcatttagcttattttattccatttcctttacctggtgttaagttttctgtcttcagaataagaacaagtgactactgtctttattaagtctcttcggtctttttggttgctgtttggtgacaatggaaaatgggttgaatctattgtgtaatgttatattttagggaaagtcctaagtgcaaaagttaaaaataattttgtgtgtctaatgacattgctttgtacgagtcacaacatggaaatatcaaaatagctagtaacttctagaaagcaaaggaacttctgaaattagtggcttaccatttttgaagattttttttaacataaaacaagatttcccacaaaatcagtgtattaagatacataaaatacattgtgtcgaagagttaagatgtgtgagaagactggctattttgttacaaggtcctgatagtaagacattgagacaaaaaaccttgcaaaacattggtatacataaaggctgatcacgtgactactgtcgtccaaataatacataagtatccaaacctgtttccatgggaataggtttgtaagcttgcggtaacatcggacttaaatacacttttaaaaaaaatgtgccatttggcttagaattaataattttttttaaagcaaaaatggaagcttagtcttcaaggactgataacagctggtaatatttaccattgtttggtgggaatggggttctcatattaggctagcacgctaaacattttcaattacgaaaatgtattaggctcgtgtgctaccctaatataaaaaccccatatttcctcagttgaaatagtcagctgactatcctgaaaagcattgaccctcttttatattttatctgactttcagttcatttttttaatgctagtgggaacttctccaatcagtgtatttttttagtttccttttttggggaacaggaggagctcagtaatttttatgaaatgctttgacctcatatccattaactaattatggtcctagtcagaagaagctagcacccttccctggtgaagttgatacaaatccattgtatgttcctgtcctgcaatgatttacattcagttacagtactagtcaaaactatatatatatgaattctacttaggatccaattttgatatatttaaaaagcaattgagactcatgatagactttatgagcaggtttaacttgtgtggtcgaataaaagcctttaatttaaatggaaaagtaaaagtaacttttttcagtgacttgatttttttttttgttttaatccatttgggttcacgtcagatcatcggtaacaaaaagtggtatctttcagctttgtaaaagaaccctcttaaccaagttcattccctcaaatgggaactaacgtctagagagcaaagaaacttctggaattagtggcttgctgataatctcattttataatttgttcagcaatccagcaagaccaactttttaaaaaaattaataacagtagttttatgaaaactaagtaagaaaacagtttccacctatttctgaggtctcctttagaaggagtaacagacagcttttatttctcttaaagttataaaaatcacaatcgcaagtcacaatgaatactgggaagggaaattacttttgcagagtgatcaagtaaatgatagcgggggctaaacttttttagtaaacttgtgaagattacatacagtaaagtgcataaatcttgagtgtacaattcaatgaatttttataagtaaacacacttgattcaagaacattttcaggaccccataagtccccttcatgtcctgtcttcccagtcattacccataacccccaaggtgacccctttcactatagattagctttgcctgttttgaactttaaataatgtatattccccacaactggcttctttcctttaacattgagatacaaccaagttgttacttgtaacaattttttgtttgtgtgtttgtttatttatttttgagaccagagtctcactgtcgcccaggctgcagtgcagtggtgccatcacgcgtcactgcaacctctgcctcccggattcaagcaattctccacctcagcctcccaagtagctggaattacagatatggctcgtggacagcagaaaattcagtctcagcagaaaaatgccaaaaagcaagctggacaaaagaagaaacaaggacatgaccaaaaggctgctgccaaagctgccttaatatatacctgcactgtctgtaggacacaaatgccagaccctaagaccttcaagcagcactttgagagcaagcatcctaagactccacttcctccagaattagctgatgttcaggcataaggttgtttacaggtgaattcatgacacctttgactcttctactgtctcagaccttaggtaacatacctgcagctgcttttctaacaaactgttgatcagcaaaaataaaggggctacagaaacactcatttttatgctgttccctcttgggcttcatgcaaagacaattctgtgtaaatgtacagttgactctgatttggaaatatgaaaatcagtccatccttgttataaaaaatttttttacaattgtaattatattgatgttcatattgtgtaaaataactcatttaataaaatagtactttgatttacga

SEQ ID NO: 203572 - DNA, 476 bp, Homo sapiens
  Payload ID: 20144
  Gene Name: zinc finger protein 706
  ENST ID: ENST00000523146
  CDS Start-End: 43-204
cgctgcactgtctctccgacgcaagactgtcccggcccggatatggctcgtggacagcagaaaattcagtctcagcagaaaaatgccaaaaagcaagctggacaaaagaagaaacaaggacatgaccaaaaggctgctgccaaagctgccttaatatatacctgcactgtctgtaggaagagtaaactgactaatggaaattaaacaatttgtgtggggtctcccagctggttagtagaagagctggaatctgaactcaggcagttcagctccagagtccaccctctggaccactactgtactgcctctcaaagaagtacttctgaaattccaaatcagagcctcttgcctgtttgtttaagctcattacccttgaagttagtgagtggcagtaccaaaggaaaccatagtggaacacaaatgccagaccctaagaccttcaagcagcactttgagagcaagcatcctaagactcc

SEQ ID NO: 203573 - DNA, 540 bp, Homo sapiens
  Payload ID: 20144
  Gene Name: zinc finger protein 706
  ENST ID: ENST00000518071
  CDS Start-End: 1-92
aaatgccagaccctaagaccttcaagcagcactttgagagcaagcatcctaagactccacttcctccagaattagctgatgttcaggcataaggttgtttacaggtgaattcatgacacctttgactcttctactgtctcagaccttagggtttcccaaactctcgattgcctcttgcaagcagatgacctgggagcaaatgttatggcagaacgatggactcctagcaagggccgaagcgtgccctgtgaagactggaaagaatatatgcttgtcagagatttggtaacctcatcaagaccttaaactgcagtttaagagggtggaaaaattactcaagtgaaactataagccctgttattcgtaagaaaacgtatgacacagagcaattggagaatctcttaatttgcatgcaaaaataacaggaggaaaaagtaaggaatgttatatctgatttcaagtgtgaatatgaagcaaaggaacttgagatgttaacacctgaaagaaatcaagatttcctagatacccctgaaacacagg

SEQ ID NO: 203574 - DNA, 2183 bp, Homo sapiens
  Payload ID: 20145
  Gene Name: zinc finger protein 707
  Uniprot ID: Q96C28
  ENST ID: ENST00000358656
  CDS Start-End: 213-1328
aaaagtctgggctaccggcgcggcgtagtggatgcagcatcctagtggaggacgcccctgtgttgctgaacctgtttgcatgagttgctcctgacggccctttaggatacttccatgtctgtagggtctagagtgacatctcctcccctcccctgacgagatctgccctccttggcactgtgcttccccagaggggtggcctcgctgttcccatggacatggcccaggagccagtgaccttcagggacgtggccatctacttctcaagggaggagtgggcgtgtctggaacccagccagagggccctctaccgggacgtgatgctggacaacttcagcagtgtggctgctctgggattttgcagccccagaccagacctcgtctctcgcctggaacagtgggaggagccgtgggttgaagaccgggagagacctgagttccaggcagtgcagaggggaccccggccaggggcaaggaagtctgcagaccccaagagaccttgtgatcatccagcttgggctcacaagaaaacccacgtgcggcgagaaagagccagggaaggaagcagctttaggaagggcttcaggctggacacggatgacgggcagcttcccagagctgctccagaaaggacagacgccaagcccacggctttcccgtgtcaggtgctcacgcagcgttgtgggcggcggccgggccgcagagagcgccggaagcagcgcgcagtagagctgtcattcatctgcggcacgtgcgggaaggcgctcagctgccacagccggctgctcgctcaccagacggtgcacacgggaaccaaggccttcgagtgccccgagtgcggccagaccttccggtgggcttcaaacctgcagcgccaccagaagaaccacacgcgcgagaagcccttctgctgcgaggcctgcgggcaggcgttcagcctgaaggaccgcctggctcagcaccgcaaggtccacaccgagcacaggccctactcgtgtggcgactgtgggaaagccttcaagcagaagtccaaccttctcagacaccagctggtgcacaccggggagcggccgttctactgcgcggactgcggcaaagccttccggaccaaggagaacctcagccaccaccagagggtccacagcggggagaagccctacacctgtgccgagtgcggcaagtccttccggtggcccaagggcttcagcatccaccggaggctgcacctgacgaagaggttctacgagtgcggccactgtgggaaaggcttccgtcacctggggttcttcacgcggcatcagaggactcacaggcacggggaggtgtaggggcgcccgaagagtggggtgctgcgcctctgcgggagtactgggtcctgagggagagctgcagtgagaagttgctcttcagcctggaaaatcaacctgaattcagagaagccttcttagtcctcagagctccccagtcccccgagaagtttactgggaaaactgccaggtgggagaagcagagccatgggtacgccggagatggcgggggctctggagatggcgggggctgcgccccggcgccgggcatcctggggatgtgctgagagtgtgcgcgaccccggagccacgtgccaggccgggctcagaggcggagaagcctgcctggtgcccacagccgtctggctcagggactccaccctggccccgagtcgccgtctgctgggcctttccttcctggctctgcaccccatgctggctgcccggtctggcttcccttcttgtctctgtcttgggcgaggcagctgtgagcattgcacagaggcaaagaccctcctgcagcctctgcgctgggccgtagaaacaagagcctttgtaatactgaacctcattcaaggattaggagtggtggttaggtcagggccacccccagtgctgcaggaacggcctccacccagctctgttggtcagagcctgggtcatgcacctggagttgggagatcaagttgggtctcagggcagtgaggtggccatatccaccacatcgcatttcgtgggggaagaggtgacctctttgttttaaacttaaggtgtctgcttatccagccagaaataaaaatctgccagtggtgttcccaagggaagacccccgtgggaatgggtcgggacactgccgtgtttcaggttagccaatta

SEQ ID NO: 203575 - DNA, 562 bp, Homo sapiens
  Payload ID: 20145
  Gene Name: zinc finger protein 707
  ENST ID: ENST00000442058
  CDS Start-End: 287-454
aaaagtctgggctaccggcgcggcgtagtggatgcagcatcctagtggaggacgcccctgtgatggagtctcactctgttgcccaggctggagtacagtggcgtgatctcggctcactgcaagctctgcctcccggttgctgaacctgtttgcatgagttgctcctgacggccctttaggatacttccatgtctgtagggtctagagtgacatctcctcccctcccctgacgagatctgccctccttggcactgtgcttccccagaggggtggcctcgctgttcccatggacatggcccaggagccagtgaccttcagggacgtggccatctacttctcaagggaggagtgggcgtgtctggaacccagccagagggccctctaccgggacgtgatgctggacaacttcagcagtgtggctgctctgggtgagcacgggctgagcgcagcgtgagcacagggattttgcagccccagaccagacctcgtctctcgcctggaacagtgggaggagccgtgggttgaagaccgggagagacctgagttccaggcagtgcagagg

SEQ ID NO: 203576 - DNA, 2661 bp, Homo sapiens
  Payload ID: 20145
  Gene Name: zinc finger protein 707
  Uniprot ID: Q96C28
  ENST ID: ENST00000418203
  CDS Start-End: 696-1811
cagacagcgtctcagtctaacatccaggctggagtgcactggcatgatctcagctcactgcaacctccgcctcccatattcaagcagtccccccacctcagcctcctgagtagctgggactgcatatgtgcactgccacgccccgctaattattgtattgtttatagagacaggctgggcaactgctgggctcgaacagtcctcctgcctcagcctcctagggtgttaggattacaggcgtgagccactgtgcttggccccttgtaatatctctgtcaggttttcggtttgggttttgctggcctcattaagacagactggatagcgtctgctcttcctctgttcactaaatagcttctaagatcagtactgtgcttccgtaggctttggtggagtttaccagggaatccagctgggtgtggtattttctgtgtgggaagggttccagttacattttcaattgccttatcagatggaaggcttccctttcttttgtcagtttcatgatactgtgtttttcatcgagtttgtctgtttcatctcagttgctgaacctgtttgcatgagttgctcctgacggccctttaggatacttccatgtctgtagggtctagagtgacatctcctcccctcccctgacgagatctgccctccttggcactgtgcttccccagaggggtggcctcgctgttcccatggacatggcccaggagccagtgaccttcagggacgtggccatctacttctcaagggaggagtgggcgtgtctggaacccagccagagggccctctaccgggacgtgatgctggacaacttcagcagtgtggctgctctgggattttgcagccccagaccagacctcgtctctcgcctggaacagtgggaggagccgtgggttgaagaccgggagagacctgagttccaggcagtgcagaggggaccccggccaggggcaaggaagtctgcagaccccaagagaccttgtgatcatccagcttgggctcacaagaaaacccacgtgcggcgagaaagagccagggaaggaagcagctttaggaagggcttcaggctggacacggatgacgggcagcttcccagagctgctccagaaaggacagacgccaagcccacggctttcccgtgtcaggtgctcacgcagcgttgtgggcggcggccgggccgcagagagcgccggaagcagcgcgcagtagagctgtcattcatctgcggcacgtgcgggaaggcgctcagctgccacagccggctgctcgctcaccagacggtgcacacgggaaccaaggccttcgagtgccccgagtgcggccagaccttccggtgggcttcaaacctgcagcgccaccagaagaaccacacgcgcgagaagcccttctgctgcgaggcctgcgggcaggcgttcagcctgaaggaccgcctggctcagcaccgcaaggtccacaccgagcacaggccctactcgtgtggcgactgtgggaaagccttcaagcagaagtccaaccttctcagacaccagctggtgcacaccggggagcggccgttctactgcgcggactgcggcaaagccttccggaccaaggagaacctcagccaccaccagagggtccacagcggggagaagccctacacctgtgccgagtgcggcaagtccttccggtggcccaagggcttcagcatccaccggaggctgcacctgacgaagaggttctacgagtgcggccactgtgggaaaggcttccgtcacctggggttcttcacgcggcatcagaggactcacaggcacggggaggtgtaggggcgcccgaagagtggggtgctgcgcctctgcgggagtactgggtcctgagggagagctgcagtgagaagttgctcttcagcctggaaaatcaacctgaattcagagaagccttcttagtcctcagagctccccagtcccccgagaagtttactgggaaaactgccaggtgggagaagcagagccatgggtacgccggagatggcgggggctctggagatggcgggggctgcgccccggcgccgggcatcctggggatgtgctgagagtgtgcgcgaccccggagccacgtgccaggccgggctcagaggcggagaagcctgcctggtgcccacagccgtctggctcagggactccaccctggccccgagtcgccgtctgctgggcctttccttcctggctctgcaccccatgctggctgcccggtctggcttcccttcttgtctctgtcttgggcgaggcagctgtgagcattgcacagaggcaaagaccctcctgcagcctctgcgctgggccgtagaaacaagagcctttgtaatactgaacctcattcaaggattaggagtggtggttaggtcagggccacccccagtgctgcaggaacggcctccacccagctctgttggtcagagcctgggtcatgcacctggagttgggagatcaagttgggtctcagggcagtgaggtggccatatccaccacatcgcatttcgtgggggaagaggtgacctctttgttttaaacttaaggtgtctgcttatccagccagaaataaaaatctgccagtggtgttcccaagggaagacccccgtgggaatgggtcgggacactgccgtgtttcaggttagcc

SEQ ID NO: 203577 - DNA, 589 bp, Homo sapiens
  Payload ID: 20145
  Gene Name: zinc finger protein 707
  ENST ID: ENST00000527293
  CDS Start-End: 215-382
gtaaaagtctgggctaccggcgcggcgtagtggatgcagcatcctagtggaggacgcccctgtggccggactgcaggggtgcgatcttggctcacagcaacttccacctcccgggttcaagcgattctcctgcctcagcttcccaagtagctgggatgacagatctgccctccttggcactgtgcttccccagaggggtggcctcgctgttcccatggacatggcccaggagccagtgaccttcagggacgtggccatctacttctcaagggaggagtgggcgtgtctggaacccagccagagggccctctaccgggacgtgatgctggacaacttcagcagtgtggctgctctgggtgagcacgggctgagcgcagcgtgagcacagggattttgcagccccagaccagacctcgtctctcgcctggaacagtgggaggagccgtgggttgaagaccgggagagacctgagttccaggcagtgcagaggggaccccggccaggggcaaggaagtctgcagaccccaagagaccttgtgatcatccagcttgggctcacaagaaaacccacgtgcggcgagaaagagcc

SEQ ID NO: 203578 - DNA, 2114 bp, Homo sapiens
  Payload ID: 20145
  Gene Name: zinc finger protein 707
  ENST ID: ENST00000533031
  CDS Start-End: 140-307
aacaacttccgctcgggaagtttgtaaaagtctgggctaccggcgcggcgtagtggatgcagcatcctagtggaggacgcccctgtgatctgccctccttggcactgtgcttccccagaggggtggcctcgctgttcccatggacatggcccaggagccagtgaccttcagggacgtggccatctacttctcaagggaggagtgggcgtgtctggaacccagccagagggccctctaccgggacgtgatgctggacaacttcagcagtgtggctgctctgggtgagcacgggctgagcgcagcgtgagcacagggattttgcagccccagaccagacctcgtctctcgcctggaacagtgggaggagccgtgggttgaagaccgggagagacctgagttccaggcagtgcagaggggaccccggccaggggcaaggaagtctgcagaccccaagagaccttgtgatcatccagcttgggctcacaagaaaacccacgtgcggcgagaaagagccagggaaggaagcagctttaggaagggcttcaggctggacacggatgacgggcagcttcccagagctgctccagaaaggacagacgccaagcccacggctttcccgtgtcaggtgctcacgcagcgttgtgggcggcggccgggccgcagagagcgccggaagcagcgcgcagtagagctgtcattcatctgcggcacgtgcgggaaggcgctcagctgccacagccggctgctcgctcaccagacggtgcacacgggaaccaaggccttcgagtgccccgagtgcggccagaccttccggtgggcttcaaacctgcagcgccaccagaagaaccacacgcgcgagaagcccttctgctgcgaggcctgcgggcaggcgttcagcctgaaggaccgcctggctcagcaccgcaaggtccacaccgagcacaggccctactcgtgtggcgactgtgggaaagccttcaagcagaagtccaaccttctcagacaccagctggtgcacaccggggagcggccgttctactgcgcggactgcggcaaagccttccggaccaaggagaacctcagccaccaccagagggtccacagcggggagaagccctacacctgtgccgagtgcggcaagtccttccggtggcccaagggcttcagcatccaccggaggctgcacctgacgaagaggttctacgagtgcggccactgtgggaaaggcttccgtcacctggggttcttcacgcggcatcagaggactcacaggcacggggaggtgtaggggcgcccgaagagtggggtgctgcgcctctgcgggagtactgggtcctgagggagagctgcagtgagaagttgctcttcagcctggaaaatcaacctgaattcagagaagccttcttagtcctcagagctccccagtcccccgagaagtttactgggaaaactgccaggtgggagaagcagagccatgggtacgccggagatggcgggggctctggagatggcgggggctgcgccccggcgccgggcatcctggggatgtgctgagagtgtgcgcgaccccggagccacgtgccaggccgggctcagaggcggagaagcctgcctggtgcccacagccgtctggctcagggactccaccctggccccgagtcgccgtctgctgggcctttccttcctggctctgcaccccatgctggctgcccggtctggcttcccttcttgtctctgtcttgggcgaggcagctgtgagcattgcacagaggcaaagaccctcctgcagcctctgcgctgggccgtagaaacaagagcctttgtaatactgaacctcattcaaggattaggagtggtggttaggtcagggccacccccagtgctgcaggaacggcctccacccagctctgttggtcagagcctgggtcatgcacctggagttgggagatcaagttgggtctcagggcagtgaggtggccatatccaccacatcgcatttcgtgggggaagaggtgacctctttgttttaaacttaaggtgtctgcttatccagccagaaataaaaatctgccagtggtgttcccaagggaagacccccgtgggaatgggtcggg

SEQ ID NO: 203579 - DNA, 589 bp, Homo sapiens
  Payload ID: 20145
  Gene Name: zinc finger protein 707
  ENST ID: ENST00000529833
  CDS Start-End: 353-589
aagtttgtaaaagtctgggctaccggcgcggcgtagtggatgcagcatcctagtggaggacgcccctgtgggctgtgagacccagcgtcgcggctgctgggacagaccggggaggctgcccgtgccctcggctattcgggggctgttcttcagcttcttccggctcggcctcctcttctctcctcgctccttacacttgcagttgctgaacctgtttgcatgagttgctcctgacggccctttaggatacttccatgtctgtagggtctagagtgacatctcctcccctcccctgacgagatctgccctccttggcactgtgcttccccagaggggtggcctcgctgttcccatggacatggcccaggagccagtgaccttcagggacgtggccatctacttctcaagggaggagtgggcgtgtctggaacccagccagagggccctctaccgggacgtgatgctggacaacttcagcagtgtggctgctctgggattttgcagccccagaccagacctcgtctctcgcctggaacagtgggaggagccgtgggttgaagaccgggagagacctgagttccaggcagtg

SEQ ID NO: 203580 - DNA, 595 bp, Homo sapiens
  Payload ID: 20145
  Gene Name: zinc finger protein 707
  ENST ID: ENST00000525185
  CDS Start-End: 144-311
ggataacaacttccgctcgggaagtttgtaaaagtctgggctaccggcgcggcgtagtggatgcagcatcctagtggaggacgcccctgtgatctgccctccttggcactgtgcttccccagaggggtggcctcgctgttcccatggacatggcccaggagccagtgaccttcagggacgtggccatctacttctcaagggaggagtgggcgtgtctggaacccagccagagggccctctaccgggacgtgatgctggacaacttcagcagtgtggctgctctgggtgagcacgggctgagcgcagcgtgagcacaggaaggattttgcagccccagaccagacctcgtctctcgcctggaacagtgggaggagccgtgggttgaagaccgggagagacctgagttccaggcagtgcagaggggaccccggccaggggcaaggaagtctgcagaccccaagagaccttgtgatcatccagcttgggctcacaagaaaacccacgtgcggcgagaaagagccagggaaggaagcagctttaggaagggcttcaggctggacacggatgacgggcagcttcccagagctgctccaga

SEQ ID NO: 203581 - DNA, 577 bp, Homo sapiens
  Payload ID: 20145
  Gene Name: zinc finger protein 707
  ENST ID: ENST00000528456
  CDS Start-End: 134-412
ttccgctcgggaagtttgtaaaagtctgggctaccggcgcggcgtagtggatgcagcatcctagtggaggacgcccctgtgatctgccctccttggcactgtgcttccccagaggggtggcctcgctgttcccatggacatggcccaggagccagtgaccttcagggacgtggccatctacttctcaagggaggagtgggcgtgtctggaacccagccagagggccctctaccgggacgtgatgctggacaacttcagcagtgtggctgctctgggattttgcagccccagaccagacctcgtctctcgcctggaacagtgggaggagccgtgggttgaagaccgggagagacctgagttccaggcagtgcagaggggaccccggccagagtgggatggagcagctatgtgaacacgagccctgggaggtccccgggtatgtggagtccccgactgtggagtgtcaggttcctaggggcaaggaagtctgcagaccccaagagaccttgtgatcatccagcttgggctcacaagaaaacccacgtgcggcgagaaagagccagggaaggaagcagct

SEQ ID NO: 203582 - DNA, 556 bp, Homo sapiens
  Payload ID: 20145
  Gene Name: zinc finger protein 707
  ENST ID: ENST00000531985
  CDS Start-End: 215-382
gtaaaagtctgggctaccggcgcggcgtagtggatgcagcatcctagtggaggacgcccctgtgttgctgaacctgtttgcatgagttgctcctgacggccctttaggatacttccatgtctgtagggtctagagtgacatctcctcccctcccctgacgagatctgccctccttggcactgtgcttccccagaggggtggcctcgctgttcccatggacatggcccaggagccagtgaccttcagggacgtggccatctacttctcaagggaggagtgggcgtgtctggaacccagccagagggccctctaccgggacgtgatgctggacaacttcagcagtgtggctgctctgggtgagcacgggctgagcgcagcgtgagcacagggattttgcagccccagaccagacctcgtctctcgcctggaacagtgggaggagccgtgggttgaagaccgggagagacctgagttccaggcagtgcagaggggaccccggccaggggcaaggaagtctgcagaccccaagagaccttgtgatcatccagcttgggct

SEQ ID NO: 203583 - DNA, 565 bp, Homo sapiens
  Payload ID: 20145
  Gene Name: zinc finger protein 707
  ENST ID: ENST00000526315
  CDS Start-End: 129-565
gtggatgcagcatcctagtggaggacgcccctgtggagccagtgaccttcagggacgtggccatctacttctcaagggaggagtgggcgtgtctggaacccagccagagggccctctaccgggacgtgatgctggacaacttcagcagtgtggctgctctgggattttgcagccccagaccagacctcgtctctcgcctggaacagtgggaggagccgtgggttgaagaccgggagagacctgagttccaggcagtgcagaggggaccccggccaggggcaaggaagtctgcagaccccaagagaccttgtgatcatccagcttgggctcacaagaaaacccacgtgcggcgagaaagagccagggaaggaagcagctttaggaagggcttcaggctggacacggatgacgggcagcttcccagagctgctccagaaaggacagacgccaagcccacggctttcccgtgtcaggtgctcacgcagcgttgtgggcggcggccgggccgcagagagcgccggaagcagcgcgcagtagagctgtcattcatctgcggcacgtgcgg

SEQ ID NO: 203584 - DNA, 2865 bp, Homo sapiens
  Payload ID: 20145
  Gene Name: zinc finger protein 707
  Uniprot ID: Q96C28
  ENST ID: ENST00000532205
  CDS Start-End: 900-2015
gtggatgcagcatcctagtggaggacgcccctgtggctggagtgcaatggcgcgatatcggctcgccgcaacttctgcctcctgggttcaagtgaatctcctgccccagcctcctgagcagctgggatgacagatggagtctcactctgttgcccaggctggagtacagtggcgtgatctcggctcactgcaagctctgcctcccggacagcgtctcagtctaacatccaggctggagtgcactggcatgatctcagctcactgcaacctccgcctcccatattcaagcagtccccccacctcagcctcctgagtagctgggactgcatatgtgcactgccacgccccgctaattattgtattgtttatagagacaggctgggcaactgctgggctcgaacagtcctcctgcctcagcctcctagggtgttaggattacaggcgtgagccactgtgcttggccccttgtaatatctctgtcaggttttcggtttgggttttgctggcctcattaagacagactggatagcgtctgctcttcctctgttcactaaatagcttctaagatcagtactgtgcttccgtaggctttggtggagtttaccagggaatccagctgggtgtggtattttctgtgtgggaagggttccagttacattttcaattgccttatcagatggaaggcttccctttcttttgtcagtttcatgatactgtgtttttcatcgagtttgtctgtttcatctcagttgctgaacctgtttgcatgagttgctcctgacggccctttaggatacttccatgtctgtagggtctagagtgacatctcctcccctcccctgacgagatctgccctccttggcactgtgcttccccagaggggtggcctcgctgttcccatggacatggcccaggagccagtgaccttcagggacgtggccatctacttctcaagggaggagtgggcgtgtctggaacccagccagagggccctctaccgggacgtgatgctggacaacttcagcagtgtggctgctctgggattttgcagccccagaccagacctcgtctctcgcctggaacagtgggaggagccgtgggttgaagaccgggagagacctgagttccaggcagtgcagaggggaccccggccaggggcaaggaagtctgcagaccccaagagaccttgtgatcatccagcttgggctcacaagaaaacccacgtgcggcgagaaagagccagggaaggaagcagctttaggaagggcttcaggctggacacggatgacgggcagcttcccagagctgctccagaaaggacagacgccaagcccacggctttcccgtgtcaggtgctcacgcagcgttgtgggcggcggccgggccgcagagagcgccggaagcagcgcgcagtagagctgtcattcatctgcggcacgtgcgggaaggcgctcagctgccacagccggctgctcgctcaccagacggtgcacacgggaaccaaggccttcgagtgccccgagtgcggccagaccttccggtgggcttcaaacctgcagcgccaccagaagaaccacacgcgcgagaagcccttctgctgcgaggcctgcgggcaggcgttcagcctgaaggaccgcctggctcagcaccgcaaggtccacaccgagcacaggccctactcgtgtggcgactgtgggaaagccttcaagcagaagtccaaccttctcagacaccagctggtgcacaccggggagcggccgttctactgcgcggactgcggcaaagccttccggaccaaggagaacctcagccaccaccagagggtccacagcggggagaagccctacacctgtgccgagtgcggcaagtccttccggtggcccaagggcttcagcatccaccggaggctgcacctgacgaagaggttctacgagtgcggccactgtgggaaaggcttccgtcacctggggttcttcacgcggcatcagaggactcacaggcacggggaggtgtaggggcgcccgaagagtggggtgctgcgcctctgcgggagtactgggtcctgagggagagctgcagtgagaagttgctcttcagcctggaaaatcaacctgaattcagagaagccttcttagtcctcagagctccccagtcccccgagaagtttactgggaaaactgccaggtgggagaagcagagccatgggtacgccggagatggcgggggctctggagatggcgggggctgcgccccggcgccgggcatcctggggatgtgctgagagtgtgcgcgaccccggagccacgtgccaggccgggctcagaggcggagaagcctgcctggtgcccacagccgtctggctcagggactccaccctggccccgagtcgccgtctgctgggcctttccttcctggctctgcaccccatgctggctgcccggtctggcttcccttcttgtctctgtcttgggcgaggcagctgtgagcattgcacagaggcaaagaccctcctgcagcctctgcgctgggccgtagaaacaagagcctttgtaatactgaacctcattcaaggattaggagtggtggttaggtcagggccacccccagtgctgcaggaacggcctccacccagctctgttggtcagagcctgggtcatgcacctggagttgggagatcaagttgggtctcagggcagtgaggtggccatatccaccacatcgcatttcgtgggggaagaggtgacctctttgttttaaacttaaggtgtctgcttatccagccagaaataaaaatctgccagtggtgttcccaagggaagacccccgtgggaatgggtcgggacactgccgtgtttcaggttagcc

SEQ ID NO: 203585 - DNA, 2218 bp, Homo sapiens
  Payload ID: 20145
  Gene Name: zinc finger protein 707
  Uniprot ID: Q96C28
  ENST ID: ENST00000532158
  CDS Start-End: 276-1391
ctaccggcgcggcgtagtggatgcagcatcctagtggaggacgcccctgtgatggagtctcactctgttgcccaggctggagtacagtggcgtgatctcggctcactgcaagctctgcctcccggttgctgaacctgtttgcatgagttgctcctgacggccctttaggatacttccatgtctgtagggtctagagtgacatctcctcccctcccctgacgagatctgccctccttggcactgtgcttccccagaggggtggcctcgctgttcccatggacatggcccaggagccagtgaccttcagggacgtggccatctacttctcaagggaggagtgggcgtgtctggaacccagccagagggccctctaccgggacgtgatgctggacaacttcagcagtgtggctgctctgggattttgcagccccagaccagacctcgtctctcgcctggaacagtgggaggagccgtgggttgaagaccgggagagacctgagttccaggcagtgcagaggggaccccggccaggggcaaggaagtctgcagaccccaagagaccttgtgatcatccagcttgggctcacaagaaaacccacgtgcggcgagaaagagccagggaaggaagcagctttaggaagggcttcaggctggacacggatgacgggcagcttcccagagctgctccagaaaggacagacgccaagcccacggctttcccgtgtcaggtgctcacgcagcgttgtgggcggcggccgggccgcagagagcgccggaagcagcgcgcagtagagctgtcattcatctgcggcacgtgcgggaaggcgctcagctgccacagccggctgctcgctcaccagacggtgcacacgggaaccaaggccttcgagtgccccgagtgcggccagaccttccggtgggcttcaaacctgcagcgccaccagaagaaccacacgcgcgagaagcccttctgctgcgaggcctgcgggcaggcgttcagcctgaaggaccgcctggctcagcaccgcaaggtccacaccgagcacaggccctactcgtgtggcgactgtgggaaagccttcaagcagaagtccaaccttctcagacaccagctggtgcacaccggggagcggccgttctactgcgcggactgcggcaaagccttccggaccaaggagaacctcagccaccaccagagggtccacagcggggagaagccctacacctgtgccgagtgcggcaagtccttccggtggcccaagggcttcagcatccaccggaggctgcacctgacgaagaggttctacgagtgcggccactgtgggaaaggcttccgtcacctggggttcttcacgcggcatcagaggactcacaggcacggggaggtgtaggggcgcccgaagagtggggtgctgcgcctctgcgggagtactgggtcctgagggagagctgcagtgagaagttgctcttcagcctggaaaatcaacctgaattcagagaagccttcttagtcctcagagctccccagtcccccgagaagtttactgggaaaactgccaggtgggagaagcagagccatgggtacgccggagatggcgggggctctggagatggcgggggctgcgccccggcgccgggcatcctggggatgtgctgagagtgtgcgcgaccccggagccacgtgccaggccgggctcagaggcggagaagcctgcctggtgcccacagccgtctggctcagggactccaccctggccccgagtcgccgtctgctgggcctttccttcctggctctgcaccccatgctggctgcccggtctggcttcccttcttgtctctgtcttgggcgaggcagctgtgagcattgcacagaggcaaagaccctcctgcagcctctgcgctgggccgtagaaacaagagcctttgtaatactgaacctcattcaaggattaggagtggtggttaggtcagggccacccccagtgctgcaggaacggcctccacccagctctgttggtcagagcctgggtcatgcacctggagttgggagatcaagttgggtctcagggcagtgaggtggccatatccaccacatcgcatttcgtgggggaagaggtgacctctttgttttaaacttaaggtgtctgcttatccagccagaaataaaaatctgccagtggtgttcccaagggaagacccccgtgggaatgggtcggga

SEQ ID NO: 203586 - DNA, 525 bp, Homo sapiens
  Payload ID: 20145
  Gene Name: zinc finger protein 707
  ENST ID: ENST00000530574
  CDS Start-End: 123-525
aagtttgtaaaagtctgggctaccggcgcggcgtagtggatgcagcatcctagtggaggacgcccctgtgatctgccctccttggcactgtgcttccccagaggggtggcctcgctgttcccatggacatggcccaggagccagtgaccttcagggacgtggccatctacttctcaagggaggagtgggcgtgtctggaacccagccagagggccctctaccgggacgtgatgctggacaacttcagcagtgtggctgctctggccccagaccagacctcgtctctcgcctggaacagtgggaggagccgtgggttgaagaccgggagagacctgagttccaggcagtgcagaggggaccccggccaggggcaaggaagtctgcagaccccaagagaccttgtgatcatccagcttgggctcacaagaaaacccacgtgcggcgagaaagagccagggaaggaagcagctttaggaagggcttcaggctggacacggatgacgggcagcttcccagagctgctcc

SEQ ID NO: 203587 - DNA, 570 bp, Homo sapiens
  Payload ID: 20145
  Gene Name: zinc finger protein 707
  ENST ID: ENST00000525862
  CDS Start-End: 89-400
agtggatgcagcatcctagtggaggacgcccctgtgatctgccctccttggcactgtgcttccccagaggggtggcctcgctgttcccatggacatggcccaggagccagtgaccttcagggacgtggccatctacttctcaagggaggagtgggcgtgtctggaacccagccagagggccctctaccgggacgtgatgctggacaacttcagcagtgtggctgctctgggattttgcagccccagaccagacctcgtctctcgcctggaacagtgggaggagccgtgggttgaagaccgggagagacctgagttccaggcagtgcagaggggaccccggccagccacccaggtgctgtccggcggaggccattggtgtgggtgtctgacctccctgtgatggccatgtggggtcccaggcctggtactgactgcacgtgagggtctccagagtgggatggagcagctatgtgaacacgagccctgggaggtccccgggtatgtggagtccccgactgtggagtgtcaggttcctaggggcaaggaagtctgcagaccccaagagacctt

SEQ ID NO: 203588 - DNA, 562 bp, Homo sapiens
  Payload ID: 20145
  Gene Name: zinc finger protein 707
  ENST ID: ENST00000526970
  CDS Start-End: 421-562
ctgggctaccggcgcggcgtagtggatgcagcatcctagtggaggacgcccctgtggtttgtcaggacccggttgcgtatcctcttgaagctggtttcttcctggccgaccccgtccgcgatcgtgaccttagttatccctcatagacactttccacacctgtgtctccagccctatcgctccgatgagacccgagcgcttagacttgattcataacacccaaagctccccggccccaggctgagctcctgcaacctccacaccccaccctctggtcctcccaggcattccaccgcgaaggggaggaggcagaaacccgagattcgcttcttctcctttcctgcccacgcccagccacacagtcactgatctgccctccttggcactgtgcttccccagaggggtggcctcgctgttcccatggacatggcccaggagccagtgaccttcagggacgtggccatctacttctcaagggaggagtgggcgtgtctggaacccagccagagggccctctaccgggacgtgatgctggacaacttcagcagtgtggctgctctgg

SEQ ID NO: 203589 - DNA, 567 bp, Homo sapiens
  Payload ID: 20145
  Gene Name: zinc finger protein 707
  ENST ID: ENST00000534303
  CDS Start-End: 143-567
gataacaacttccgctcgggaagtttgtaaaagtctgggctaccggcgcggcgtagtggatgcagcatcctagtggaggacgcccctgtgatctgccctccttggcactgtgcttccccagaggggtggcctcgctgttcccatggacatggcccaggagccagtgaccttcagggacgtggccatctacttctcaagggaggagtgggcgtgtctggaacccagccagagggccctctaccgggacgtgatgctggacaacttcagcagtgtggctgctctgggattttgcagccccagaccagacctcgtctctcgcctggaacagtgggaggagccgtgggttgaagaccgggagagacctgagttccaggcagtgcagaggggaccccggccaggggcaaggaagtctgcagaccccaagagaccttgtgatcatccagcttgggctcacaagaaaacccacgtgcggcgagaaagagccagggaaggaagcagctttaggaagggcttcaggctggacacggatgacgggcagcttcccagagctgctccagaaaggacaga

SEQ ID NO: 203590 - DNA, 2661 bp, Homo sapiens; identical to SEQ ID NO: 203576
  Payload ID: 20145
  Gene Name: zinc finger protein 707
  Uniprot ID: Q96C28
  ENST ID: ENST00000622212
  CDS Start-End: 696-1811

SEQ ID NO: 203591 - DNA, 2183 bp, Homo sapiens; identical to SEQ ID NO: 203574
  Payload ID: 20145
  Gene Name: zinc finger protein 707
  Uniprot ID: Q96C28
  ENST ID: ENST00000611844
  CDS Start-End: 213-1328

SEQ ID NO: 203592 - DNA, 2865 bp, Homo sapiens; identical to SEQ ID NO: 203584
  Payload ID: 20145
  Gene Name: zinc finger protein 707
  Uniprot ID: Q96C28
  ENST ID: ENST00000611146
  CDS Start-End: 900-2015

SEQ ID NO: 203593 - DNA, 2218 bp, Homo sapiens; identical to SEQ ID NO: 203585
  Payload ID: 20145
  Gene Name: zinc finger protein 707
  Uniprot ID: Q96C28
  ENST ID: ENST00000617261
  CDS Start-End: 276-1391

SEQ ID NO: 203594 - DNA, 565 bp, Homo sapiens; identical to SEQ ID NO: 203583
  Payload ID: 20145
  Gene Name: zinc finger protein 707
  ENST ID: ENST00000632754
  CDS Start-End: 129-565

SEQ ID NO: 203595 - DNA, 577 bp, Homo sapiens; identical to SEQ ID NO: 203581
  Payload ID: 20145
  Gene Name: zinc finger protein 707
  ENST ID: ENST00000633449
  CDS Start-End: 134-412

SEQ ID NO: 203596 - DNA, 589 bp, Homo sapiens; identical to SEQ ID NO: 203577
  Payload ID: 20145
  Gene Name: zinc finger protein 707
  ENST ID: ENST00000633041
  CDS Start-End: 215-382

SEQ ID NO: 203597 - DNA, 567 bp, Homo sapiens; identical to SEQ ID NO: 203589
  Payload ID: 20145
  Gene Name: zinc finger protein 707
  ENST ID: ENST00000631634
  CDS Start-End: 143-567

SEQ ID NO: 203598 - DNA, 2114 bp, Homo sapiens; identical to SEQ ID NO: 203578
  Payload ID: 20145
  Gene Name: zinc finger protein 707
  ENST ID: ENST00000632874
  CDS Start-End: 140-307

SEQ ID NO: 203599 - DNA, 562 bp, Homo sapiens; identical to SEQ ID NO: 203575
  Payload ID: 20145
  Gene Name: zinc finger protein 707
  ENST ID: ENST00000633543
  CDS Start-End: 287-454

SEQ ID NO: 203600 - DNA, 556 bp, Homo sapiens; identical to SEQ ID NO: 203582
  Payload ID: 20145
  Gene Name: zinc finger protein 707
  ENST ID: ENST00000634047
  CDS Start-End: 215-382

SEQ ID NO: 203601 - DNA, 595 bp, Homo sapiens; identical to SEQ ID NO: 203580
  Payload ID: 20145
  Gene Name: zinc finger protein 707
  ENST ID: ENST00000633413
  CDS Start-End: 144-311

SEQ ID NO: 203602 - DNA, 570 bp, Homo sapiens; identical to SEQ ID NO: 203587
  Payload ID: 20145
  Gene Name: zinc finger protein 707
  ENST ID: ENST00000633973
  CDS Start-End: 89-400

SEQ ID NO: 203603 - DNA, 525 bp, Homo sapiens; identical to SEQ ID NO: 203586
  Payload ID: 20145
  Gene Name: zinc finger protein 707
  ENST ID: ENST00000632986
  CDS Start-End: 123-525

SEQ ID NO: 203604 - DNA, 589 bp, Homo sapiens; identical to SEQ ID NO: 203579
  Payload ID: 20145
  Gene Name: zinc finger protein 707
  ENST ID: ENST00000631732
  CDS Start-End: 353-589

SEQ ID NO: 203605 - DNA, 562 bp, Homo sapiens; identical to SEQ ID NO: 203588
  Payload ID: 20145
  Gene Name: zinc finger protein 707
  ENST ID: ENST00000633668
  CDS Start-End: 421-562

SEQ ID NO: 203606 - DNA, 4004 bp, Homo sapiens
  Payload ID: 20146
  Gene Name: zinc finger protein 708
  Uniprot ID: P17019
  ENST ID: ENST00000356929
  CDS Start-End: 199-1890
actcagacacgcagctggaccggacagggcggcttccgggtttggcgcggcctttgtctcttgctgcagccggagctccggtctcgtcttcactgctgtttgtcctctgctcctagaggcccagactctgtggctctgtgacctgcaggtattgggagatccacagctaagactccaggaccctctggaagcctagaaatgggaccattgacatttatggatgtggccatagaattctctctggaggagtggcagtgcctggacacagcacagcagaatttatataggaatgtcatgttagagaattatagaaacctggtattcctgggtattgctgtgtctaatttagacctgatcacctgtctggagcaaggaaaagagccctggaatatgaagagacacgagatggcagccaaacccccagctatgtgttctcattttgccaaagaccttaggccagagcaatatataaaaaattctttccaacaagtgatactgagaagatatggaaaatgtggatatcagaaaggctgtaaaagtgtggatgagcataagttgcacaaaggaggtcacaagggacttaaccggtgtgtgacaactacccagagcaaaatagttcagtgtgacaaatacgtgaaagtctttcataaatattcaaatgcaaagagacataagataagacatactggaaaaaatcctttcaaatgtaaagaatgtggcaaatcattttgcatgctttcacaactaactcaacatgagataattcatactggagaaaaaccctacaaatgtgaagaatgtggcaaagcttttaaaaagtcctcaaaccttacgaatcataagataattcatactggagagaaaccctacaaatgtgaagaatgtggaaaagcttttaaccagtcctcaactcttactagacataagataattcatactggagagaaactctacaaatgtgaagaatgtggcaaagcttttaaccggtcctcaaaccttactaaacataagatagttcatactggagagaaaccctacaaatgtgaagaatgtggcaaagcttttaaacagtcctcaaaccttactaatcacaagaaaattcatactggagagaaaccctacaaatgtggagaatgtggcaaagcctttaccctatcttcacaccttactacacataagaggattcatactggtgagaaaccctacaaatgtgaagaatgtggcaaagcttttagtgtattttcaacccttactaaacataagataattcatactgaagagaaaccctacaaatgtgaagaatgtggcaaagcttttaaccggtcctcacaccttactaatcataaggtaattcatactggagagaaaccctacaaatgtgaagaatgtggtaaagcctttaccaagtcctcaactcttacttatcataaggtaattcatactggaaagaaaccctacaaatgtgaagaatgtggtaaagcctttagtatattctcaatccttactaaacataaagtaattcatactgaagacaaaccctacaaatgtgaagaatgtggcaaaacttttaactactcctcaaattttactaatcataaaaaaattcatactggagagaaaccctataagtgtgaagaatgtggcaaaagctttattctgtcctctcatcttactacacataagataattcatactggagagaaaccctacaaatgtaaagaatgtggcaaagcttttaaccagtcctcaacccttatgaaacataagataattcatactggagagaaaccctacaaatgtgaagaatgtggcaaagcctttaaccagtccccaaaccttactaaacataagagaattcataccaaagagaaaccctacaaatgtaaataatgtgtcaaatcctttagtgtattttcaacttttattaaaacacaagataattcatactggagagaaatcctacaaatgtgataaatgtggcaaagcctttaactggctcttaatccttatgaaacaaaagataattcatactagagagaaaccctacaaatgtaaagaatgtggcaaagcatttaactggtccctaaatcttactaaacataaaaaaacttaaactggagagaaactacaaagctggaagacatcacagtaattctgacaacacctcaaacttttctaaacataaaataaatcatactggtgaggaactttaaaaatgcgaaaaatgtgacaaaatctttaaatgattgtcacacttgattgtaggtaagataattcttactagaaaaactcttacaagtgtgaagaatgtggcaaaatttttaatgaatactcacaccttattgccaggaaagcatttatacttgagaaaaattgtaccaatataaagactgtgaaaaagccattaatgtctgctcacatcttactcaacatcagagagtacttaaaaaaagtattataaatttaattactgtcaaaaagtatttcagaaaatataagcttttaaagtatttattttgaagacaaacattacaaataaaagaggattgtaatacctttatttgtatcacagatcttattgtacacattttgtactagagaaaaccctgaagcagttacttaaactttgttcaacatcagggaattcagattggagaaaaaccctgcaaatgtaataaatttgaaaaaaaagttttccaaaactacaacttagacaacaccagagggttcatactgagatatatttttgcagatgcagtatatatttaaaacatttaatccaaaataagtctatgtaaatatcagagaattcacagtggaaatatctaaggtagggccgggcatggtggctcacgcctgtaatgccagcactttgggaggctgaggtgggcagatcatgaggtcaacagattgagaccatcctggtcaacatggtaaaaccctgtctctactaaaaatacaaaaattagctgggcgtggcggcacgtgcctgtagtctcagctacttgggacgctgaggcaggaaaatccgttgaacccaggaggcagaggttgtagtgagccgagattgcaccactgcactccagccgggtgacagagtgagactccatctcaaaaacaaacaaactaaggtatggatgcttcagacattacactatatcaaagtgctgactgttaaaaatgatcccaaactaacggtagataaatttatttgtacataactttaaaaggagtagaagattttttggaagtttgtaattacattcaaagtatactttttttgtttgtttgttttccttgagacagagtctctctctgtcgtccaggctggagtgcagtggcacaatctcagctcgctgcaacctctgcctcctgggttcaagcaattctcctgcctcagcctactgagtagctgagattacaggtgcacaccaccacgtccggctgacttttgtatttttagtagggacggggtttcaccatattggtcagggtagtcttgaactcctgacctcatgctctgcccagcttggcttcccaaagtgctgtgattacaggcttaagccacagcgcccggcccaaagtgttcttttttccttgaaaagaagtacagattttttaaaaagctaatattgctgtgattcaactctctagttacttgatgctatttcttcatttctattgtattcacatgtgaaagcatgtgatcagttgtcacggcatcaaagataggagagtttctttttttttaggtgggcattatttatgaccttttctttggaagagtaaggacattaaaatgtaacatgcatgatgaaaatctaagtggagatggtatttgtggttaattatgatattgagtggtgcatgaggtaggtgtttagagtaatattcttttgcattatagtaagaacatttaagttttgttaaaattaaaaaattagtacgttattttactatttgtacttttatgtaataaaatgcagtacatttttaaattttca

SEQ ID NO: 203607 - DNA, 567 bp, Homo sapiens
  Payload ID: 20146
  Gene Name: zinc finger protein 708
  ENST ID: ENST00000601295
  CDS Start-End: 190-567
gctccggtctcgtcttcactgctgtttgtcctctgctcctagaggcccagactctgtggctctgtgacctgcaggtattgggagatccacagctaagactccaggaccctctggaagcctagaaatggtattgctgtgtctaatttagacctgatcacctgtctggagcaaggaaaagagccctggaatatgaagagacacgagatggcagccaaacccccagctatgtgttctcattttgccaaagaccttaggccagagcaatatataaaaaattctttccaacaagtgatactgagaagatatggaaaatgtggatatcagaaaggctgtaaaagtgtggatgagcataagttgcacaaaggaggtcacaagggacttaaccggtgtgtgacaactacccagagcaaaatagttcagtgtgacaaatacgtgaaagtctttcataaatattcaaatgcaaagagacataagataagacatactggaaaaaatcctttcaaatgtaaagaatgtggcaaatcattttgcatgctttcacaactaactcaacatgagataattcat

SEQ ID NO: 203608 - DNA, 590 bp, Homo sapiens
  Payload ID: 20146
  Gene Name: zinc finger protein 708
  ENST ID: ENST00000602023
  CDS Start-End: 396-590
gcggcttccgggtttggcgcggcctttgtctcttgctgcagccggagctccggtctcgtcttcactgctgtttgtcctctgctcctagaggcccagactctgtggctctgtgacctgcaggtattgggagatccacagctaagactccaggaccctctggaagcctagaaatggtattgctgtgtctaatttagacctgatcacctgtctggagcaaggaaaagagccctggaatatgaagagacacgagatggcagccaaacccccagatggagttttgctgttattgcccagactggagtgcagtggcctgatctcagctaactgaaacctccgcctcccgggttcaagcgatttctcctgcctcagccttccgagtaactgggattacagctatgtgttctcattttgccaaagaccttaggccagagcaatatataaaaaattctttccaacaagtgatactgagaagatatggaaaatgtggatatcagaaaggctgtaaaagtgtggatgagcataagttgcacaaaggaggtcacaagggacttaaccggtgtgtgacaactacccagagcaaaatagttcag

SEQ ID NO: 203609 - DNA, 2630 bp, Homo sapiens
  Payload ID: 20146
  Gene Name: zinc finger protein 708
  ENST ID: ENST00000598046
  CDS Start-End: 214-330
agctggggacagttcactcagacacgcagctggaccggacagggcggcttccgggtttggcgcggcctttgtctcttgctgcagccggagctccggtctcgtcttcactgctgtttgtcctctgctcctagaggcccagactctgtggctctgtgacctgcaggtattgggagatccacagctaagactccaggaccctctggaagcctagaaatggtgaaggtttttctttggaaactttacggagtgatgtgtcttcagccacccttcagttttttcctggtcctgggtttcagtactgtctggagtaaaccaagatacacatcatgactttttctgctagagtgtctagtgaatatcagctcctgggtcatttttctccctgaggacaacctgaggtattgctgtgtctaatttagacctgatcacctgtctggagcaaggaaaagagccctggaatatgaagagacacgagatggcagccaaacccccagctatgtgttctcattttgccaaagaccttaggccagagcaatatataaaaaattctttccaacaagtgatactgagaagatatggaaaatgtggatatcagaaaggctgtaaaagtgtggatgagcataagttgcacaaaggaggtcacaagggacttaaccggtgtgtgacaactacccagagcaaaatagttcagtgtgacaaatacgtgaaagtctttcataaatattcaaatgcaaagagacataagataagacatactggaaaaaatcctttcaaatgtaaagaatgtggcaaatcattttgcatgctttcacaactaactcaacatgagataattcatactggagaaaaaccctacaaatgtgaagaatgtggcaaagcttttaaaaagtcctcaaaccttacgaatcataagataattcatactggagagaaaccctacaaatgtgaagaatgtggaaaagcttttaaccagtcctcaactcttactagacataagataattcatactggagagaaactctacaaatgtgaagaatgtggcaaagcttttaaccggtcctcaaaccttactaaacataagatagttcatactggagagaaaccctacaaatgtgaagaatgtggcaaagcttttaaacagtcctcaaaccttactaatcacaagaaaattcatactggagagaaaccctacaaatgtggagaatgtggcaaagcctttaccctatcttcacaccttactacacataagaggattcatactggtgagaaaccctacaaatgtgaagaatgtggcaaagcttttagtgtattttcaacccttactaaacataagataattcatactgaagagaaaccctacaaatgtgaagaatgtggcaaagcttttaaccggtcctcacaccttactaatcataaggtaattcatactggagagaaaccctacaaatgtgaagaatgtggtaaagcctttaccaagtcctcaactcttacttatcataaggtaattcatactggaaagaaaccctacaaatgtgaagaatgtggtaaagcctttagtatattctcaatccttactaaacataaagtaattcatactgaagacaaaccctacaaatgtgaagaatgtggcaaaacttttaactactcctcaaattttactaatcataaaaaaattcatactggagagaaaccctataagtgtgaagaatgtggcaaaagctttattctgtcctctcatcttactacacataagataattcatactggagagaaaccctacaaatgtaaagaatgtggcaaagcttttaaccagtcctcaacccttatgaaacataagataattcatactggagagaaaccctacaaatgtgaagaatgtggcaaagcctttaaccagtccccaaaccttactaaacataagagaattcataccaaagagaaaccctacaaatgtaaataatgtgtcaaatcctttagtgtattttcaacttttattaaaacacaagataattcatactggagagaaatcctacaaatgtgataaatgtggcaaagcctttaactggctcttaatccttatgaaacaaaagataattcatactagagagaaaccctacaaatgtaaagaatgtggcaaagcatttaactggtccctaaatcttactaaacataaaaaaacttaaactggagagaaactacaaagctggaagacatcacagtaattctgacaacacctcaaacttttctaaacataaaataaatcatactggtgaggaactttaaaaatgcgaaaaatgtgacaaaatctttaaatgattgtcacacttgattgtaggtaagataattcttactagaaaaactcttacaagtgtgaagaatgtggcaaaatttttaatgaatactcacaccttattgccaggaaagcatttatacttgagaaaaattgtaccaatataaagactgtgaaaaagccattaatgtctgctcacatcttactcaacatcagagagtacttaaaaaaagtattataaatttaattactgtcaaaaagtatttcagaaaatataagcttttaaagtatttattttgaagacaaacattacaaataaaagaggattgtaataccttta

SEQ ID NO: 203610 - DNA, 2164 bp, Homo sapiens
  Payload ID: 20146
  Gene Name: zinc finger protein 708
  ENST ID: ENST00000611392
  CDS Start-End: 87-1673
ctagaggcccagactctgtggctctgtgacctgcaggtattgggagatccacagctaagactccaggaccctctggaagcctagaaatgggaccattgacatttatggatgtggccatagaattctctctggaggagtggcagtgcctggacacagcacagcagaatttatataggaatgtcatgttagagaattatagaaacctggtattcctgggtattgctgtgtctaatttagacctgatcacctgtctggagcaaggaaaagagccctggaatatgaagagacacgagatggcagccaaacccccagctatgtgttctcattttgccaaagaccttaggccagagcaatatataaaaaattctttccaacaagtgatactgagaagatatggaaaatgtggatatcagaaagtaaaagtgtggatgagctgtgacaaatacgtgaaagtctttcataaatattcaaatgcaaagagacataagataacatactggaaaaaatcctttcaatgtaaagaatgtggcaaatcattttgcatgctttcacaactaactcaacatgagataattcatactggagaaaaaccctacaaatgtgaagaatgtggcaaagcttttaaaaagtcctcaaaccttacgaatcataagataattcatactggagagaaaccctacaaatgtgaagaatgtggaaaagcttttaaccagtcctcaactcttactagacataagataattcatactggagagaaactctacaaatgtgaagaatgtggcaaagcttttaaccggtcctcaaaccttactaaacataagatagttcatactggagagaaaccctacaaatgtgaagaatgtggcaaagcttttaaacagtcctcaaaccttactaatcacaagaaaattcatactggagagaaaccctacaaatgtggagaatgtggcaaagcctttaccctatcttcacaccttactacacataagaggattcatactggtgagaaaccctacaaatgtgaagaatgtggcaaagcttttagtgtattttcaacccttactaaacataagataattcatactgaagagaaaccctacaaatgtgaagaatgtggcaaagcttttaaccggtcctcacaccttactaatcataaggtaattcatactggagagaaaccctacaaatgtgaagaatgtggtaaagcctttaccaagtcctcaactcttacttttactaatcataaaaaaattcatactggagagaaaccctataagtgtgaagaatgtggcaaaagctttattctgtcctctcatcttactacacataagataattcatactggagagaaaccctacaaatgtaaagaatgtggcaaagcttttaaccagtcctcaacccttatgaaacataagataattcatactggagagaaaccctacaaatgtgaagaatgtggcaaagcctttaaccagtccccaaaccttactaaacataagataattcatactggagagaaatcctacaaatgtgaagaatgtggaaaagcttttaaacggtacttaaaccttactacacataagataattcctgctggagagaaaccctacaaatgtgaagaatgtggcaaagcttttaaccacttttcaaaccttactaaacataattcataatggagagaagccctacaaatgtgaaaaatgtggcaaacattttaaccaatcatcaacccttactacacatatgttaattcatgctggagagaaaccctacaaatatgaagaatgtggcaaagcttttaaccaatcctcaaaacttactaagcataactcatactggagaaaaatcttacaaatgtgaagaatgtggtaaagcctttatccagtcctcaactcctactaaacataacataagctgcttacaactgtgaaagagaaaccctacaaatgtgaagaatgtgacaaagcctttaaccagtcctcaattcttaataaacataagaaaattcatattggagagaaaccccatgagtgtgaaaaatatggcaaaggctttagctagtcctcagttcttaacacacataagataattcatactggagagaaactctacaaatcagaaagatgtgataatgcttttgacaatacctcaaacttttctaacc

SEQ ID NO: 203611 - DNA, 4910 bp, Homo sapiens
  Payload ID: 20147
  Gene Name: zinc finger protein 709
  Uniprot ID: Q8N972
  ENST ID: ENST00000397732
  CDS Start-End: 173-2098
ggaggggcgctgcgcaaacggcgagggcgtggctaccagccgctgcgctccgctctggggtctcctcaccccagaaggccctcaggtggaggaagggcctcaggtggaggtaggacctgtgctggccgcgggagaggtaaacagaacaccaggacatcccagagtctgggaaatggactcagtggtctttgaggatgtggctgtgaacttcacccaggaggagtgggctttgctgggtccctctcagaagaaactctacagagatgtgatgcaagaaacctttgttaacttggcctctataggggaaaactgggaggagaagaacattgaagatcacaaaaatcaggggagaaagctaagaagtcatatggtagagaggctctgtgaaaggaaagaaggtagtcagtttggagaaaccatcagtcagactccaaatcctaaaccaaacaagaaaacttttactagagtaaaaccatatgaatgtagtgtgtgtggaaaggactatatgtgtcattcatctcttaataggcacatgagatctcatactgaacatagatcatatgaatatcacaaatatggagagaaatcatatgaatgtaaggaatgtgggaaaagattcagctttcgaagttcatttcgaatacatgaaagaactcacactggagagaaaccctataaatgtaaacagtgtggtaaggctttcagttggcccagttcctttcaaatacatgaaagaactcatactggagagaaaccttatgaatgtaaggaatgtgggaaggccttcatttatcacacaacctttcgaggacacatgagaatgcacacaggggagaaaccctataaatgtaaagaatgcgggaaaacgttcagtcatcccagttcttttcgaaatcatgaaagaactcactctggagagaaaccctatgaatgtaaacaatgtggaaaagctttcagatattaccaaacttttcaaatacatgaaaggactcacactggggaaaaaccctatcagtgtaagcaatgtggtaaagctcttagttgtcccacatcctttcgaagtcatgaaaggattcacactggagaaaaaccctataaatgtaaaaaatgtgggaaagccttcagttttcctagttcctttagaaaacatgaaagaattcatacaggagagaaaccctatgattgtaaggaatgtgggaaagcattcatttctcttccaagctatcgaagacatatgataatgcacactggaaatggaccttataaatgcaaggaatgtgggaaagcctttgattgtcctagttcttttcaaatccatgaacgaactcacactggagagaaaccctatgaatgtaaacagtgtggtaaagccttcagttgttccagttcctttcgaatgcatgaaagaactcacactggagagaaaccccatgaatgtaaacaatgtggtaaagccttcagttgttccagttctgttcgaatacatgaaaggactcacactggagagaaaccctatgaatgtaaacagtgtggtaaagccttcagttgttccagttcctttcgaatgcatgaaagaattcacactggagagaaaccctatgaatgtaaacagtgtggtaaagcctttagtttttctagttcctttcggatgcatgaaaggactcacactggagagaaaccctatgaatgtaaacaatgtggtaaagccttcagttgttccagttcctttcgaatgcatgaaaggactcacactggggagaaaccctatgaatgtaaacagtgtggtaaggcgtttagttgttccagttccattcgaatacatgaaaggactcacactggagagaaaccttatgagtgtaaacaatgtggtaaggccttcagttgttctagttctgttcgaatgcatgaaaggactcacactggagtgaaaccctatgaatgtaaacaatgtgacaaagccttcagttgctcacgttcctttcgaatccatgaacgaactcacactggagagaaaccctatgcatgtcaacaatgtggtaaagccttcaagtgttcccgttcctttcgaatacatgaaagagttcatagtggagagtaaccctatgtatataagcaatatggcaaagttttcagttgtcctatttcctttttttttttttttttttttgagttgaattctcactctgttgccctggctggagtgcagtagagtgatctcagctcactgcaacctctgtctcctgggttcaagcgattctcctgcctcagcttcctgagtagctgggacaacaggtgtgaacgaccatgcccacttaatttttgtatttttagtagagatggggtttcgccatgttggccaggctggtctcgaactcctgacctcagacgatccacctgccttggcctcccaaagtgttggattacaggtgtgagccaccacacccggcccccatttccttttgaagacatgaaattattcatatttcagagaaaccctataagacatgggaataccttcagttatttacatgtgaatatgaggaagcattcatactggacaggaaaccctgcgaatgtaggcagtgtgggaaaaccttcaatggtcatatgaccttttaaggaccatgagaaggcatatgaagtgtaaagaattttcatatgccctataaatgtaaagaatttataaccttaaaaatgtaaagaatgtggaaaaccctataaatgtaaaaaatgtagaaaaacctttatttgtcttagtttacttggaaaccatgaacaaactcacactggaaagcgacttcttaaatatagacattgtgagaaagccttcagttggcccacatactaatatgtgagaatgcagactggatagaaatcctataaaagtgagatatagcaatgttttccattttaacaaatgctcatgtgatactcccttatgtgtgaaacttcaatctcatgttgaaactcccactagggaggtactgtataaatgtagataatatgggaaagcctgatgcaaattaattcatgtatattgttctagaaaattcacaacatgtcagaaatgtgataaaacatattatcagttactgattcttaaaatggatctctgaattatggatttctattactttcacaaaagaacactgagatgagataattctgtaagctcttatacagttgtacacaagttgaattgatagtattttttcattaaatcagtttctgaaattttgtctttccatattgaagtctgttagattcatgagtgaattgaagtgtatttataataagctagcagttttgatttttatgtattttttagttgtgctgtaatgggccatcaaaaaatgacaatttggtaatttttaggatttcctactggccttatgtggcaggtactagatatcattatatgtatttcatctttctgaccaaaagaggcttttttagaggaagacagagtacccttttttctattttttatgctaaaaaataatcataataaatttttgagtctgcaaagtttatcatacagtatactctctcattggaattattattttcatcttctgtttgctgtttgtaattccttctggctgtgatttgaataatagactttgtattaataagagagatctgagatagaaccatataacctatagctggaaatggctgtcctggattgtgttaacatgggttatgttgtgacctatgttttctataatctaaccttttatggctccacggtataattcaccaatagcctacttgcaggagatatggaaggcagaagtgaagaaagcattagtcaggttttatagccaccatatgtggagacagatggatgcataggagcttcagggacacctgcttccaccacattgtcctgatcctttgctctgccaattgagagtattcttagaaccaccactaactgcttgactgccatattttccttccttccttccttctttctttccctttccctttcttttctttctttactttctttttccgagatggagtcttgctctgtcgcccaggctggagtgcagtggtacgatcttggctcactgcaacctctgccttctgggttcaagcaattgtcctgccccagcctcccaagtagctgggattataggtgcccaccaccaagcccagctaaattttttttgtatttttagtagagacagggtttcatcattgttggccaggctggtctcaaactcctgacctcatgatctgcccaccttggccttccaaagtgctgagattacaggcgtgagccactgtgcatggccccagctgccatattttcaaagatgtagttttccacaaattgtcttcaaaagttctactcaaagatgcactgcagtttggattttcctagaaactctaatgtgtccaccaggcaaccatttagactcttaaggttgggaatattctctgatgctctgactcacctcatctctaggttgaatttatccaaggtattatttatgtaataaacaccatgttttgttaacagtaccagtgactatgtgtttctgattccaccgtgacaactacagtggtgcagtcaaaaagaactacatgggtgtctgcttctccactgcactgtgcagggaatgcacttacccagtcctacagtgtaagaataagcaccttcctaatatcaagcagattgtcggtgtttcctattacagttgaatgtcatctctcagtacattttcaattttgtttcattatatgtgattaaaaaccatgtgtatgtttttgttgaacaaaagcttctgtagatgtttcttagaaatattttattaacttttcaaataacttgtatgctatcacttgtctatttaattttctgcaaggatatattaaaatattccattgcaattata

SEQ ID NO: 203612 - DNA, 400 bp, Homo sapiens
  Payload ID: 20147
  Gene Name: zinc finger protein 709
  ENST ID: ENST00000455490
  CDS Start-End: 1-400
gtggcgccgctgcagtccctgtctgctgtgaccagctctgaccaaaggaggcgtagtaaggaagccaggacacctggaacccgggatacggactcagtggtctttgaggatgtggctgtgaacttcacccaggaggagtgggctttgctgggtccctctcagaagaaactctacagagatgtgatgcaagaaacctttgttaacttggcctctataggggaaaactgggaggagaagaacattgaagatcacaaaaatcaggggagaaagctaagaagtcatatggtagagaggctctgtgaaaggaaagaaggtagtcagtttggagaaaccatcagtcagactccaaatcctaaaccaaacaagaaaacttttactagagtaaaaccatatgaatgta

SEQ ID NO: 203613 - DNA, 5428 bp, Homo sapiens
  Payload ID: 20148
  Gene Name: zinc finger protein 71
  Uniprot ID: Q9NQZ8
  ENST ID: ENST00000328070
  CDS Start-End: 235-1704
tcattgtcctggcagagcggcgagccggtgagtgtggctgcggggtcgcgcccaccctctacctgtgccgggggccggaacctggccccggggagggcgcggcctcggggagacggcgtgcaggcccagcactgttggtcaccgcaggcctgtcttcctattcaccgtgggcagcagagggatggctgctcagctgctgactgatgaggcactgactgggagactagacctgaaatgaaagagttggatccaaagaatgacatttcggaagacaagctctccgttgttggggaggccacggggggacccacgaggaatggtgccaggggtcctggctcagaaggagtgtgggaaccaggcagctggccagagaggccgcggggagatgcaggtgcagagtgggagccattgggaattccccaggggaacaaactcttagggggctcagtacccgcatgtcatgaactgaaggcatttgccaaccaaggctgtgtcctggtcccaccacggctggacgaccccacagaaaagggggcctgtccacccgtaaggcgtggcaagaacttctccagcacttcagacctcagtaagccccccatgccctgcgaggagaagaaaacctacgactgcagcgagtgtggcaaggcctttagccgaagctcgtccctgataaagcaccaaaggatccacacgggagaaaagccgtttgagtgtgacacctgtgggaagcacttcatcgagcgctcgtccctcaccatccaccagcgggtgcacacgggcgagaagccctatgcctgcggggactgcggcaaggccttcagccagcgcatgaacctcactgtgcaccagcgcacgcacacgggcgagaagccgtatgtgtgcgacgtgtgtggcaaggccttccggaagacttcctctctcacccagcacgagcggatccacacgggggagaagccctacgcgtgcggggactgcggcaaggccttcagccagaacatgcacctcatcgtgcaccagcgcacgcacaccggggagaagccgtacgtgtgccccgagtgcgggcgagccttcagccagaacatgcacctgaccgagcaccagcgcacgcacaccggggagaagccgtacgcctgcaaggagtgcggcaaggccttcaacaagagctcctcgctcaccctgcaccagaggaaccacaccggcgagaagccctacgtgtgcggcgagtgcggcaaggccttcagccagagctcctacctcatccagcaccagcgcttccacatcggcgtgaagccgttcgagtgcagcgagtgcggcaaggccttcagcaagaactcctcgctcacgcagcaccagcgcatccacaccggcgagaagccctacgagtgctacatctgcaagaagcacttcacggggcgctcgtccctcatcgtgcaccagatcgtgcacaccggggagaagccctacgtgtgcggcgagtgcggcaaggccttcagccagagcgcctacctcatcgagcaccagcggatccacaccggcgagaagccgtacaggtgcggccagtgcgggaagtccttcatcaagaactcctccctcactgtgcaccagcggatccacacgggcgagaagccctaccgatgcggcgagtgcgggaagaccttcagccgcaacacgaacctgacgcgccacctgcggattcacacctgagcgcctctgtgcagggctctcactggcggtgcccaggacggacgccagatggctgcgcgctttgtcagcagtgctgtgagaagttctcccctggggtggggactcggggtcaggggagctcaggaatgtggggttgtggaggggctggctgatcacacatgccccctccttactgagcctcagaaagcaagcccctcggtgtctgacgtatctggggacacttcaaggttcactgtagctgagccatggccgctggtaacagacatcagggttccagactagccctcttgagtaactgtcctagagctgggacaggtcacgcctgcctccacatctctgtttcttcagcgggaaagtggagctggtggaggggagggaggagacatctccctctttgtcagatacatcctggagtccagatgcagcttgtcaccatctgcattttctccgtgggttgggagcgtgagggccttcctatccctccacccaccgtttccctgcagtgcacgctggcagccaccaagctaggaagtggcaggagtttgccggttgtttgtgaggggaaaaatttttttttcagagttagcaaataacagtaactactgctttgaatgccaaagtttcttagagtggtctgttacgttttttaaaaataaaacttttaattaagggagactatgttattttaaacagtcttctgttttggccagttgtctggtcaaaatcggcttcagtgattgtgggaggggcaagaaggaaaagaaacagcagcaggtttgatattcagaaagaaatatgcatggattcaataagtatatacatctgagcacagattatttttatagtgatttttgcagctaaatgtgaaggcaactgtcttaagtcccttcctgctgctgtaacaaaagaccttagactgggtaatttataaacaatagaaatttgtcactcatggttctggatgctgggaagtccaagatcaaggctctggcagatttggtgtctgatggggtatgttcttcataggtagtgcttgtgtcttgatgtgtgtcttcacgtggttgtaaacggcagacttcctcaggccccttataagggtgctaatcccagtcacaagggccctgacctcatgacctcccaaaggtcctccctcttcatactgttacattggggatcaagtttccaatatgtgaatacagggaagcaccaacagaccatatcagtaacttcgagtgagtttcctaaggccgactgaagctctgtttacacataagagtgttccccaaagtgcactttctctggggccttttaggccatacttttaattttgttatttgatactactggttgctaatgttctggcatttccagttgttccacactccctgacactggtgtacacaaataaataatacagaaaaaaaattatatcagcaagcacattctgcaaataagaaaaacagccactcgggcacgtataaacaaggtggaccgtttttcaaattctggcagtcaagtgggcctcagggtgggtttgattcaggctctcatcattggagccatagctgtggttctctgtgatgctctggctctcccttcatacttcttaacatcatcctcaggctggcttcccacgtgggattgtggtggtttccagcagcgagtcttgatcagacattgctttagttgcatctgttgtgggaataaatgagaatatgtatgcactgcagagaatggagtgttaaaacagtcaacaaatgttagctaatatgtacacaagattttactactctttagcagcaaaatggaggggaagaccttctaaggccctttggagagatgaaatggctcatttaaccctcacaagatcctcgaggtagggattcatgtgcatgtcgtatagataaggaatctgaggttcagtgaggcaaggtaagcttcctgagggcacacaacatggaagtggaggggacagggtgtgagctggggtccacctgggctccgaggtccgtgctccttgcctacactggactacttctagagatggacatattgaatttctcaggacttgactcctggccttggtttcctggactccccagtgtgtgaagcagagatgggatcgaggctgcaccaccaccatccccctctcccatccagagaaccagccgggccacctctcaggtccctcctgtttcttttctctgcaacccaagctgatgtggagggcattgaggctcctctggggggatgctgtggtaccaggtgggtctcacatccctggtctcccgcctcctgggcaagctccccactcagggctccacgtttccccaagaggaaccctgaggtggctggaataatggccacattgacggagtcacttgtccaactctgagggggcgctctcatcacccccactctacagatggggaaacaggctcgcagaggttcaggcacctgcccaaggtcacacagctgctggattcaaacccattctgactccagaagctggactgcagtccacggcaccactccacccaccagttcctcagtcaggtacttactgaagccaaattaaatttacccccctgaaaatgtgggtttggcagggatcaagcaggtcaggaacctgctttttaacaagtcttctatcccatacatctgtccaaggcactatttggggttatgtgctggccttcgagttcaccctcactgggccctgtgtccctgtgtccctgtgtccccaggcctgacccaagcctggccttgaggtagaggtcatgggtgctgggtggggtctgaatgacccctttatcacttggagtaaatgccaaactcctcacaaacccctgtgtgacgcagcctctcccagctcccgtcccgctccccctgctcactctgcttcagccacactgtgctttcgttcagtcccagcgctggcccagcccactcccaccgcaggggcctctcccttcctggcccagcacccacgctgagcttcctcaggtccctgatgctcagtttcacgtgtcggcctggctgggctccagtgcccagcaggcccatcgcagtgagtcccggtggtgctgagaagacactttatagatgtggatgtcacccatgtcagctgactttaagtaaacgattattatctgcaatgtgtgtgggcctcatctaatcagttgaaggccttaagagcaaaaccagtttcttggagagtaaaaaactctgcctcaggattacagtgccaactccggcctgagtttccagcctaccagcctaccttatggatttgggacttgccagctcccacagtagcatgacccggttatttaaattaaatctatttatatataaaagtatacatatgccatatgtataacaagaaatatgaggtatataaaaggatatgtataagatatatatagggtagggcatggtgacccacacctgtaatcccagcactttgggaggccaaggtgggaggattacttgagaccaggagtttgagaccagcctaggcaacatagcaagacctcatctttacaaaacgttagaaaaattagccaggtgtggtggcgtgtgcctgtggtcccagctactcaagagacggaggtgggaggattgcccgagtccaggaattagaggttgcagtgaggtatgatcatgccattgcactccagcctgggtgacaagggaagactctctcttaaaaaaaaaaaaa

SEQ ID NO: 203614 - DNA, 783 bp, Homo sapiens
  Payload ID: 20148
  Gene Name: zinc finger protein 71
  ENST ID: ENST00000599599
  CDS Start-End: 398-783
aggcgcactgccgtcgggcgggcctagcgggcgcggtcattgtcctggcagagcggcgagccggtgagtgtggctgcggggtcgcgcccaccctctacctgtgccgggggccggaacctggccccggggagggcgcggcctcggggagacggcgtgcaggcccagcactgttggtcaccgcaggcctgtcttcctattcaccgtgggcagcagagggatggctgctcagctgctgactgatgaggcactggaatcagtgacgttcagggatgtgactgtggacttcacccaggaggagtggcagcagctggagcctgcccagaaggacctgtacagggatgtcatgctggagaactacaggaacctggtctcactggactgggagactagacctgaaatgaaagagttggatccaaagaatgacatttcggaagacaagctctccgttgttggggaggccacggggggacccacgaggaatggtgccaggggtcctggctcagaaggagtgtgggaaccaggcagctggccagagaggccgcggggagatgcaggtgcagagtgggagccattgggaattccccaggggaacaaactcttagggggctcagtacccgcatgtcatgaactgaaggcatttgccaaccaaggctgtgtcctggtcccaccacggctggacgaccccacagaaaagggggcctgtccacccgtaaggcgtggcaagaacttctccagcacttcagacctcagtaagccccccatgccctgcgaggagaagaaaac

SEQ ID NO: 203615 - DNA, 4617 bp, Homo sapiens
  Payload ID: 20149
  Gene Name: zinc finger protein 710
  Uniprot ID: Q8N1W2
  ENST ID: ENST00000268154
  CDS Start-End: 252-2246
tccagggagggagagagcgcgagcgagagagcgagcgagaggaggggggagagagagaaagagaggagccggagggagggcggcaggagcaggcggcgggcgcgcgtggaggcgggcggcgggcgcacagcagcagcccgggcggtgggcagccaggagcccccggcccggcccggcccggcccgccgagggccccagcgcaggagccgcgcccggacccaggcgatgccctcctagctagccgtcacgggatggagggcttcatggactcagggacacagacggacgccgtggtggtgctgtccttggctcaggccgccgtgcttggcctggtctccgaaaatgagctctttggagctaccataagcgccgaggccttctacccggacctggggcccgagctttcaggggcagccatgggagagcccgagccaccaggccccgacgtctaccagctggcctgcaacgggagggccttggaggagccggcggaggaggaggtgctggaggtggaggcagcctgtgagaagcacacccggcggaagacgcggccacctgtgcggttggtgcccaaggtcaagttcgagaaggtggaggaggaggaacaggaggtctatgaggtttctgtgccaggtgacgacaaggacgcagggccagcagaagcccccgccgaggcggccagtggcggctgcgacgccctggtgcagagcagcgccgtcaagatgatcgacctcagcgccttcagccgcaagccccggacgctccggcatctgccccgaaccccgaggccggagctgaacgtggccccatatgaccctcacttcccggccccggcccgggatggcttccccgagcccagcatggcgctgcctgggccagaggccttgcccacagagtgtgggttcgagccaccccacctggcccccctgagtgaccccgaggcccccagcatggagtccccggagcctgtcaagccggaacagggcttcgtgtggcaggaggccagtgagttcgaggctgacacggcgggttcgaccgtggaacgccacaagaaggcccagctggatcggctggacatcaacgtgcagattgacgactcctatctggtggaggcgggcgaccgccagaagcgctggcagtgccgcatgtgcgagaagtcctacacgtccaagtacaacctggtgacgcacatcctgggccacaacggcatcaagccacactcgtgcccacactgcagcaagctcttcaagcagcccagccacctgcagacgcacctgctgacgcaccagggcacccggccccacaagtgccaggtatgccacaaggccttcacgcagaccagccacctcaagcgccacatgctgctgcactcggaggtcaagccctacagctgccacttctgcggccgcggcttcgcctaccccagcgagctcaaggcccacgaagtgaagcatgagagtggccgctgccatgtctgcgtcgagtgcggcctggacttctccaccctgacccagctcaagcgccacctggcctcccaccagggccccaccctctaccagtgcctcgagtgtgacaagtccttccactaccgcagccagttgcagaaccacatgctcaagcaccagaacgtgcgacccttcgtgtgcactgaatgcggcatggagttcagccagattcaccacctcaagcagcactccctcacccacaagggcgtgaaggagttcaagtgcgaggtgtgtggccgggagttcaccctacaggcgaacatgaagcggcacatgctgatccacaccagcgtccggccctaccagtgccacatctgcttcaagacctttgtacagaagcagactctcaagacccacatgattgtacactcgcccgtgaagccattcaaatgcaaggtgtgcgggaagtccttcaaccgcatgtacaacctgctgggccacatgcacctgcacgccggcagcaagcccttcaagtgcccctactgctccagcaagtttaatctcaagggcaacctgagccggcacatgaaggtcaagcatggcgtcatggacatcggcctggacagccaagaccccatgatggagctgacaggcactgacccttcagagctcgacggccagcaggagatggaggacttcgaggagaacgcctacagctatgcgagcgtggacagcagcgccgaggccagtgtcctcactgaacaggccatgaaagagatggcctactacaatgtgctatagcgcaagctgggccacccctaacgggggccgggggcgagggcatgggggtgagacccatgggctgcaggctgcacctcctgcagccgagaaacaagctactgccccactgttctgagccctccctccccgagtcatttgcaccactagggacctttagaccaaatggagactgtactactggccccggctgtgagccagcacaggcccaggcatcccagcaagggaaggagaacacgcgaggcccagatctgggtctccctggcctgcttccgtggggagtgggagaagtggggccactggggacaggtcacaagggcaccggccctcggggtctctccaggcccagcagagctcttcaggggtcctgacactggaagaagagaccacttgagccatgtctttttcacggccaactcctgcctctaaggatgtctgagctcccctctggccagtactgcccacctctaccttgtccaggcccccttccccgccctgtcgacggaccgccaggcagggcactctgccttctacctcccggggtctcccatgcgctcctcaagccaggtgtgcacgtggccctggccctggcctgcaggacagctggggggcacccagcccccagaagacccctgtcctacatccctttctggaagtgagtgtccctacagtggattgcaacacatgtcgtccacttcgaccctagctggagtgcctcaccagggggccccactaggaacaaagccaggacaggccccgcgtcaggcacacactaacaaaaccagaagcatggggcagggcagggcggagtgagggcatcacaggggaccaagaagggctgtccttgggggaggcccaggaccacctgtcggggagggggaccgcagtcatttctcattcctcagtgtccaccttgcgacggggatagccacgagtcagcagcttcccggaaagagcaacgtattttaaaaaggaaagtaaagcccacagagggaaatcaagggtttttttgagcaaagggggtcttctgaaggtaacttattatttttttctttccaactgtgtgtcacctatgaccttttctgatggagatgcattttctttttccaagcgtaagcttcctaatgtgctgtgcgtgcttcctacccacccaccccgagcagcctggccgggcaggactggggctccatggggactgtcaccctggccctggaggtgcagccgctggcagcagcctcagcaggctggggtgggaggcaggagaaggcagagctgggaagccctccacccctgcctggctcctgcagtcgctgacttgctctgtcccatgtcccatcctcggctgtcagggctgctgactctgctcagccaacagctagctccctcgctcgcctgctctcttcccctctgttcccacgccagctcctgcccctggaaccagagatgacaggcccagggcagtgaaatagcacattcaggaactctagggcacccggacccccccacccacttgcctcctgaggcctcagtggggaggggcaagcaggggtcttccccaaaggcacagatgaagccactagcttcagcctagaaacccggagaagggaacagcctgcggtgggaggaaccaatctgcagcgcagccacccccaaggctggatccttaagtgaaggaccaagccaggcctcagggtgactgtgatcaggactgaggggtggacaaggtggcccaagtatggcttccagaccccgaagccccacgacctcccaggtgcccgccatgatgaccctcaggtggcagtgaccccgtcactgtataagacattttctcctgctgagcagaaggcatcatcccctgcaactacctcttcccacgtctttctcccctggtaccaaaaagaaccctgtacctctcctcctcctcctccctcctgccagtgcagtggccttggtcttggaaactgaagggagaaggtctggcccccagggtggggctctcctttccctcccccagccccgccgtcagcactggccctctgtgaggttcgatacttgaacgccccctgccctgtgccttggacctgggcaaagctaggaggaggaaacagcacaactcacagtttgagctggggggtggtcttggcaaggctcctgtctgtacccctccctaaccttctcaaaagaggtgcacagcctctcgggtgacttggaaactcctggacaaattccattctaacttattttgacatgtatacaaaccaactgtttagagattccacttgtgcaaagccctactgtgtttttatgttcctgtttaaaagagaagtttacttagcaataattataaataaatgaatattctttagtgaggtga

SEQ ID NO: 203616 - DNA, 332 bp, Homo sapiens
  Payload ID: 20149
  Gene Name: zinc finger protein 710
  ENST ID: ENST00000559419
  CDS Start-End: 96-332
ttttcctaattggatggagctgtggggcgtgagcaccagcgtcagatcggggccctcaggctaccagcgatgccctcctagctagccgtcacgggatggagggcttcatggactcagggacacagacggacgccgtggtggtgctgtccttggctcaggccgccgtgcttggcctggtctccgaaaatgagctctttggagctaccataagcgccgaggccttctacccggacctggggcccgagctttcaggggcagccatgggagagcccgagccaccaggccccgacgtctaccagctggcctgcaacgggagggccttggaggagccg

SEQ ID NO: 203617 - DNA, 513 bp, Homo sapiens
  Payload ID: 20149
  Gene Name: zinc finger protein 710
  ENST ID: ENST00000559360
  CDS Start-End: 1-482
accccagcgagctcaaggcccacgaagtgaagcatgagagtggccgctgccatgtctgcgtcgagtgcggcctggacttctccaccctgacccagctcaagcgccacctggcctcccaccagggccccaccctctaccagtgcctcgagtgtgacaagtccttccactaccgcagccagttgcagaaccacatgctcaagcaccagaacgtgcgacccttcgtgtgcactgaatgcggcatggagttcagccagattcaccacctcaagcagcactccctcacccacaagggcgtgaaggagttcaagtgcgaggtgtgtggccgggagttcaccctacaggcgaacatgaagcggctggccaaggctgagacttcgttggggtgggctcaggtctggaaggggggtaccctggaaggccatgatgacaataacgatgggatatttatgtcttcttcaaaggacttaaatgagatcacgtaaacaatataataaaaatcataactaacattta

SEQ ID NO: 203618 - DNA, 1191 bp, Homo sapiens
  Payload ID: 20149
  Gene Name: zinc finger protein 710
  ENST ID: ENST00000558883
  CDS Start-End: 1-1164
aagcgctggcagtgccgcatgtgcgagaagtcctacacgtccaagtacaacctggtgacgcacatcctgggccacaacggcatcaagccacactcgtgcccacactgcagcaagctcttcaagcagcccagccacctgcagacgcacctgctgacgcaccagggcacccggccccacaagtgccaggtatgccacaaggccttcacgcagaccagccacctcaagcgccacatgctgctgcactcggaggtcaagccctacagctgccacttctgcggccgcggcttcgcctaccccagcgagctcaaggcccacgaagtgaagcatgagagtggccgctgccatgtctgcgtcgagtgcggcctggacttctccaccctgacccagctcaagcgccacctggcctcccaccagggccccaccctctaccagtgcctcgagtgtgacaagtccttccactaccgcagccagttgcagaaccacatgctcaagcaccagaacgtgcgacccttcgtgtgcactgaatgcggcatggagttcagccagattcaccacctcaagcagcactccctcacccacaagggcgtgaaggagttcaagtgcgaggtgtgtggccgggagttcaccctacaggcgaacatgaagcggcacatgctgatccacaccagcgtccggccctaccagtgccacatctgcttcaagacctttgtacagaagcagactctcaagacccacatgattgtacactcgcccgtgaagccattcaaatgcaaggtgtgcgggaagtccttcaaccgcatgtacaacctgctgggccacatgcacctgcacgccggcagcaagcccttcaagtgcccctactgctccagcaagtttaatctcaagggcaacctgagccggcacatgaaggtcaagcatggcgtcatggacatcggcctggacagccaaggtgggtgggccaagcgcaatggacagagcaggaatgataccaacatgacgcactcaggagcctcctgcccagttagaggagtggggaggctggccaaggctgagacttcgttggggtgggctcaggtctggaaggggggtaccctggaaggccatgatgacaataacgatgggatatttatgtcttcttcaaaggacttaaatgagatcacgtaaacaatataataaaaatcataactaaca

SEQ ID NO: 203619 - DNA, 2887 bp, Homo sapiens
  Payload ID: 20150
  Gene Name: zinc finger protein 711
  Uniprot ID: Q9Y462
  ENST ID: ENST00000276123
  CDS Start-End: 509-2794
gccatccagagcgcggtcacagtccgactggcggcacggaggcggcggcggcggcggcggcggcagcggcggcggcagcggcggcggcagctgtagctgcagcagcaggtaaagagagcgttttcccaaagaaaataacatagcacagaaggaaaaataaaaagaaattgctgcagattttactttatgtgagaaaatctacaatttcttcgagacactcatataaaggaagcagtcatgtttcatgagtcctcaaaactgagacaagagaatgtagtagagtgaggccagaagtccttactggttcaaagaactccggggaaactgggatagaacattttacattataagtagaaccctgggagccagaggtgaatacaagtttatctgcagagctccgctgcagggctgatctgggtctggaagaaatggatgagagccagtggatgaaattcactaatactagacatctgagtcctctaatattggtgaatgaactttgctaagtatggattcaggcggtggaagtcttggattgcacacgccagactctagaatggcccataccatgattatgcaagattttgtggctggaatggctggtactgcacatatcgatggagaccatattgttgtttcagttcctgaagctgttttagtttctgatgttgtcacagatgatgggataactcttgatcatggccttgcagctgaagttgtccatggacctgatatcatcacagagactgatgtagtaacagaaggtgtgattgttcctgaagcggtacttgaagctgatgttgccattgaagaggatttagaggaagatgatggtgatcacatcttgacttctgaactaattacagaaaccgttagggtaccagagcaggttttcgtggctgaccttgttactggtcctaatggacacttagaacatgtggtccaagattgtgtttcaggagtcgactctcccacaatggtatcagaggaggttcttgtaactaattcagatacagaaactgtgattcaagcagctggaggtgttcctggttctacagttactataaaaaccgaagatgatgatgatgatgatgtcaagagcacttctgaagactacttaatgatatctttggatgatgttggagaaaaattagagcatatggggaatacaccattaaaaattggcagtgatggttcacaagaagatgctaaagaagatgggtttggttctgaagttataaaagtgtatatatttaaagcggaggctgaagatgatgttgaaataggtggaacagaaattgtcacagagagtgagtacaccagtggacattcagtagctggagtgcttgaccagagccgaatgcagcgggagaagatggtttacatggcagttaaagattcttctcaagaagaagatgatatcagagatgaaagaagagtttcccgaaggtatgaagattgtcaagcatcaggaaatactttggactcagcattagaaagcagaagtagtacagcagcacagtaccttcaaatttgtgacggcattaatacaaataaagtacttaaacaaaaagccaaaaagaggagaaggggagaaaccaggcagtggcaaacagctgttataataggtcctgatggacagcccctcacagtgtacccttgccatatttgcacaaaaaagtttaaatccaggggattcttaaaaagacacatgaagaatcatcctgatcatttaatgagaaaaaaatatcagtgtacagattgtgactttacaactaacaagaaagtgagtttccataaccacttagaaagccataagctcataaacaaagtcgacaaaacccatgaatttacagaatacacacgaagatacagagaggctagtccactgagttccaataaacttattttaagagacaaggagccgaagatgcacaagtgcaaatactgtgactatgaaactgcagaacaaggactgttaaacaggcatttgttggccgttcacagcaagaattttcctcatgtttgtgttgagtgtgggaagggttttcgacatccttctgaactcaagaaacatatgagaacccatactggtgagaagccatatcagtgtcagtattgtattttcaggtgtgcagatcaatcaaatctgaaaactcacattaagtctaaacatggtaacaatttgccatataaatgtgagcattgtccccaagcatttggtgatgagagggagcttcaacgccatctggatttgtttcaaggacataagacacaccagtgtcctcattgtgaccataagagcaccaattcaagtgaccttaagcggcacatcatatctgtccatactaaggattttcctcacaaatgtgaggtctgtgataaaggttttcatcgtccttctgagctcaaaaagcatagtgatatccataagggtaggaagattcatcagtgcaggcactgtgactttaaaacatccgatccatttattcttagtggccatatcctttcagttcatactaaagatcagccattgaaatgtaaaaggtgcaagagaggattcagacaacaaaatgagctaaaaaaacatatgaagacccatactggaaggaagatttaccaatgtgagtattgtgaatacagcactacagatgcatctggctttaaacgacatgtgatatcaatacatacaaaagactatccacacaggtgtgaattctgcaagaagggattccgaagaccatcagaaaaaaatcagcatattatgaggcaccacaaagaggctcttatgtaataagatcaatataaagaaagaagctatttaggagatatgatatgctacttgggagaaaactctcactaactgtctcaccgggtttcaaagctt

SEQ ID NO: 203620 - DNA, 4844 bp, Homo sapiens
  Payload ID: 20150
  Gene Name: zinc finger protein 711
  Uniprot ID: Q9Y462
  ENST ID: ENST00000360700
  CDS Start-End: 887-3310
acactaaaacaccaccattttggttcccaaccgtctcccacgtagcggggcagaggaagctggaggaggctgaggggctgggcagcacggcgtgggtagcagcggtggcgaccgctgcaccaagtaaagagagcgttttcccaaagaaaataacatagcacagaaggaaaaataaaaagaaattgctgcagattttactttatgtgagaaaatctacaatttcttcgagacactcatataaaggaagcagtcatgtttcatgagtcctcaaaactgagacaagagaatgtagtagagtgaggccagaagtccttactggttcaaagaactccggggaaactgggatagaacattttacattataagtagaaccctgggagccagaggtgaatacaagtttatctgcagagctccgctgcagggctgatctgggtctggaagaaatggatgagagccagtggatgaaattcactaatactagacatctgagtcctctagtaatgtataaatatcctaactattgtttgttgtcatctcgttcttcttttataacctatgttttaactggaacttttagcactgcagttttgttgttttgctttcttctaccacttccctatggctcatcagcttgactgtgcctttgtctccattatttttggtttacttccacttggcacttcttttatttatggttgtcacataaagcatctaaccatggtttttctttgttttgctttcttttgtaataagctttccacacttggttgaaaggcatattgtcaattgcatttttttctcaaaacaactaactttggactaaatatattaaactattttaaaagccatttcttttgcagatattggtgaatgaactttgctaagtatggattcaggcggtggaagtcttggattgcacacgccagactctagaatggcccataccatgattatgcaagattttgtggctggaatggctggtactgcacatatcgatggagaccatattgttgtttcagttcctgaagctgttttagtttctgatgttgtcacagatgatgggataactcttgatcatggccttgcagctgaagttgtccatggacctgatatcatcacagagactgatgtagtaacagaaggtgtgattgttcctgaagcggtacttgaagctgatgttgccattgaagaggatttagaggaagatgatggtgatcacatcttgacttctgaactaattacagaaaccgttagggtaccagagcaggttttcgtggctgaccttgttactggtcctaatggacacttagaacatgtggtccaagattgtgtttcaggagtcgactctcccacaatggtatcagaggaggttcttgtaactaattcagatacagaaactgtgattcaagcagctggaggtgttcctggttctacagttactataaaaaccgaagatgatgatgatgatgatgtcaagagcacttctgaagactacttaatgatatctttggatgatgttggagaaaaattagagcatatggggaatacaccattaaaaattggcagtgatggttcacaagaagatgctaaagaagatgggtttggttctgaagttataaaagtgtatatatttaaagcggaggctgaagatgatgttgaaataggtggaacagaaattgtcacagagagtgagtacaccagtggacattcagtagctggagtgcttgaccagagccgaatgcagcgggagaagatggtttacatggcagttaaagattcttctcaagaagaagatgatatcagttgcgctgaaatagcagatgaagtttacatggaagtcattgtaggggaagaggaaggaacttctctccctgagattcagcttgaggactctgatgttaataaaacagttgtccctgttgtctgggctgcggcatatggagatgaaagaagagtttcccgaaggtatgaagattgtcaagcatcaggaaatactttggactcagcattagaaagcagaagtagtacagcagcacagtaccttcaaatttgtgacggcattaatacaaataaagtacttaaacaaaaagccaaaaagaggagaaggggagaaaccaggcagtggcaaacagctgttataataggtcctgatggacagcccctcacagtgtacccttgccatatttgcacaaaaaagtttaaatccaggggattcttaaaaagacacatgaagaatcatcctgatcatttaatgagaaaaaaatatcagtgtacagattgtgactttacaactaacaagaaagtgagtttccataaccacttagaaagccataagctcataaacaaagtcgacaaaacccatgaatttacagaatacacacgaagatacagagaggctagtccactgagttccaataaacttattttaagagacaaggagccgaagatgcacaagtgcaaatactgtgactatgaaactgcagaacaaggactgttaaacaggcatttgttggccgttcacagcaagaattttcctcatgtttgtgttgagtgtgggaagggttttcgacatccttctgaactcaagaaacatatgagaacccatactggtgagaagccatatcagtgtcagtattgtattttcaggtgtgcagatcaatcaaatctgaaaactcacattaagtctaaacatggtaacaatttgccatataaatgtgagcattgtccccaagcatttggtgatgagagggagcttcaacgccatctggatttgtttcaaggacataagacacaccagtgtcctcattgtgaccataagagcaccaattcaagtgaccttaagcggcacatcatatctgtccatactaaggattttcctcacaaatgtgaggtctgtgataaaggttttcatcgtccttctgagctcaaaaagcatagtgatatccataagggtaggaagattcatcagtgcaggcactgtgactttaaaacatccgatccatttattcttagtggccatatcctttcagttcatactaaagatcagccattgaaatgtaaaaggtgcaagagaggattcagacaacaaaatgagctaaaaaaacatatgaagacccatactggaaggaagatttaccaatgtgagtattgtgaatacagcactacagatgcatctggctttaaacgacatgtgatatcaatacatacaaaagactatccacacaggtgtgaattctgcaagaagggattccgaagaccatcagaaaaaaatcagcatattatgaggcaccacaaagaggctcttatgtaataagatcaatataaagaaagaagctatttaggagatatgatatgctacttgggagaaaactctcactaactgtctcaccgggtttcaaagcttgatactaaaccatgactttacattctttgtattaaagatcttaaaatatttgaattcacaggggatcccatagccctttgaaaattacttaaagaatttaagaagcactatagaatggttacagaaaaacttcttaagtatctgtgtaatagtattatatgcatacttaaactacagaggggaaaagcaaagacaaatactttatttggctgattatgttagatacaaatgtttctgagaagagaatacataattgagtttagtgatgctttgctatagcaagcaaacccacttttatgcaattttagaaatggggcagggaaacaaaatgtggtcattcatcagtcacttagtcattgagccttttatattgtacctggaaattaaattccagcaatgacaaaagttttgtgtattcattaaaagaaaactaactggaaaacaggttagattaattcagtactattaaaaaagaattcagagctgttaatattttatcacaggataggatacttaaaatatagcattctgtgctgagatctaaggtgaagtctataaagattaaagttcccttttttctgatgttcaagttgattgttgttcagtatggcatatatgacaaaagtatatttgagtcaaatgtggctttctaaaatggatgcaacattagcgttgcaaacaaaatcagcactatatttcttaatgatctaaagattaatttgagagaacacagttttcttaaatattataatgtctagagtttttttaggacagtcttagcaagtatgattgttctagtcttacttgctctaatgtttaaaggtgcaattttatgccattattgaaattgatttttaaaatctatataccatatgattaacatgcattttcaatatgaggcagtgtttatgcagtatttaacagagcaatctgctgccaatagagtttggaggtggatatttagtttacagtgtataaacttaaaatatgcatccctttaacaacgctttgtgttagcatgctgcaaatcaaaatggcacttaatattaaaagctggtttagggaaattttatgaaaatcctgttcataaatgtaatgcatatgatatgtacttttaagttttagttgcttcatgtttacattcagctgttcaacataattaaaatgtaattttacttcatgctatattgtggctttgtgtttcaaataatgttcacctttctgtttttgcaccagataagaatcagttccttgagaataaattttttatctttcttaacttcagaatattaaatttggaatatctactaaaattgtgtgttatgtggctgtaaatgatgtacacgctgtaaaataagatcgctactgttatgtgggattattatttctaaatgttactcattgaaatgagcatacaataaaaagcatttattgcacttaa

SEQ ID NO: 203621 - DNA, 4124 bp, Homo sapiens
  Payload ID: 20150
  Gene Name: zinc finger protein 711
  Uniprot ID: Q9Y462
  ENST ID: ENST00000373165
  CDS Start-End: 307-2592
cggaaacccgaatgtgaggaccttaagggatccacagctgccgccccccgcagccatccagagcgcggtcacagtccgactggcggcacggaggcggcggcggcggcggcggcggcagcggcggcggcagcggcggcggcagctgtagctgcagcagcaggtaaagagagcgttttcccaaagaaaataacatagcacagaaggaaaaataaaaagaaattgctgcagattttactttatgtgagaaaatctacaatttcttcgagacactcatataaagatattggtgaatgaactttgctaagtatggattcaggcggtggaagtcttggattgcacacgccagactctagaatggcccataccatgattatgcaagattttgtggctggaatggctggtactgcacatatcgatggagaccatattgttgtttcagttcctgaagctgttttagtttctgatgttgtcacagatgatgggataactcttgatcatggccttgcagctgaagttgtccatggacctgatatcatcacagagactgatgtagtaacagaaggtgtgattgttcctgaagcggtacttgaagctgatgttgccattgaagaggatttagaggaagatgatggtgatcacatcttgacttctgaactaattacagaaaccgttagggtaccagagcaggttttcgtggctgaccttgttactggtcctaatggacacttagaacatgtggtccaagattgtgtttcaggagtcgactctcccacaatggtatcagaggaggttcttgtaactaattcagatacagaaactgtgattcaagcagctggaggtgttcctggttctacagttactataaaaaccgaagatgatgatgatgatgatgtcaagagcacttctgaagactacttaatgatatctttggatgatgttggagaaaaattagagcatatggggaatacaccattaaaaattggcagtgatggttcacaagaagatgctaaagaagatgggtttggttctgaagttataaaagtgtatatatttaaagcggaggctgaagatgatgttgaaataggtggaacagaaattgtcacagagagtgagtacaccagtggacattcagtagctggagtgcttgaccagagccgaatgcagcgggagaagatggtttacatggcagttaaagattcttctcaagaagaagatgatatcagagatgaaagaagagtttcccgaaggtatgaagattgtcaagcatcaggaaatactttggactcagcattagaaagcagaagtagtacagcagcacagtaccttcaaatttgtgacggcattaatacaaataaagtacttaaacaaaaagccaaaaagaggagaaggggagaaaccaggcagtggcaaacagctgttataataggtcctgatggacagcccctcacagtgtacccttgccatatttgcacaaaaaagtttaaatccaggggattcttaaaaagacacatgaagaatcatcctgatcatttaatgagaaaaaaatatcagtgtacagattgtgactttacaactaacaagaaagtgagtttccataaccacttagaaagccataagctcataaacaaagtcgacaaaacccatgaatttacagaatacacacgaagatacagagaggctagtccactgagttccaataaacttattttaagagacaaggagccgaagatgcacaagtgcaaatactgtgactatgaaactgcagaacaaggactgttaaacaggcatttgttggccgttcacagcaagaattttcctcatgtttgtgttgagtgtgggaagggttttcgacatccttctgaactcaagaaacatatgagaacccatactggtgagaagccatatcagtgtcagtattgtattttcaggtgtgcagatcaatcaaatctgaaaactcacattaagtctaaacatggtaacaatttgccatataaatgtgagcattgtccccaagcatttggtgatgagagggagcttcaacgccatctggatttgtttcaaggacataagacacaccagtgtcctcattgtgaccataagagcaccaattcaagtgaccttaagcggcacatcatatctgtccatactaaggattttcctcacaaatgtgaggtctgtgataaaggttttcatcgtccttctgagctcaaaaagcatagtgatatccataagggtaggaagattcatcagtgcaggcactgtgactttaaaacatccgatccatttattcttagtggccatatcctttcagttcatactaaagatcagccattgaaatgtaaaaggtgcaagagaggattcagacaacaaaatgagctaaaaaaacatatgaagacccatactggaaggaagatttaccaatgtgagtattgtgaatacagcactacagatgcatctggctttaaacgacatgtgatatcaatacatacaaaagactatccacacaggtgtgaattctgcaagaagggattccgaagaccatcagaaaaaaatcagcatattatgaggcaccacaaagaggctcttatgtaataagatcaatataaagaaagaagctatttaggagatatgatatgctacttgggagaaaactctcactaactgtctcaccgggtttcaaagcttgatactaaaccatgactttacattctttgtattaaagatcttaaaatatttgaattcacaggggatcccatagccctttgaaaattacttaaagaatttaagaagcactatagaatggttacagaaaaacttcttaagtatctgtgtaatagtattatatgcatacttaaactacagaggggaaaagcaaagacaaatactttatttggctgattatgttagatacaaatgtttctgagaagagaatacataattgagtttagtgatgctttgctatagcaagcaaacccacttttatgcaattttagaaatggggcagggaaacaaaatgtggtcattcatcagtcacttagtcattgagccttttatattgtacctggaaattaaattccagcaatgacaaaagttttgtgtattcattaaaagaaaactaactggaaaacaggttagattaattcagtactattaaaaaagaattcagagctgttaatattttatcacaggataggatacttaaaatatagcattctgtgctgagatctaaggtgaagtctataaagattaaagttcccttttttctgatgttcaagttgattgttgttcagtatggcatatatgacaaaagtatatttgagtcaaatgtggctttctaaaatggatgcaacattagcgttgcaaacaaaatcagcactatatttcttaatgatctaaagattaatttgagagaacacagttttcttaaatattataatgtctagagtttttttaggacagtcttagcaagtatgattgttctagtcttacttgctctaatgtttaaaggtgcaattttatgccattattgaaattgatttttaaaatctatataccatatgattaacatgcattttcaatatgaggcagtgtttatgcagtatttaacagagcaatctgctgccaatagagtttggaggtggatatttagtttacagtgtataaacttaaaatatgcatccctttaacaacgctttgtgttagcatgctgcaaatcaaaatggcacttaatattaaaagctggtttagggaaattttatgaaaatcctgttcataaatgtaatgcatatgatatgtacttttaagttttagttgcttcatgtttacattcagctgttcaacataattaaaatgtaattttacttcatgctatattgtggctttgtgtttcaaataatgttcacctttctgtttttgcaccagataagaatcagttccttgagaataaattttttatctttcttaacttcagaatattaaatttggaatatctactaaaattgtgtgttatgtggctgtaaatgatgtacacgctgtaaaataagatcgctactgttatgtgggattattatttctaaatgttactcattgaaatgagcatacaataaaaagcatttattgcactt

SEQ ID NO: 203622 - DNA, 4339 bp, Homo sapiens
  Payload ID: 20151
  Gene Name: zinc finger protein 713
  ENST ID: ENST00000429591
  CDS Start-End: 789-2120
gcggggaggctgtcctcagagcaggtctggcgcgccggtggctggaccggccccaggagcccagtcaccgggcgtcattggctcaggctgcggggccctcggcaccttctccctcccgggtccaccgcggcggcggcggcggcggcggcggcggcggcggcggcgtcagggggcggagcctgccgaagcgccctttgtctgcggaggtcaacatacctggcctaaggaggcaggattgagtgactctcactcaccactggtgttgctctttgaaagtggcgcttggcaccagcatgaactccccatcctcagcaatcccatcaggtgttttgggtcttcaacctaaaattctatcttacaagatccttgccaggatgcagatttgaatactatagtgaagtctgtacatgaagaaatgatgcttttagggaggaaaaaaaaaggtaataacaaccttcaagagccccttcatctcaactcggcataaacaaggcaagattctgagagtggccgcccctggaagcagaaattattcttgtggctatccattggctcctgaggctctaatcagagatggggcacctttagtaccaggggagtgactgttgcccataaggtactggacatcaactttcaagagcagccccagctccttaagctgctggtcctggtgcatctgctgactttcatgtagaagatagcagagctttggcgacattacaacataagaactgcagagaggtgtaatcccagtggaagactgaatcgagagactcaaaaaggaagttatgccttctcagaatgctgttttttctcaggaggggaacatggaggaggaagaaatgaatgatggctcacagatggtgagatctcaggaatcactgacgtttcaggatgtggccgtggacttcaccagagaggagtgggaccagctgtaccctgcccaaaagaacctctatcgagacgtgatgctggagaactacaggaatctagttgcactggggtatcagctttgtaagccagaggtaatcgcgcagttggagctagaggaagaatgggtgatagaaagagacagcctgctggatactcatccagatggagaaaacagacccgaaatcaaaaagtcaaccacaagccagaatatttctgatgaaaatcaaacccatgagatgataatggagagactcgcaggagacagcttctggtactccatcctaggaggactctgggattttgattaccatccagagtttaaccaagaaaaccacaagagatatttaggacaagtaactttgacccacaaaaagatcacacaggagagaagccttgagtgtaataaatttgcagaaaactgtaatctgaactcaaaccttatgcagcagagaattccttccattaaaatacccctgaattctgacacacagggaaacagcatcaaacataattcagacttgatttactatcagggaaattatgtaagagagactccctatgaatatagtgagtgtggaaaaatcttcaatcaacatattcttcttactgatcatattcatactgcagagaaacccagtgagtgtgggaaggccttcagccacacctcatctcttagccagcctcagatgttgcttacaggagagaagccctataagtgtgatgaatgtggaaaaagattcagccagaggatacatctcattcaacatcagagaattcacacaggagaaaagccttttatatgcaatggatgtgggaaagccttccgtcagcattcatcctttactcaacatctgaggattcatactggagaaaagccctataaatgtaatcaatgtggtaaagcttttagccgcatcacatcccttactgaacatcatagacttcataccggagagaaaccttacgaatgtggtttctgtggcaaagccttcagtcagaggacacatctgaatcaacatgaaagaactcatacaggagagaaaccctataaatgtaatgaatgcgggaaagcctttagccagagtgcacaccttaatcaacacaggaaaatccatactcgggagaaattatgtgaatataaatgtgagcaaactgttcgccacagtccttcatttagcagcacataacttatggtgggggaaatcagataaatatataaatgtaggagattttttggtcagacctttttatcccattcaatatcaaattattcatagtggagagaaagcttatacataaatttttgttttgttttgtttttgagactgagtctcactctgtcacccaggctgaagtgcagtggtacaatcttggctcactgcaacctctgccacctgggttcaagcgattctcctgcctcagcctcctgagtagctgggaccacaggtatgcaccaccacgcccagctaattttttgtatttttagtagagacggggtttcaccatgttggccaggctggtctcgaactcctaacctcaggtgatccgcccacctcggcctcccaaagtgctgggattacaggcgtgggccactgcgcctggccataaactttcaatgcgtagaaaccaaattaatttagaccttaaactagcagcatattacattcccaggaggggttataaaaagaaaaaataatttattttacaaatgagattatatttggagtcatgttccaaatctgatataaaactttttaaaaaatcagaagtccttatccaggcatggtggtgcacacctgcaatcccagctactctggagactgaggcatgagaatgacttgaacatgggaggtggaggttgctgtgagctgagatcatgccactgtactccagcctgggcaacagagcaagactctgtctcaaaaaaaaaaaagaaagaaagcctataggcaacaacttgtaattactcacctgtaagttttatggtataaaacttttttttttttttttttttgaggcagagtctcgctctgccacccaggctggagtgcaatggcgcgatctcggctcacagcaacctccacctcctgggttccagcgattcttctgcttcagcctcccgagtagctgggactacaggtgcgtaccaccacgcctggctaactttttttttgtattttttagtagagacacggtttcaccatattgactaggctggtctcgaactcctgaccttgtgatctgcccgcctcggcctcccaaagtgctgggattataggcgtgagcaactgcacctggcaggttatggtataaaacttttaaatcagaaattttgattaattaaagacaatgctggctgggggcggtggttcacgcctataatcccagcactttgggaggccgaggtggggtgatcatctgaggccaggagtttgagaccagcctggccaacatggtaaaaccccatctctactaaaaatacaaaaattagctgggtatggtggtgcacgcctgtagtctcagcagcttgggaggctgaggcagaagaattgcttgaacccggtaggtggaggttgcagtgagccaagatcacgccactgtactccagcctgggcaacagagtgagactgtctcaaaaaaaaaaaaaagtaaaatttaaaaataaaggcgatgctgtagtgcagccagtcacattaacttgaaataaacataaaagaggaatatttcacgaacgtcagttatttgtatgctttctttacagtttttaccatatctagtatttacttaatattctttataaagggatgcaagatttttagccttctcctaggaaatactatttagcatataaaataagttatatgctagttttatatgctaattaaatttattctactcttcatcaaaatagatacataaccttgaaattaaaaatattcgttgatgtccccccaaaaatcttgtgtgccgttgtttgagaaacagtgtgatagtttgtggcaatatcctgtgatgattctttttgcaatcttgacattattttcatcaaatgaatcctaggatcactttgagaagagccttgaagaagacttgagggtcctattgatgaactttgaaatattgattcagagaagtctgcttttctattttgttttagctttaaatttccctgtggcaagtctagattttttttcagttaaaattatttctgctgtatttgtagaacagaagttttgggattttgtaaaataatgaccagagactaagaattcccatgccaccccgtatcactgtggaagatggagaagtgaggaactgtacctgcgggtgagccctggtgccatgttgagggtgggaatcaggagagctgcagtggcttatataaacacctgacgaagtagtctaa

SEQ ID NO: 203623 - DNA, 1286 bp, Homo sapiens
  Payload ID: 20151
  Gene Name: zinc finger protein 713
  ENST ID: ENST00000411863
  CDS Start-End: 752-907
gtggctggaccggccccaggagcccagtcaccgggcgtcattggctcaggctgcggggccctcggcaccttctccctcccgggtccaccgcggcggcggcggcggcggcggcggcggcggcggcggcgtcagggggcggagcctgccgaagcgccctttgtctgcggaggtcaacatacctggcctaaggaggcaggattgagtgactctcactcaccactggtgttgctctttgaaagtggcgcttggcaccagcatgaactccccatcctcagcaatcccatcaggtgttttgggtcttcaacctaaaattctatcttacaagatccttgccaggatgcagatttgaatactatagtgaagtctgtacatgaagaaatgatgcttttagggaggaaaaaaaaaggtaataacaaccttcaagagccccttcatctcaactcggcataaacaaggcaagattctgagagtggccgcccctggaagcagaaattattcttgtggctatccattggctcctgaggctctaatcagagatggggcacctttagtaccaggggagtgactgttgcccataaggtactggacatcaactttcaagagcagccccagctccttaagctgctggtcctggtgcatctgctgactttcatgtagaagatagcagagctttggcgacattacaacataagaactgcagagaggtgtaatcccagtggaagactgaatcgagagactcaaaaaggaagttatgccttctcagaatgctgttttttctcaggaggggaacatggaggaggaagaaatgaatgatggctcacagatggtgagatctcagatgtggagatctgtgtgctctccattggatctcggcaaggctgtgactggaggatgcaaagctttgtgactttcaaggcagatcataaatggcagtaagacttctacctcattctgttgggatgcttactctaaacccgaccaccttgtcaggaggaaacccagacagcccatggagaagcccatatggagaggagccaaggcccacagccctagccgagctcccagctgaaagccagtaccaatttgccagccttgaatcactgacgtttcaggatgtggccgtggacttcaccagagaggagtgggaccagctgtaccctgcccaaaagaacctctatcgagacgtgatgctggagaactacaggaatctagttgcactgggtgaggatggcatccctgtgaaaccggaagccgttcacgtgggtttatttcctgaactagtagaa

SEQ ID NO: 203624 - DNA, 2065 bp, Homo sapiens
  Payload ID: 20151
  Gene Name: zinc finger protein 713
  Uniprot ID: Q8N859
  ENST ID: ENST00000633730
  CDS Start-End: 39-1331
tgccttctcagaatgctgttttttctcaggaggggaacatggaggaggaagaaatgaatgatggctcacagatggtgagatctcaggaatcactgacgtttcaggatgtggccgtggacttcaccagagaggagtgggaccagctgtaccctgcccaaaagaacctctatcgagacgtgatgctggagaactacaggaatctagttgcactggggtatcagctttgtaagccagaggtaatcgcgcagttggagctagaggaagaatgggtgatagaaagagacagcctgctggatactcatccagatggagaaaacagacccgaaatcaaaaagtcaaccacaagccagaatatttctgatgaaaatcaaacccatgagatgataatggagagactcgcaggagacagcttctggtactccatcctaggaggactctgggattttgattaccatccagagtttaaccaagaaaaccacaagagatatttaggacaagtaactttgacccacaaaaagatcacacaggagagaagccttgagtgtaataaatttgcagaaaactgtaatctgaactcaaaccttatgcagcagagaattccttccattaaaatacccctgaattctgacacacagggaaacagcatcaaacataattcagacttgatttactatcagggaaattatgtaagagagactccctatgaatatagtgagtgtggaaaaatcttcaatcaacatattcttcttactgatcatattcatactgcagagaaacccagtgagtgtgggaaggccttcagccacacctcatctcttagccagcctcagatgttgcttacaggagagaagccctataagtgtgatgaatgtggaaaaagattcagccagaggatacatctcattcaacatcagagaattcacacaggagaaaagccttttatatgcaatggatgtgggaaagccttccgtcagcattcatcctttactcaacatctgaggattcatactggagaaaagccctataaatgtaatcaatgtggtaaagcttttagccgcatcacatcccttactgaacatcatagacttcataccggagagaaaccttacgaatgtggtttctgtggcaaagccttcagtcagaggacacatctgaatcaacatgaaagaactcatacaggagagaaaccctataaatgtaatgaatgcgggaaagcctttagccagagtgcacaccttaatcaacacaggaaaatccatactcgggagaaattatgtgaatataaatgtgagcaaactgttcgccacagtccttcatttagcagcacataacttatggtgggggaaatcagataaatatataaatgtaggagattttttggtcagacctttttatcccattcaatatcaaattattcatagtggagagaaagcttatacataaatttttgttttgttttgtttttgagactgagtctcactctgtcacccaggctgaagtgcagtggtacaatcttggctcactgcaacctctgccacctgggttcaagcgattctcctgcctcagcctcctgagtagctgggaccacaggtatgcaccaccacgcccagctaattttttgtatttttagtagagacggggtttcaccatgttggccaggctggtctcgaactcctaacctcaggtgatccgcccacctcggcctcccaaagtgctgggattacaggcgtgggccactgcgcctggccataaactttcaatgcgtagaaaccaaattaatttagaccttaaactagcagcatattacattcccaggaggggttataaaaagaaaaaataatttattttacaaatgagattatatttggagtcatgttccaaatctgatataaaactttttaaaaaatcagaagtccttatccaggcatggtggtgcacacctgcaatcccagctactctggagactgaggcatgagaatgacttgaacatgggaggtggaggttgctgtgagctgagatcatgccactgtactccagcctgggcaacagagcaagactctgtctc

SEQ ID NO: 203625 - DNA, 2562 bp, Homo sapiens
  Payload ID: 20152
  Gene Name: zinc finger protein 714
  ENST ID: ENST00000425625
  CDS Start-End: 323-577
gtctctcgctgcagctggagctgcaggtctcgccttcactgccctgtgtcctctgctcgcagaggcccagcctctgtggccctgtgacctgcaggtattgagagatccacagctaagacgccaggtaccccggaagcctagaaatgggcgacctgaggtctggagtgtatcctctcaagggagcaagtggatccctggggcagagaggaagcttctagtgtactcttactttgaaaaggagacgttgacatttagggatgtggccatagaattctctctggaggagtgggaatgcctgaaccctgctcagcagaatttatatatgaatgtgatgttagagaactacaaaaacctggtcttcttgggtattgctgtctctaagcaagacccgatcaccagtctagagcaagaaaaagagccctggaatatgaagatatgtgagatggtggatgaatccccaggatacatgtgcaggatgtgcagctatgtgttcttcttttaccagagacctttggccagagcaagacataaaagattcttttcaacaagtgatactgagaagacatggcaaatgtgaacatgagaatttacagttaagaaaaggctccgcaaatgtggttgagtgtaaggtgtacaaaaaaggttataatgaactaaaccagtgtttgacaactacccagagcaaaatatttccatgtgataaatatataaaagtctttcataaaattttcaattcaaatagacacaagacaagacatactggagagaaacctttcaaatgtaaaaaatgtgatgaatcattttgcatgcttttacacctacatcaacataaaagaattcatattagagagaattcttaccaatgtgaagaatgtgacaaagtgtttaagcggttctcaacccttactagacacaagagagttcatactggagagaaacccttcaaatgtgaagaatgtggcaaagcttttaagcactcctcaacccttactacacataagatgattcatactggagagaaaccctacagatgtgaagaatgtggcaaagccttctaccattcttcacaccttactacacataaggtaattcatactggagagaagcccttcaaatgtgaagaatgtggtaaagcttttaaccacccttcagcccttactacacataagttcattcatgttaaagaaaaaccctacaaatgtgaagaatgtgacaaagcttttaaccgattctcataccttactaaacataagataattcattctggagagaaatcttacaaatgtgaacaatgtggcaaaggctttaactggtcttcaacccttacaaaacataaaagaattcatactggagagaaaccctacaaatgtgaagaatgtggcaaagcctttaatgtgtcttcacaccttactacacataagatgattcatactggagagaaaccctacaaatgtgaagaatgtggcaaagcctttaaccactcctcaaaacttactatacataagataattcatactggagagaaaccttacaaatgtgaagaatgtggcaaagcttttaaccaatcctcaaaccttaccaaacataagataattcatactggagagaaactctacaaatgtgaagaatgtggcaaagcttttaaccgatcctcaaaccttactacacataagagaattcacactggagagaaaccctacaaatgtgaagaatgtggcaaagctttcaaccgatcctcaaaccttactaaacataacataattcatactggagagaaatcttacaaatgtgaagaatgtggtaaagcctttaaccaatcctcaactcttactaaacataggaaaattcagcagggcatggtggctcatgcctgtaatcccaacactttgagaggactaggtgagcagatcgcgaggtcaggagttcaagaccagcctggccaacatggtaaaaccccatctctactaaaaatacaaaaatttgctgggtgtggtggcaggcgcctgtaatcccagctacttgggaggcagaggcaggagaatcatttgaacctgggaggcagaggttgcagtgagccaagatcgcgccattctactccagcctgggccacaaggcaagactctgtctcaaaaaaaaaaaaaaaaagaaaagaaaattcatactggaacgaaaccctacaattgtgaagaatgtgccagtgctttcaaccagtcctcgaacctttttaagaaaataatttatactggagagaaattctacaaatgtgaagaatatggcaaagcctttaaccagtcttcaactcttactaggcattaaaaattcatactgtacagaaaccctacgagggtgaaaaacatggcaaagcctttaacaagccctcaattcttaacagacataacataattcatactggaaagaaactctgcaaaccagaaagatctggcaatgcttttgacaacacctcaaacttttctaaccataaaagaaattatactggtgagaaatcttagaaatctgaagaatgagacaaagcctttaaatggttgtcacacttgattgtag

SEQ ID NO: 203626 - DNA, 800 bp, Homo sapiens
  Payload ID: 20152
  Gene Name: zinc finger protein 714
  ENST ID: ENST00000596053
  CDS Start-End: 352-684
gacggcttcggggatgtggcggggcctttgtctctcgctgcagctggagctgcaggtctcgccttcactgccctgtgtcctctgctcgcagaggcccagcctctgtggccctgtgacctgcaggtattgagagatccacagctaagacgccaggtaccccggaagcctagaaatgggcgacctgaggtctggagtgtatcctctcaagggagcaagtggatccctggggcagagaggaagcttctagtgtactcttactttgaaaaggagacgttgacatttagggatgtggccatagaattctctctggaggagtgggaatgcctgaaccctgctcagcagaatttatatatgaatgtgatgttagagaactacaaaaacctggtcttcttgggtattgctgtctctaagcaagacccgatcaccagtctagagcaagaaaaagagccctggaatatgaagatatgtgagatggtggatgaatccccaggccaggtgtggtgtcttacacctgtaatcccagcactgtgggaagccagggcaggtggattgcttgagcccaggagtttgagaccagcctggtcaacatggaaaatccccgtctctacaaaaaaaaaaaaaaaatctcagctgggcatgggcatggtagtgcatgcctgtaatcccagctactccagaggctgaggcatgagaatcccttgagccagggatgcagaggttgcagtgaactgagattgtgccactgcatccagcctgggtaacagagtgagactccgtctcaagagaaaaggaattttctt

SEQ ID NO: 203627 - DNA, 2671 bp, Homo sapiens
  Payload ID: 20152
  Gene Name: zinc finger protein 714
  ENST ID: ENST00000610902
  CDS Start-End: 317-1984
cgctgcagctggagctgcaggtctcgccttcactgccctgtgtcctctgctcgcagaggcccagcctctgtggccctgtgacctgcaggtattgagagatccacagctaagacgccaggtaccccggaagcctagaaatgggcgacctgaggtctggagtgtatcctctcaagggagcaagtggatccctggggcagagaggaagcttctagtgtactcttactttgaaaaggagacgttgacatttagggatgtggccatagaattctctctggaggagtgggaatgcctgaaccctgctcagcagaatttatatatgaatgtgatgttagagaactacaaaaacctggtcttcttggcaggtattgctgtctctaagcaagacccgatcaccagtctagagcaagaaaaagagccctggaatatgaagatatgtgagatggtggatgaatccccagctatgtgttcttcttttaccagagacctttggccagagcaagacataaaagattcttttcaacaagtgatactgagaagacatggcaaatgtgaacatgagaatttacagttaagaaaaggctccgcaaatgtggttgagtgtaaggtgtacaaaaaaggttataatgaactaaaccagtgtttgacaactacccagagcaaaatatttccatgtgataaatatataaaagtctttcataaaattttcaattcaaatagacacaagacaagacatactggagagaaacctttcaaatgtaaaaaatgtgatgaatcattttgcatgcttttacacctacatcaacataaaagaattcatattagagagaattcttaccaatgtgaagaatgtgacaaagtgtttaagcggttctcaacccttactagacacaagagagttcatactggagagaaacccttcaaatgtgaagaatgtggcaaagcttttaagcactcctcaacccttactacacataagatgattcatactggagagaaaccctacagatgtgaagaatgtggcaaagccttctaccattcttcacaccttactacacataaggtaattcatactggagagaagcccttcaaatgtgaagaatgtggtaaagcttttaaccacccttcagcccttactacacataagttcattcatgttaaagaaaaaccctacaaatgtgaagaatgtgacaaagcttttaaccgattctcataccttactaaacataagataattcattctggagagaaatcttacaaatgtgaacaatgtggcaaaggctttaactggtcttcaacccttacaaaacataaaagaattcatactggagagaaaccctacaaatgtgaagaatgtggcaaagcctttaatgtgtcttcacaccttactacacataagatgattcatactggagagaaaccctacaaatgtgaagaatgtggcaaagcctttaaccactcctcaaaacttactatacataagataattcatactggagagaaaccttacaaatgtgaagaatgtggcaaagcttttaaccaatcctcaaaccttaccaaacataagataattcatactggagagaaactctacaaatgtgaagaatgtggcaaagcttttaaccgatcctcaaaccttactacacataagagaattcacactggagagaaaccctacaaatgtgaagaatgtggcaaagctttcaaccgatcctcaaaccttactaaacataacataattcatactggagagaaatcttacaaatgtgaagaatgtggtaaagcctttaaccaatcctcaactcttactaaacataggaaaattcagcagggcatggtggctcatgcctgtaatcccaacactttgagaggactaggtgagcagatcgcgaggtcaggagttcaagaccagcctggccaacatggtaaaaccccatctctactaaaaatacaaaaatttgctgggtgtggtggcaggcgcctgtaatcccagctacttgggaggcagaggcaggagaatcatttgaacctgggaggcagaggttgcagtgagccaagatcgcgccattctactccagcctgggccacaaggcaagactctgtctcaaaaaaaaaaaaaaaaagaaaagaaaattcatactggaacgaaaccctacaattgtgaagaatgtgccagtgctttcaaccagtcctcgaacctttttaagaaaataatttatactggagagaaattctacaaatgtgaagaatatggcaaagcctttaaccagtcttcaactcttactaggcattaaaaattcatactgtacagaaaccctacgagggtgaaaaacatggcaaagcctttaacaagccctcaattcttaacagacataacataattcatactggaaagaaactctgcaaaccagaaagatctggcaatgcttttgacaacacctcaaacttttctaaccataaaagaaattatactggtgagaaatcttagaaatctgaagaatgagacaaagcctttaaatggttgtcacacttgattgtaggccaggtgtggtgtcttacacctgtaatcccagcactgtgggaagccagggcaggtggattgcttgagcccaggagtttgagaccagcctggtcaacatggaaaatccccgtctctacaaaaaaaaaaaaaaaa

SEQ ID NO: 203628 - DNA, 6812 bp, Homo sapiens
  Payload ID: 20152
  Gene Name: zinc finger protein 714
  ENST ID: ENST00000456283
  CDS Start-End: 326-1993
tttgtctctcgctgcagctggagctgcaggtctcgccttcactgccctgtgtcctctgctcgcagaggcccagcctctgtggccctgtgacctgcaggtattgagagatccacagctaagacgccaggtaccccggaagcctagaaatgggcgacctgaggtctggagtgtatcctctcaagggagcaagtggatccctggggcagagaggaagcttctagtgtactcttactttgaaaaggagacgttgacatttagggatgtggccatagaattctctctggaggagtgggaatgcctgaaccctgctcagcagaatttatatatgaatgtgatgttagagaactacaaaaacctggtcttcttggcaggtattgctgtctctaagcaagacccgatcaccagtctagagcaagaaaaagagccctggaatatgaagatatgtgagatggtggatgaatccccagctatgtgttcttcttttaccagagacctttggccagagcaagacataaaagattcttttcaacaagtgatactgagaagacatggcaaatgtgaacatgagaatttacagttaagaaaaggctccgcaaatgtggttgagtgtaaggtgtacaaaaaaggttataatgaactaaaccagtgtttgacaactacccagagcaaaatatttccatgtgataaatatataaaagtctttcataaaattttcaattcaaatagacacaagacaagacatactggagagaaacctttcaaatgtaaaaaatgtgatgaatcattttgcatgcttttacacctacatcaacataaaagaattcatattagagagaattcttaccaatgtgaagaatgtgacaaagtgtttaagcggttctcaacccttactagacacaagagagttcatactggagagaaacccttcaaatgtgaagaatgtggcaaagcttttaagcactcctcaacccttactacacataagatgattcatactggagagaaaccctacagatgtgaagaatgtggcaaagccttctaccattcttcacaccttactacacataaggtaattcatactggagagaagcccttcaaatgtgaagaatgtggtaaagcttttaaccacccttcagcccttactacacataagttcattcatgttaaagaaaaaccctacaaatgtgaagaatgtgacaaagcttttaaccgattctcataccttactaaacataagataattcattctggagagaaatcttacaaatgtgaacaatgtggcaaaggctttaactggtcttcaacccttacaaaacataaaagaattcatactggagagaaaccctacaaatgtgaagaatgtggcaaagcctttaatgtgtcttcacaccttactacacataagatgattcatactggagagaaaccctacaaatgtgaagaatgtggcaaagcctttaaccactcctcaaaacttactatacataagataattcatactggagagaaaccttacaaatgtgaagaatgtggcaaagcttttaaccaatcctcaaaccttaccaaacataagataattcatactggagagaaactctacaaatgtgaagaatgtggcaaagcttttaaccgatcctcaaaccttactacacataagagaattcacactggagagaaaccctacaaatgtgaagaatgtggcaaagctttcaaccgatcctcaaaccttactaaacataacataattcatactggagagaaatcttacaaatgtgaagaatgtggtaaagcctttaaccaatcctcaactcttactaaacataggaaaattcagcagggcatggtggctcatgcctgtaatcccaacactttgagaggactaggtgagcagatcgcgaggtcaggagttcaagaccagcctggccaacatggtaaaaccccatctctactaaaaatacaaaaatttgctgggtgtggtggcaggcgcctgtaatcccagctacttgggaggcagaggcaggagaatcatttgaacctgggaggcagaggttgcagtgagccaagatcgcgccattctactccagcctgggccacaaggcaagactctgtctcaaaaaaaaaaaaaaaaagaaaagaaaattcatactggaacgaaaccctacaattgtgaagaatgtgccagtgctttcaaccagtcctcgaacctttttaagaaaataatttatactggagagaaattctacaaatgtgaagaatatggcaaagcctttaaccagtcttcaactcttactaggcattaaaaattcatactgtacagaaaccctacgagggtgaaaaacatggcaaagcctttaacaagccctcaattcttaacagacataacataattcatactggaaagaaactctgcaaaccagaaagatctggcaatgcttttgacaacacctcaaacttttctaaccataaaagaaattatactggtgagaaatcttagaaatctgaagaatgagacaaagcctttaaatggttgtcacacttgattgtaggtaagataattcatactggagaaaacacctacatgtgtgaacaatgtggcaaaacttaaccagtgctcacaccttattgcacaggaaagcatttgtacttgagataaattatacaaatataaagactgaaaaagccattaatatatgttcatatctcaacaccagatagttcatacttaataaaagcattataagtacaattactgtcaaaagacctttcagaaaatacaagcttttgaccaggcgtggtggctcaggcctataatcccagcactttggtaggccaaggcaggtggatcatgaggtcaggagtttgagaccagcctatccaagatggtgaaaccccatctctactaaaaatacaacaattagccggttgcggtggtggtgcctgtaatcccagctactcaagaggctgaggcaggagaatcacttgaacttggggagggagaggttgcagtgagctgagattgcactctagcctgggccacagagcaagactccatctaaaaagtaaaaaaaaaagaaaatatgaactttacagtgaagaatatttattttgaagatgaatgttacaaatataaagtgggtagtagtgcctttacttgtatcacagatcttattgtagacattttttgtagaggaaaaactctgaagcactttcacactttgttcaatatcagggaatttatattgaagaaaaatcatgcaaatgtagtaaatttggaaaaacactttttcaaaaactacagcttagaaaacagagttcatactagaatatatttttgcagatgcagtaaaagttaaaaaaaatttaatccataagtaagtctgtgtaaatatcagaatttatggtagaaatacataaggcactgacaacatcagatatactaaatcagagggctgagtatagaaaattaaagttggtagaaaaattatttgtatataactttaagaggatcagaaggttttttgcagttataattacattcaaagtatactttatttcttgaaaaatattacagattttttgaaaagtgaataatgatgtcattcaactctgaaattcctgccgtttcttcattcctattggattcacatgtgaaagcatgggatcaattattgctgtatcaaagatatgaaagattctttctttgttttgttctgtttttttgagatggagttttgctctttcgtccaggctggagcacagtggcatgatctcggctcactgcaaccttcaatttccagtttcaagcgattctcctccctcagcctcctgagtagctgggattacaggcgcatatcaccacgcccagctaatttttatgtttctagtacagacaggatttcatcatgttggccaggctggtctcaaactcctcaccttgtgatccacccaccttggcctccaaaggtgctgggattacacaggcatgagccactgctcctggcaagagattcttttttattaggtgggcattatttgtgatcttttctattgaaaagtaaaaacattagaatgtaagatgcataatgaaaatgtaagtggagaggttctttggggttaacttataatattgagtggtgcatgaggttggtgttcagagtaatattctgcattatgaaaaaacatttaattttatttaaaatttagtttatcatactaattgtacttttatataagatgcagtacatttttaaaattttagattgtgtgaagttaatagtttaacatttttaacatgttaaatactattgtgcattcaatgaagcattattataccacaaactttaccctgttccaccttactgaagggtataggtaaaagatggtaacgatatactatttagtaacataatggattaacatctctagtaattttttttgccagtggctttaaaccgcaaataagttaaagaatattgtttctgtaggttaaatttttattttgtttttaatcatttaaatttaattttggtgggtacataatatgagtatatatttatgcacttatatggcatattttagtacaggaatacaatatataatagtagcatcagggttaagtgaggcatccttcacccatagcatttctcctttgttttacaaacaatccaaacctacactttttaaaaattttttgttgttgttgttcttgttgttgttgagacggagtctcgctctgtcgcccaggctggagtgtgcaatctcggctcactgcaagctccacttcccgggttcacgccattttcctgcctcagcctcccaagcagctaggactacaggcgcccaccaccatgcccggctaattttttgtatttttagtagagatggggtttcaccatgttagccaggatggtctcaatctcctgacctcgtgatctggtctcgatctcctgacctcatgatctgcctgccttgacctcccaaagtgctgggattacaggcatgagccaccgtgcccggccactttttataaattttaaaatgtacaattgttatttactatagagttatttttatggtcataatacaaattatatatgagtataaataaaattcatttctaaactattaatattttttccaaattgttatatatttttctttgaacatgtggcctgtctgcctgcaaacatgcagactttttgattcacatagagttaaatatgtattagtctaaagacaaactttaggtgtaagaaaattatggaataagtgtgtgtgtgtgagtatgagtttgtacctattttcagaaaagaacaatatgggaataaaaatcattttaataaggtggctactataaaactaaaaaccttaaaaaatgctgaaagcaaatgtatactttgtgctttgtattgaatttattactgtacaatccatgacttacagttctgaaccttttcatgcaaattctctgtatatacttgcctggtactcatgctagacccatactttttttgtttcttacattttttttgttttatggtttaggaagtattcattatatgagctggtctgtgattataagaatttttatgaaatttagtgcacacaaaataatttttagatgtaattccaaaagtagtgtattaagttacattttatttagtgagagcactccattttgttcttttaaggggagaacaatatataagttttcttttctttagtgattgttcctttcactttttataattgacataagtatatttatttattgagtcaatttgttcaggtaagtactggggggcttcataagtcatgaggatgtttttatatataaatgtagcaaacatacattacagttcttactgtgtaatcgatgctccataataattcacaaatattcctgctggagttagtttgtaatttcaagtcagaaatgaaagatatcagtggtgaagaaataagattgattcttcatatggagtggacattttttccagactataaaactgaatcttgctgaatttaaagagaaattctggccgaggcagatggatcacctgaggttaggagtttcagaccagcctggtgaaacccggtctctactaataaactacaaaaattagctgattgtggtggcatccacctgtagcccagctactcaggaggctgaggcagaagaattgcttgaacccaggaggcgaagattgtggtgagccgagattgtgccattgcactacagcctgggtgacagaatgagactcataaaaaaaaaaataaattctgcttcttttattttctacttctcttcagatttgtttctcgtatgtattttccaactatgtatgcatcacagcccttctttttctgagttatagctacagttttctgactgttctcttcacgccatttcatttcgcctggtattttgtagattttgatgacaaaattctatttttagtgcacttaaaaatggattttaactggtgagttcgcttatcaatataacattcagattagttaattaagataaaagccaggtgtggtggctcacgcctctaatcccagcactttgagaggccgaggcaagtggatcacttgagctcaggagttcgagaccagcctgaccaacatggtgaaaccccgtgtctactacaaatacaaaattagccacatgttgtggcgcatgcctgtaatcccagctactcgggaggctgatgcaggagaatcgcttgaacccaggaggcagaggttgcagtgagccgaaattgcgccattgcactccagcctggacaagagcaaaactctgtctc

SEQ ID NO: 203629 - DNA, 577 bp, Homo sapiens
  Payload ID: 20152
  Gene Name: zinc finger protein 714
  ENST ID: ENST00000616183
  CDS Start-End: 492-577
agctggagcggacaggacggcttcggggatgtggcggggcctttgtctctcgctgcagctggagctgcaggtctcgccttcactgccctgtgtcctctgctcgcagaggcccagcctctgtggccctgtgacctgcaggtattgagagatccacagctaagacgccaggtaccccggaagcctagaaatgagacctttggccagagcaagacataaaagattcttttcaacaagtgatactgagaagacatggcaaatgtgaacatgagaatttacagttaagaaaaggctccgcaaatgtggttgagtgtaaggtgtacaaaaaaggttataatgaactaaaccagtgtttgacaactacccagagcaaaatatttccatgtgataaatatataaaagtctttcataaaattttcaattcaaatagacacaagacaagacatactggagagaaacctttcaaatgtaaaaaatgtgatgaatcattttgcatgcttttacacctacatcaacataaaagaattcatattagagagaattcttaccaatgtgaagaatgtgacaaagtgtttaagcg

SEQ ID NO: 203630 - DNA, 2066 bp, Homo sapiens
  Payload ID: 20152
  Gene Name: zinc finger protein 714
  ENST ID: ENST00000620627
  CDS Start-End: 276-443
gtcctctgctcgcagaggcccagcctctgtggccctgtgacctgcaggtattgagagatccacagctaagacgccaggtaccccggaagcctagaaatgggcgacctgaggtctggagtgtatcctctcaagggagcaagtggatccctggggcagagaggaagcttctagtgtactcttactttgaaaaggagacgttgacatttagggatgtggccatagaattctctctggaggagtgggaatgcctgaaccctgctcagcagaatttatatatgaatgtgatgttagagaactacaaaaacctggtcttcttggcaggtattgctgtctctaagcaagacccgatcaccagtctagagcaagaaaaagagccctggaatatgaagatatgtgagatggtggatgaatccccagagacctttggccagagcaagacataaaagattcttttcaacaagtgatactgagaagacatggcaaatgtgaacatgagaatttacagttaagaaaaggctccgcaaatgtggttgagtgtaaggtgtacaaaaaaggttataatgaactaaaccagtgtttgacaactacccagagcaaaatatttccatgtgataaatatataaaagtctttcataaaattttcaattcaaatagacacaagacaagacatactggagagaaacctttcaaatgtaaaaaatgtgatgaatcattttgcatgcttttacacctacatcaacataaaagaattcatattagagagaattcttaccaatgtgaagaatgtgacaaagtgtttaagcggttctcaacccttactagacacaagagagttcatactggagagaaacccttcaaatgtgaagaatgtggcaaagcttttaagcactcctcaacccttactacacataagatgattcatactggagagaaaccctacagatgtgaagaatgtggcaaagccttctaccattcttcacaccttactacacataaggtaattcatactggagagaagcccttcaaatgtgaagaatgtggtaaagcttttaaccacccttcagcccttactacacataagttcattcatgttaaagaaaaaccctacaaatgtgaagaatgtgacaaagcttttaaccgattctcataccttactaaacataagataattcattctggagagaaatcttacaaatgtgaacaatgtggcaaaggctttaactggtcttcaacccttacaaaacataaaagaattcatactggagagaaaccctacaaatgtgaagaatgtggcaaagcctttaatgtgtcttcacaccttactacacataagatgattcatactggagagaaaccctacaaatgtgaagaatgtggcaaagcctttaaccactcctcaaaacttactatacataagataattcatactggagagaaaccttacaaatgtgaagaatgtggcaaagcttttaaccaatcctcaaaccttaccaaacataagataattcatactggagagaaactctacaaatgtgaagaatgtggcaaagcttttaaccgatcctcaaaccttactacacataagagaattcacactggagagaaaccctacaaatgtgaagaatgtggcaaagctttcaaccgatcctcaaaccttactaaacataacataattcatactggagagaaatcttacaaatgtgaagaatgtggtaaagcctttaaccaatcctcaactcttactaaacataggaaaattcagcagggcatggtggctcatgcctgtaatcccaacactttgagaggactaggtgagcagatcgcgaggtcaggagttcaagaccagcctggccaacatggtaaaaccccatctctactaaaaatacaaaaatttgctgggtgtggtggcaggcgcctgtaatcccagctacttgggaggcagaggcaggagaatcatttgaacctgggaggcagaggttgcagtgagccaagatcgcgccattctactccagcctgggccacaaggcaagactctgtctcaaaaaaaaaaaaaaaaagaaaagaaa

SEQ ID NO: 203631 - DNA, 2696 bp, Homo sapiens
  Payload ID: 20152
  Gene Name: zinc finger protein 714
  ENST ID: ENST00000613286
  CDS Start-End: 323-577
gtctctcgctgcagctggagctgcaggtctcgccttcactgccctgtgtcctctgctcgcagaggcccagcctctgtggccctgtgacctgcaggtattgagagatccacagctaagacgccaggtaccccggaagcctagaaatgggcgacctgaggtctggagtgtatcctctcaagggagcaagtggatccctggggcagagaggaagcttctagtgtactcttactttgaaaaggagacgttgacatttagggatgtggccatagaattctctctggaggagtgggaatgcctgaaccctgctcagcagaatttatatatgaatgtgatgttagagaactacaaaaacctggtcttcttgggtattgctgtctctaagcaagacccgatcaccagtctagagcaagaaaaagagccctggaatatgaagatatgtgagatggtggatgaatccccaggatacatgtgcaggatgtgcagctatgtgttcttcttttaccagagacctttggccagagcaagacataaaagattcttttcaacaagtgatactgagaagacatggcaaatgtgaacatgagaatttacagttaagaaaaggctccgcaaatgtggttgagtgtaaggtgtacaaaaaaggttataatgaactaaaccagtgtttgacaactacccagagcaaaatatttccatgtgataaatatataaaagtctttcataaaattttcaattcaaatagacacaagacaagacatactggagagaaacctttcaaatgtaaaaaatgtgatgaatcattttgcatgcttttacacctacatcaacataaaagaattcatattagagagaattcttaccaatgtgaagaatgtgacaaagtgtttaagcggttctcaacccttactagacacaagagagttcatactggagagaaacccttcaaatgtgaagaatgtggcaaagcttttaagcactcctcaacccttactacacataagatgattcatactggagagaaaccctacagatgtgaagaatgtggcaaagccttctaccattcttcacaccttactacacataaggtaattcatactggagagaagcccttcaaatgtgaagaatgtggtaaagcttttaaccacccttcagcccttactacacataagttcattcatgttaaagaaaaaccctacaaatgtgaagaatgtgacaaagcttttaaccgattctcataccttactaaacataagataattcattctggagagaaatcttacaaatgtgaacaatgtggcaaaggctttaactggtcttcaacccttacaaaacataaaagaattcatactggagagaaaccctacaaatgtgaagaatgtggcaaagcctttaatgtgtcttcacaccttactacacataagatgattcatactggagagaaaccctacaaatgtgaagaatgtggcaaagcctttaaccactcctcaaaacttactatacataagataattcatactggagagaaaccttacaaatgtgaagaatgtggcaaagcttttaaccaatcctcaaaccttaccaaacataagataattcatactggagagaaactctacaaatgtgaagaatgtggcaaagcttttaaccgatcctcaaaccttactacacataagagaattcacactggagagaaaccctacaaatgtgaagaatgtggcaaagctttcaaccgatcctcaaaccttactaaacataacataattcatactggagagaaatcttacaaatgtgaagaatgtggtaaagcctttaaccaatcctcaactcttactaaacataggaaaattcagcagggcatggtggctcatgcctgtaatcccaacactttgagaggactaggtgagcagatcgcgaggtcaggagttcaagaccagcctggccaacatggtaaaaccccatctctactaaaaatacaaaaatttgctgggtgtggtggcaggcgcctgtaatcccagctacttgggaggcagaggcaggagaatcatttgaacctgggaggcagaggttgcagtgagccaagatcgcgccattctactccagcctgggccacaaggcaagactctgtctcaaaaaaaaaaaaaaaaagaaaagaaaattcatactggaacgaaaccctacaattgtgaagaatgtgccagtgctttcaaccagtcctcgaacctttttaagaaaataatttatactggagagaaattctacaaatgtgaagaatatggcaaagcctttaaccagtcttcaactcttactaggcattaaaaattcatactgtacagaaaccctacgagggtgaaaaacatggcaaagcctttaacaagccctcaattcttaacagacataacataattcatactggaaagaaactctgcaaaccagaaagatctggcaatgcttttgacaacacctcaaacttttctaaccataaaagaaattatactggtgagaaatcttagaaatctgaagaatgagacaaagcctttaaatggttgtcacacttgattgtaggccaggtgtggtgtcttacacctgtaatcccagcactgtgggaagccagggcaggtggattgcttgagcccaggagtttgagaccagcctggtcaacatggaaaatccccgtctctacaaaaaaaaaaaaaaaa

SEQ ID NO: 203632 - DNA, 649 bp, Homo sapiens
  Payload ID: 20152
  Gene Name: zinc finger protein 714
  ENST ID: ENST00000618422
  CDS Start-End: 204-649
ctttgtctctcgctgcagctggagctgcaggtctcgccttcactgccctgtgtcctctgctcgcagaggcccagcctctgtggccctgtgacctgcaggtattgagagatccacagctaagacgccaggtaccccggaagcctagaaatggagacgttgacatttagggatgtggccatagaattctctctggaggagtgggaatgcctgaaccctgctcagcagaatttatatatgaatgtgatgttagagaactacaaaaacctggtcttcttggagacctttggccagagcaagacataaaagattcttttcaacaagtgatactgagaagacatggcaaatgtgaacatgagaatttacagttaagaaaaggctccgcaaatgtggttgagtgtaaggtgtacaaaaaaggttataatgaactaaaccagtgtttgacaactacccagagcaaaatatttccatgtgataaatatataaaagtctttcataaaattttcaattcaaatagacacaagacaagacatactggagagaaacctttcaaatgtaaaaaatgtgatgaatcattttgcatgcttttacacctacatcaacataaaagaattcatattagagagaattcttaccaatgtgaagaatgtga

SEQ ID NO: 203633 - DNA, 647 bp, Homo sapiens
  Payload ID: 20152
  Gene Name: zinc finger protein 714
  ENST ID: ENST00000618008
  CDS Start-End: 231-647
gtctctcgctgcagctggagctgcaggtctcgccttcactgccctgtgtcctctgctcgcagaggcccagcctctgtggccctgtgacctgcaggtattgagagatccacagctaagacgccaggtaccccggaagcctagaaatggagacgttgacatttagggatgtggccatagaattctctctggaggagtgggaatgcctgaaccctgctcagcagaatttatatatgaatgtgatgttagagaactacaaaaacctggtcttcttgggtattgctgtctctaagcaagacccgatcaccagtctagagcaagaaaaagagccctggaatatgaagatatgtgagatggtggatgaatccccagctatgtgttcttcttttaccagagacctttggccagagcaagacataaaagattcttttcaacaagtgatactgagaagacatggcaaatgtgaacatgagaatttacagttaagaaaaggctccgcaaatgtggttgagtgtaaggtgtacaaaaaaggttataatgaactaaaccagtgtttgacaactacccagagcaaaatatttccatgtgataaatatataaaagtctttcataaaattttcaattcaaatagacacaagacaagacatact

SEQ ID NO: 203634 - DNA, 5197 bp, Homo sapiens
  Payload ID: 20153
  Gene Name: zinc finger protein 716
  Uniprot ID: A6NP11
  ENST ID: ENST00000420713
  CDS Start-End: 113-1600
ctttttgcttctctgcgcccagagctccagtccttctcttcactgctctgcgtcctctgctcctggaggccaagcctctgtggccttgtgtcctgcaagtattcgcagatttatggctaaaagaccgggaccccctggaagccgagaaatgggactgttgacattcagagacatagctatagaattttctctggcggaatggcaatgcctggatcatgctcagcagaatttatatagagatgtgatgttagagaactacagaaacctggtctccctgggtattgctgtctctaagccagacttgatcacctgtctggagcaaaataaagagccccagaatataaagagaaatgagatggtagccaaacacccagttacatgttctcatttcacccaagaccttcagtcagagcagggcataaaagattcactccaaaaagtgatactgagaagatatggaaaatgtggacaggaggatttacaagtaaaaaaatgctgtaaaagtgtaggtgagtgtgaggtgcacaaaggaggttataattatgttaaccaatgtttgtcagctacccaaaacaaaacatttcagactcataaatgcgtcaaagtctttggtaaattttcaaattccaatagacacaagacaagacatactggaaagaaacatttcaaatgtaaaaacgatggcaaatcattttgcatgctttcacgcctaaatcaacatcagataattcatactagggagaagtcttacaaatgtgaagaatgtggcaaatcctttaactgctcttcaacccttactagacataaaagaattcatactggagagaaaccctacagatgtgaggaatgtggcaaagcttttagctggtctgcatcccttactaaacataagagaattcatactggagagaaaccttacacatgtgaagaacgtggcaaagtctttagccgctcaacacttactaactacaagagaattcatactggagagaaaccctacacatgtgaagaatgtggcaaagcctttagccgctcttcaacacttactaaccacaagagaattcatactggagagagaccctacaaatgtgaagaatgtggcaaagcctttagcttatcctcaacccttaagaaacataagatagttcatactggggagaaactctacacatgtgaagaatgtgggaaagcctttaccttctcctcaactctaaatactcataagaggattcatactggagagaaaccctacacttgtgaagaatgtggcaaagcctttagcttaccctcaaccttcacttaccacaagagaactcatactggagagaaaccctacaaatgtgaagaatgtggcaaagcctttaactgctcctcaacccttaagaaacataagataattcatactggagagaaactctacaaatgtaaagaatgtgggaaagcctttaccttctcctcaactctaaatactcataagaggattcatactggagagaaaccctacaaatgtgaagaatgtgaccaaacttttaagtggcattcaagtcttgctaatcataagaatatgcatactggagagaaaccctacaaatatgaataatgtggtaaagtccagccctcaggccttataatacataaaataatttatactggaaaaaatcactacaagtgtggagaatgtggccaattctttaaccagttccaaaccactgctgtccataagataattcatattggacaaaagtcttataaatgtaaaaaaaaaagtaacagcctttaaccacccctcaaaccttaatgaacccaagagaatttatttaaaaaaatttttttgagacagagtctcactttgtcacccaggctggagtgcagtggcacgatgtcagctcactgcaacctctgcctcctgggttcaagcgattctcctgcctcagcctcctgagtagctggaattacaggcacgtgcaaccacactggctgagttttgtatttttagtagagatggggtttcaccattttgaccaggctggtctcaaactcctgacttcaggtgaaccacctgcctcagcctcccaaagcctaagagaatttatattagagagactctacaaaggtcaaaaatgtgacaaaacatttaagcacatctcaggccttacacaatatcagataattcattctagagacaaaccctacaaaaacaatgtggtaaagcttttacctagtcttgaacccttattatacactaaaagaattgatactgaagaaaaaccctacaataaggaatatggaaatgtcttttaaaagtcctcaaactttttgtttgaataaatgtaaaataattgatactggagagaacccctgcaattgtaaaaaaaaaaaaaaatgtggcaaagcttttaactggttctccatctttattaattaaaatattttatactggagagaaactctacatacataaaaaatgtgacagcatttaaccacacctgacatttttctaaaatagagaaatcatactggtgaaaaactctagaaatgtgttaaatgaggtaagtcctttaaatggtagttgcatgttatggtaggtaagataatttatactgaagaaaactcaggcaaatatgaaaaatgtggcaaaacttttaacaaattttcccatcttattgcacaggaagccttttatactagagaaaaattgtaaaaatataaagaatgtgaaaagccattaatgtctgttcacatcttactcaatatcagaaagtttatacttaacaaaagcattataggctagatgtggtggctcatgcctgtaatcccagcactttgggagctcatggcaggtggatcatgaggtcaggagttcaagaccagcctggctaacatggtgaatccccatctctactaaaaacacaaaaattagacaggcatggtggtgtgcacctgtaatcccagctactcaggaggctgaagcaggagaattgcttgaacccaggtggtggaggttgcagtgagtcaagatcaccccaccatactccagcctgggtgacagagcaagaatccatcttaaaaaaaaaaaaaaagcgtaaatgtgattactgtaaaaagacctttcagaaaacataggcctttaaagcaaagactatttattctaaagacaaacattaaaacataaagaggattgtgtagtacctttatttgtattacggattttattgtacacattttatatcaaaggaaaaccctgaaacagatgctcaaactttgttgaacatcggagaatttatattggagagaaagtgtaaatgaatgtcaaaaaatatttgttcaaaaactacagtttagaaaacactagtttatactaaaaaaatatttttgcagatgcagtaaatggggaaaatatgtttaatcaaaaattaagtctacataaacatttgaggattcacagtagaaagaatgaaggtgctgaaacttcagacattacactaaatcagagtgttgagtgtaaaaaagatataaatctaacaatataaatttaaagaagtagatttatttggagatttataattacattcgaggtatgcttctttctttgtaaaaaaaaatatagattttctgaaaagcaaatagtaatgtaactcacatttcaaattacttcatgttgatcctttcttcccattgtttctgtgaaagtattggaccaattgttgaatcagagatatgagattgttttttataggtgtccattattcatgaactttcctatggatgagtaaggacattaagttgtaagatgcataatgaaaatctaaatggagaggttctttgtggttgacttataacattgttttagtgatgtataaggcgagcgttcagagtaatattctaaattctagtgaggaaaacctttgaacgtcagtagtaaattattttatcaattgtacctttatgtaaacaaagttgtttttaatgagctaaaactattgtgctttgaaagaagtattaagctgccattgactctatcgtgtctcatcttaaggttctgcgtaaaagatggtgacaatatactatttgttaatgtaggggaatgacatcactagtagtctcttttttgccagtgtttttgtttgtttgttttgagactaagtcttactctgtcacccagactggggtgcagtggtgcgatctcagctcactgcaacctccacctcctgggtccaagtgattctcctgcttcagcctcacaagtagctggaactagaggcaggcaccaccactcctggctaatttttgtatttttagtagagatgaggtttccccatgttggccaggctggtctcaaactcctgacctcaggtgatacacccacctcggtgtaccgaagtgctgggattacaggcatgagccaccatgcctggcctactagaggttttacacagcaaacaagttgaagaattttgttcccataggacaaatttgtacttttttaccttatttaatttttttttaatttttgtgggtagtgtgcatacacacttatggcatatatgagatatgttaacacatgcacataatatttaatgatcacaacagagtaaatgaggcattcatcaccttgagcatgtatttatcctttgtattacaaacaatcccattatacagttttagttatttcaatatgtgcaattgaattactattaaccacagggtcattttatgatcataaaaattacatgagtataattaatacccatacatttctgagtcttgattaaatatttttaaaattttgttttataaattttttgcacatgtggcatctctgctgacaaacaaaaacagacttttagtttcaatttacatagagttacatatacaaatatattactctaaagatataccagccgagcacagtggctcccagcattttgggagcctgaggtgggaggatcatttgaggttaggagttcaagaccagcctggccaacatggtgaaaccccatctctactaaaaatacaaaaaattagctgggcatggtggtgcatgcccatggtcccagttactcaggaggctgaggcaggagaattgcttgaacctcggaggtggaggtagcagtgagctgagatggtgctactgcactccagcctgggtgaaagagcgagaaaccatctcaaaaaaaaaaataaataaataaaagat

SEQ ID NO: 203635 - DNA, 1169 bp, Homo sapiens
  Payload ID: 20154
  Gene Name: zinc finger protein 717
  ENST ID: ENST00000477374
  CDS Start-End: 173-517
cggtcttgtagctgggccagcctggggcttggttctatgtccctgcgggtcggtgcgagggcgaagaggaacccgtgggcccgggggatcccggggggccggaccagtgttccccagttgtgggagcagacgcgtgggcgcatcgcgggcgggcagggcctgaagtgcagctatgtttccagtgttctctggctgtttccaagagctacaagaaaagaataaatctctggagttggtgtcctttgaggaggtagctgtgcacttcacctgggaggagtggcaggacctggatgatgctcagaggaccctgtacagggacgtgatgctggagacctacagcagcctggtatcattggggcattacattaccaaacctgagatgatcttcaagctagagcaaggagcagagccatggatagtagaagaaaccccaaacctgagactttcaggtggaagcaagaagcaagttttctcaggtatttgccacaggagcctggtggagctccaggaggtttgatctctcttgtgaactctggaactgtattcccaattgtcaattggacatccctacgtatgggacctcagatatttcaaacatgatgtgtccaagtctgtatcacttctggccatcatattgttcttttatttttccaaatttcacatcaccagtaacaaactagctgtgatcatggcagatagcctggaaataaaactcccctttttaccctttgcacagcaaattgacatcaaatcctgtttctactttttttttttttaactattgcttccctattctgtattctcactgctccatctcctgatgtaggaggtcatctgttttcctcttttcctctcctctgactcttaagccctttcccattctctttctcaggaatggctgttaaaatgccaatatggtcttgtaactttcctgtacttagtgaacctccttatttacaccctgtttgtgaagtggctgtgttcaccctgggtggacacggaatgtttttgtcatgtacaaagagaattttatgctgcctgtgtacagttattaatttgtaagtacactcagctttttgtatctgtaggtttaatatctgtgtatgtaagcaaacttggatgcaaaatatttgaaataaaatcagatgcttgcatctgtagtgaacata

SEQ ID NO: 203636 - DNA, 608 bp, Homo sapiens
  Payload ID: 20154
  Gene Name: zinc finger protein 717
  ENST ID: ENST00000468296
  CDS Start-End: 278-608
tctggttccctccttcactgtgtgacctgcctagtcctcctgggttgcgtttacagaagtttatacgagacctagtttccagggaagaactcactgatgccgcgagggagatggggtactggatgatggtcttcagccttaagggtacttcagtcttaaccgtgtgttataaggtttgaaagggagggttccctatgaataagaagcgcacttgaaagaacagccctctggtctaacctcccactggtgcttcagaggaggataaaaggtcacagctatgtttccagtgttctctggctgtttccaagagctacaagaaaagaataaatctctggagttggtgtcctttgaggaggtagctgtgcacttcacctgggaggagtggcaggacctggatgatgctcagaggaccctgtacagggacgtgatgctggagacctacagcagcctggtatcattggggcattacattaccaaacctgagatgatcttcaagctagagcaaggagcagagccatggatagtagaagaaaccccaaacctgagactttcagctgtccagatcattgatgaccttattgaaaggagccatgaaagtcatgatagat

SEQ ID NO: 203637 - DNA, 3875 bp, Homo sapiens
  Payload ID: 20154
  Gene Name: zinc finger protein 717
  ENST ID: ENST00000478296
  CDS Start-End: 278-2872
gcggcacccagaggcggtcttgtagctgggccagcctggggcttggttctatgtccctgcgggtcggtgcgagggcgaagaggaacccgtgggcccgggggatcccggggggccggaccagtgttccccagttgtgggagcagacgcgtgggcgcatcgcgggcgggcagggcctgaagtgcaggagttggtgtcctttgaggaggtagctgtgcacttcacctgggaggagtggcaggacctggatgatgctcagaggaccctgtacagggacgtgatgctggagacctacagcagcctggtatcattggggcattacattaccaaacctgagatgatcttcaagctagagcaaggagcagagccatggatagtagaagaaaccccaaacctgagactttcagctgtccagatcattgatgaccttattgaaaggagccatgaaagtcatgatagatttttctggcaaattgtaatcaccaacagcaacacatcaactcaggagagagttgaattaggaaaaacatttaatttgaactcaaaccatgttttaaatctgattataaataatggaaacagttcaggaatgaagcctgggcagtttaatgattgccagaacatgcttttccctattaagcctggggagacacagtctggagagaaacctcatgtctgtgatataaccaggagatcccacagacatcatgaacatcttactcagcatcacaagattcaaactctgctgcagacttttcaatgtaatgaacaagggaaaaccttcaacacggaggcaatgttctttatacataagagggttcatatagtacagacctttggtaaatataatgaatatgagaaagcctgtaataactcagctgttattgtccaagtgataactcaggtaggacagccaacttgctgtagaaagtctgacttcactaaacatcagcagacacacacaggagagaaaccctatgaatgtgttgaatgtgagaaaccctccattagcaaatcagaccttatgctacagtgcaagatgcctactgaggaaaaaccttatgcctgtaactggtgtgaaaaattgttcagctataagtccagcctcattatccatcagagaattcacacaggggaaaagccctatggatgcaatgaatgtggtaaaacctttcgccgtaagtcattcctcactttacatgagagaactcacacaggggataaaccctacaaatgtattgaatgtggaaaaacttttcactgtaagtcacttctcactttacatcacagaactcactcaggggaaaagccctatcagtgtagtgaatgtggaaaaacctttagccagaagtcatacctcacaatacatcatagaactcacacaggggaaaagccctatgcatgtgaccattgtgaagaagcatttagccataagtcaaggcttactgtccatcagagaacacacacaggggaaaaaccgtatgaatgtaatgagtgtggaaaaccctttatcaataagtcaaacctcaggttacatcagagaactcacacaggggaaaaaccctatgaatgcaatgaatgtgggaaaacgtttcaccgtaagtcattcctcactatccatcaatggactcacacaggggaaaaaccctacgaatgcaatgaatgtgggaaaacctttcgctgtaagtcattcctcactgtccatcagagaactcatgctggggaaaaaccatacgcatgtaacgaatgtggaaaaacatatagccacaagtcataccttacagtacatcacagaactcacacaggggaaaaaccctatgaatgtaatgaatgtggaaaatcctttcactgtaagtcattcctaactatacatcagagaactcatgctggcaaaaaaccctatgaatgtaatgaatgtgagaaaacctttatcaataagttaaaccttgggatacacaagagaactcacacaggggaaagaccctatgaatgtaatgaatgtggaaaaacctttcgtcagaagtcaaatctcagcacccatcagggaactcacacaggagagaaaccttacgtatgtaatgaatgtggaaaaacctttcatcgcaagtcattcctcaccatacaccagagaactcacacggggaaaaaccgtatggatgtaatgaatgtggaaaaactttttgtcagaaatcataccttattatacatcagagaactcacaccggggaaaagccctatgaatgtaatgaatgtggaaaatcctttcatcagaaggcaaatcttcagaagcatcaaggtattcacacgggggagaaaccctatgaatgtagcaaatgtggaaaaaccttgtcagaagtcagtcctcactgtacatcatagaacccataccggagaaaaaccttatgaatgtaatgagtgtgggaaaaccttttgtcacaagtcaaacctcagtacgcatcaggggactcactcaggagagaaaccctatgaatgtgatgaatgtaggaaaactttttacgataagacagttctcaccatacatcagagaactcacacaggtgagaagccatttgaatgtaaagaatgtaggaaaaccttctcccagaagtcaaaactctttgtacatcacagaactcacacaggggaaaaaccctttagatgtaatgaatgtaggaaaactttctcccagaagtcaggcctcagtatacatcagagaacacacacaggagaaaaaccttatgaatgtaaggaatgtgggaaaaccttttgccagaagtcacacctcagcaggcatcaacaaacccatataggagagaaatctgacgtagctgaggcaggctatgtgttccctcaaaatcactcttttttcccttgaacacacaacctacacctctctggctactattacagatttctccatgctcagtctaggagaatatggacacaaatggtgaccattacctcctggcctaccaacaagaaggtcttaaccatgctgtaacagaagtcctatcatgcaggctttgttgttcccatttttacagcacactttgcactttaatgtcacagatatggctgttttcctagaagctcatataccaacctctgccagcttcaaacatttcttctgcaacttcctcacctctcttctcctccatagaattgaagagagttagggcctttctcaggattaggctttgtctcaagggaatgttggggctggtttgatcttctatgtggaccactcagactttctctgtgtcagtaaaaagcctgttttgttttttaaaaatcattcatgtgttctctggagtagcacctataacatccttcaagaactttttctttgcattcacaacttgagtagctgatgcaagaagcttagctttggcctgtcttagcttccaacatgctttcttcactaagctcgatgatttctaccttttgatttgaagtgacaggtgtgcacacttcttttcaattgaacacatggtggccactgcagagtgaagtggcctaatttcattgttgtatcttggggaatggggagctagaagagagaaacagagacagggaaatgactagtcaatgaagcagtcaaacacaacatttttccatcacgtttgctatcttccatagagttccagcacgctgagacaattccattagtaacatcagaaatcactgatcacagatcataacagatgtgataactaaaatctttgaaagattgggattgccaaaagatgtgacagagatgtgaagtgagcccatggtgttggaaaaatggtgctggtcaggcttgctgagcacttcgtggccacaaatctttaatttgttaaaaaggtgatgttgccaagcaaaataaagtgaagctc

SEQ ID NO: 203638 - DNA, 562 bp, Homo sapiens
  Payload ID: 20154
  Gene Name: zinc finger protein 717
  ENST ID: ENST00000471541
  CDS Start-End: 382-562
attttcctccggaagtgcggcacccagaggcggtcttgtagctgggccagcctggggcttggttctatgtccctgcgggtcggtgcgagggcgaagaggaacccgtgggcccgggggatcccggggggccggaccagtgttccccagttgtgggagcagacgcgtgggcgcatcgcgggcgggcagggcctgaagtgcagaagtttatacgagacctagtttccagggaagaactcactgatgccgcgagggagatggggtactggatgatggtcttcagccttaagggagttggtgtcctttgaggaggtagctgtgcacttcacctgggaggagtggcaggacctggatgatgctcagaggaccctgtacagggacgtgatgctggagacctacagcagcctggtatcattggggcattacattaccaaacctgagatgatcttcaagctagagcaaggagcagagccatggatagtagaagaaaccccaaacctgagactttcagctgtccagatcattgatgaccttattgaaaggagccatgaaagtcatgatagat

SEQ ID NO: 203639 - DNA, 2772 bp, Homo sapiens
  Payload ID: 20155
  Gene Name: zinc finger protein 718
  ENST ID: ENST00000609714
  CDS Start-End: 853-2193
gcctcatcgctctgctcccgctccttagggaagcctcggtgattctgccacagcctcagcctctgtggctctgtgacctgccggtattggatgattcgtatctaagactctgggacactcctgaagtcgggaaatggtgagtgtgcagggcagggcgtcccaaggctgtggaggcctcatcggaaccggcgggaaatggcggcggtgggaggagtctgtgaatggagttcccgctcagccctctgtcctcagtcccctccggtgagggacccgcgctcttgtcagtccccgtacagcggctctggcccagcctgcagccctccttgtgcagctctgcgccggtagccctgcactttccccgggctgtggagtgagtaggagctcatccggaagacaccgcggcggcctgcgcggtgccggcgtgggaggagctgtggtccggaatcccgtccctactttaccctgttcagaatgagattgaggccccatcaaaacatggagttcatgtgagcaaacaggacttattaatgggaaagctctgccgtggctcgtggtttggggactgccagcgggtcttgaaggaaaggcttttgtgaggtgtgtgaggaagcgaagcaaatcacctgcctgcgccaactttgccgccagtccccttgccctgtgcgcctcctccgcgtggctgttcctgaatacgctggtgtctgttcgcatcttttagaatacgctggtgtcggtgcgcacagcgcttctcttagttctgaactcttaacattcaaggatgtggccatagaattctctccagaagagtggaaatgtctggacacttcccagcagaatttatatagagatgtgatgttggagaactacagaaacctggtctccctgggtgttagtatctctaacccagacctggtcaccagtctggagcaaagaaaagagccctacaatttgaagatacatgaaacagcagccagacccccagctgtgtgttctcatttcacccaaaacctttggacagtgcagggcatagaagattcattccacaaacttataccaaaaggacatgagaaacgtggacatgagaatttaagaaaaacttgtaaaagtataaatgagtgtaaggtgcagaaaggtggttataatagaattaaccaatgcttattaactacccagaaaaaaacaattcaatctaatatatgtgtcaaagtttttcataaattttcaaattcaaacaaagataagataagatatactggagataaaacctttaaatgtaaagaatgtggcaaatcatttcacgtgctctcacgcctaactcaacacaaaagaattcatactggagagaacccctacacatgtgaagaatgtggcaaagcctttaattggtcctcaattcttactaaacataagagaattcatgccagagagaaattctacaagtgtgaagaatgtggtaaaggctttactcggtcctcacaccttactaaacataagagaattcatactggagagaaaccctacatatgtgaaaaatgtggtaaagcttttaaccaatcctcaacccttaatttacataagagaattcattctgcacaaaaatactacaaatgtgaagaatgtggtaaagcctttaagtggtcctcatcccttaatgaacataagagaattcatgctggagagaaacccttctcatgcgaagaatgtggcaatgtctttaccacatcctcagactttgctaaacataagagaattcatacaggagagaaaccctacaaatgtgaagaatgtggaaaatcctttaataggtccacaactcttacgacacataagagaatccatactggagagaaaccctacacatgtgaagaatgtggaaaagcctttaattggtcctcaacccttaatgtacacaagagaattcactctggaaaaaatccctacaaatgtgaagattgtggcaaagcctttaaagtgtttgcaaacctgcataatcataagaaaattcatactggagagaaaccctacatatgtaaacaatgtggcaaagcctttaaacagtcctcacacttgaataaacataagaaaattcacactgtagataaaccctacaaatgtaaagaatgcgggaaagcttttaagcagtactccaaccttcctcaacataagagaactcatactggaggaaaattttagaaatgtgaagaatgtgggagcctttaagtcttcctcagtcttttctaatcataattcatactggagagaaactctacacatgaaaaaattgacaaagcttttaaccgcaactcaatctgttctaaacataagagaaatggtattggtgagaagccataaaaatatgaaaaatgtggaaaagccttcaaatgcttgtcacatattactgaatataattcttactgcagaaaacccctaggaatattaaaagtgtggcaaaacctttaaccaatgctcatatctctttgcacatgatagcatttatacttgagaaaaattgtacaaatatagaaaatgtagaaaagccattaatgcctactcatgtgttactaaatatcagagagtttgtacttaataaaaggattataaatgtagtatttgttgaaagacctattagaaaatacaggtcttaaaagtgaagaagagtattctgaagatagacaatagaaatagtaagagggttgtagtacctgtacttgcatcatgggtcttattgtgcatatttcatactagaagaaaaccctgaagcagttgcccaaa

SEQ ID NO: 203640 - DNA, 3495 bp, Homo sapiens
  Payload ID: 20155
  Gene Name: zinc finger protein 718
  ENST ID: ENST00000510175
  CDS Start-End: 192-1628
gcggcatccgggatctggcgcggcttttgcttgtagctccagccagagctcggttagggcctcatcgctctgctcccgctccttagggaagcctcggtgattctgccacagcctcagcctctgtggctctgtgacctgccggtattggatgattcgtatctaagactctgggacactcctgaagtcgggaaatggaactcttaacattcaaggatgtggccatagaattctctccagaagagtggaaatgtctggacacttcccagcagaatttatatagagatgtgatgttggagaactacagaaacctggtctccctgggtgttagtatctctaacccagacctggtcaccagtctggagcaaagaaaagagccctacaatttgaagatacatgaaacagcagccagacccccagctgtgtgttctcatttcacccaaaacctttggacagtgcagggcatagaagattcattccacaaacttataccaaaaggacatgagaaacgtggacatgagaatttaagaaaaacttgtaaaagtataaatgagtgtaaggtgcagaaaggtggttataatagaattaaccaatgcttattaactacccagaaaaaaacaattcaatctaatatatgtgtcaaagtttttcataaattttcaaattcaaacaaagataagataagatatactggagataaaacctttaaatgtaaagaatgtggcaaatcatttcacgtgctctcacgcctaactcaacacaaaagaattcatactggagagaacccctacacatgtgaagaatgtggcaaagcctttaattggtcctcaattcttactaaacataagagaattcatgccagagagaaattctacaagtgtgaagaatgtggtaaaggctttactcggtcctcacaccttactaaacataagagaattcatactggagagaaaccctacatatgtgaaaaatgtggtaaagcttttaaccaatcctcaacccttaatttacataagagaattcattctgcacaaaaatactacaaatgtgaagaatgtggtaaagcctttaagtggtcctcatcccttaatgaacataagagaattcatgctggagagaaacccttctcatgcgaagaatgtggcaatgtctttaccacatcctcagactttgctaaacataagagaattcatacaggagagaaaccctacaaatgtgaagaatgtggaaaatcctttaataggtccacaactcttacgacacataagagaatccatactggagagaaaccctacacatgtgaagaatgtggaaaagcctttaattggtcctcaacccttaatgtacacaagagaattcactctggaaaaaatccctacaaatgtgaagattgtggcaaagcctttaaagtgtttgcaaacctgcataatcataagaaaattcatactggagagaaaccctacatatgtaaacaatgtggcaaagcctttaaacagtcctcacacttgaataaacataagaaaattcacactgtagataaaccctacaaatgtaaagaatgcgggaaagcttttaagcagtactccaaccttcctcaacataagagaactcatactggaggaaaattttagaaatgtgaagaatgtgggagcctttaagtcttcctcagtcttttctaatcataattcatactggagagaaactctacacatgaaaaaattgacaaagcttttaaccgcaactcaatctgttctaaacataagagaaatggtattggtgagaagccataaaaatatgaaaaatgtggaaaagccttcaaatgcttgtcacatattactgaatataattcttactgcagaaaacccctaggaatattaaaagtgtggcaaaacctttaaccaatgctcatatctctttgcacatgatagcatttatacttgagaaaaattgtacaaatatagaaaatgtagaaaagccattaatgcctactcatgtgttactaaatatcagagagtttgtacttaataaaaggattataaatgtagtatttgttgaaagacctattagaaaatacaggtcttaaaagtgaagaagagtattctgaagatagacaatagaaatagtaagagggttgtagtacctgtacttgcatcatgggtcttattgtgcatatttcatactagaagaaaaccctgaagcagttgcccaaactttctttgacattagagaatttatattggaaagaaattttacaaatgtaataaatttggaaaagcatttgttcaaaaactatagcttaaaaaaaaccagtttatactagaagatattttgtagatgcggtaagtatgaaaagatagtctgaaattaagactaaatgtcagaatatttacagtagaaagaaaaaggcattaacacttgaaacattacagtatatcagagtgtaaagtataaaaaaattccaaagctgaaactgttagataatttctttctatataagttgaaaaggagtagctttttgaaattattccattgaaattatactttttttacctgaaaaaattatagattttttgaaaagcaaattcaactctaaaattacttcatactgattcaacttattgtttatatgaaagcatgtgatgaattgttgcatcagaggtatgagtgattctttttaggtgggcatcattcatgaactttttttttttttttgagacggagtctcgctctgtcgcccaggctggagtgcagtggcgggatctcggctcactgcaagctctgcctccccctgggttcacgccattctcctgcctcagcctcccaagtagctgggactacaggcgcccgccactacgcccggctaattttttgtatttttagtagagacggggtttcaccgttttagccgggatggtctcgatctcctgacctcgtgatccgcccgcctcggcctcccaaagtgctgggattacaggcgtattcatgaacttttacatgaatgagtaaggacattgaaagatgcatgagatgatgcatacatctttgtggttgacttatcattgcatgatgcatgacgtacatgttcagagtaatattcttctgcattatagtgagagaaaaatcttgaattttagtaataaattgcttttaccagttgcacatttatgtaataaaatacagtaaattttaaaattctcttttaagattgtgtgtgaaccttactcaagggtgtaggtaaaaaatggtaacagtatacttttagtaacatagtttaatgacatttctagtaatttctttttccagtggctttaaacagcaaataagttgaagaatattgttctcatgttaaatttttattattttttatatttaaatttatttttaaaaatttatgtgggtacatggtatgtgtatacattcatggcatagatgggttactttgatacagacatgcaacatgtaatcacatcagagtaaatgagttattcatcacctcaa

SEQ ID NO: 203641 - DNA, 2769 bp, Homo sapiens
  Payload ID: 20156
  Gene Name: zinc finger protein 720
  Uniprot ID: Q7Z2F6
  ENST ID: ENST00000316491
  CDS Start-End: 200-580
ggcggcttccgggatttggcggtggcctttgttggctgcagtaagagctcagtctcttcaccaggggctcccagtccttccatctgggaggccaaggcggcttcgcgttctgagaatagacagaacctctgttactctgtgaccggcaggcaccgggagatccgtagctcagacgccaggacatcccggaagctgggaaatgggactgttgacattcagggatgtggccatagaattctctcgggaggagtgggaacacctggactcagatcagaagcttttatatggggatgtgatgttagagaactacggaaacctggtctctctgggtctcgctgtctctaagccggacctgatcacctttttggagcaaaggaaagagccctggaatgtgaagagtgcagagacagtagccatccagccagatatcttttctcatgatactcaaggcctcttaagaaagaagcttatagaagcatcattccaaaaagtgatattggatggatatgggagctgtggccctcagaatttaaacttaaggaaagagtgggaaagtgagggcaaaataatcctatggtgaaaaaaatcaacaagataatctctgcttgagaaaaaggaccaaagacaagtgaattttctgagggtgatgaaagtgttgcttcgaaaaggggtgaagtttatatgggtctatttatttgtctaacatgtacagttaaggtttatgccttgcaatgtatgtacatcttcacaaaaaaaatcttaaaaaaattaaatgggtgggggtagggaaagggttgaagtatagatgaagcagaagtggtacatgattagtagttgaagctgggggcaggtctatatattttatttttatgtctttaatagcatttgtataaatgtacaatattcgtttacaatgttagctcaggatcttgtttacctttggacagggagggagggagaaatttattttctgggtaggagtaaagctggttctattcctcagttatgtaaattatctgttataatccaaaaagctttacatgaatgtttctgtatgtaatgtggtatatcaataaaaaattaaatattacatatttgcaccagaatcctaactcactatctcagaatgttagcagcattttcttttgttgtaaagtggaacacaatctcatggcattagcagatgggtttgaatattctaaagtatcaacgtcctaatctcatgggcacctcttgggtctttccatttttgccttcatttgctaagtggcatgcttttgattttttgagatgaaactttttcccagcaaagtcttttccccacagtgatgctctgaaagccaggacacctagcacaggaccctgggcatagtatgcactcagtacatgtggagcatgttgatcaggaacaaaaggagtagcaaaggtcagttcctgcaaaggtgagtagataatacaggtatgactgaaaggctgcaactcaggagtaaacattttacattcattcaagagacaatttgcaactagtacaccaaaaaattttggcttgaagcagtactttggggacttggctaaactctgtaatcacttggagaactttaaacaatactgacgtctgggccctactccagggattttgattttattggtctgttgcaatttaggttttgggaattgtagggcctccgcatgtgactgtaatgtggagccaggggtgagacccactgtttcagggtgagggatgcattagctgtgtgtgatttccatgtgtgctgcaagtatttaacctatgaccactcctgcatttggagtcttggaaattgcagcaggaggaaatgtctctctacagatctattttttatgtcacttgcttttagagtaagaggttatttcaggcacagtaatttgatttaatctgttttcaaatactaaatctgaaaatactaaaatgaaaagaatttgcaaatgtgagaatttgcaaacatgtggagtgtgttcttatgtgctttccagtttctctgatgataagaaatgagtaatgttgggccttgatttcctaaactcagccctcagtcactttctcaaattatttgaagaccttccaagttgcttcagaagcattgtccaaaggagattattcccagtagtgaagaataatagatggatgagaatgtctaaggaatcctacttctgtcgcagaagtggcactctccagaacctcaagggcccatggagttcatgggctttggagtcaggcagagttgaccctgagtcccatcccagcctcttaatagactagttacttgacttggaacagttatgcaagacaaagcacaatgatactgattgcagtaatgggaacaattcattcctctctgtatccatgccctttgcaatgcatgtttttagctactcccatggagggaaagattctgtttttccagtccttggatctgactggccttatttgctgtggccaattcatacttactgttctagtgaaacaattaggcatgttttgctcctcattctagactttaattaaaattaaaattttatgatattttatttctactgtattttgctgtattcattctgctcagtattctagttcaccggtcctcttatctctgtttaatttagtggtgaacctatacattgtctggtaacttaattttgtattttcgtattctattgggctgtcgttcaaatgtggcttttaaacttcagttacttgttctttctacaaaaataaacattgattttcta

SEQ ID NO: 203642 - DNA, 2282 bp, Homo sapiens
  Payload ID: 20156
  Gene Name: zinc finger protein 720
  ENST ID: ENST00000398707
  CDS Start-End: 165-413
ctgcagtaagagctcagtctcttcaccaggggctcccagtccttccatctgggaggccaaggcggcttcgcgttctgagaatagacagaacctctgttactctgtgaccggcaggcaccgggagatccgtagctcagacgccaggacatcccggaagctgggaaatgggactgttgacattcagggatgtggccatagaattctctcgggaggagtgggaacacctggactcagatcagaagcttttatatggggatgtgatgttagagaactacggaaacctggtctctctgggtctcgctgtctctaagccggacctgatcacctttttggagcaaaggaaagagccctggaatgtgaagagtgcagagacagtagccatccagccagaagtcaaagtgaatacccattaaacaacaaattgtcctttccacacttctctccagctcctgaagagcaccattctgcctaatgtttctatgagtttggctactgtagatactttatatatcttttctcatgatactcaaggcctcttaagaaagaagcttatagaagcatcattccaaaaagtgatattggatggatatgggagctgtggccctcagaatttaaacttaaggaaagagtgggaaagtgaggagaaaaatcagtacaataaatctgatacaacattaagccaaggcataagccccagaagacatcagaaaactcattttctacataaccattgcaaacgtaaaaaatgtgagaaagcctttcatgaatgcaccaaccatgtccatcagagtatctttattcaagagaagtctgccaaatgtaataagtgtatagaaacttttatccagtcatcaaaacatactcagcctcagagaatccatattggagaaaagtcacacagatgtaataatggtgagaaaatccttagtaaattgtcaagtctaagaaaacataagataatccataatgaagagaaaccttacaaatgtaaagaatgtgacaaagcctttaaccatcgttcacaccttactcaacatcaaataattcatactggagagaaaccatacaaatgtaaagaatgtggcaaagccttcaattctagttcatattttactagacatcagagaattcacactggagaaaaactttacaaatgtaaagcgtgtagcaaatgttttactcattcttcaaatcttcttgtgcatcagagaattcatactggagagaaaccttacaaatgtaaagaatgtggtaaatcatttaaagtgtcttcagcccttactcagcatgagagaattcatactggagagaaaccctataaatgtaaggaatgcagcaaagcctttaactgtaggtcgtacctaactaaacatcagagaattcataccggagaaaaactttacaaatgtaaatcatgtagcaaatctttttctcgttcctcaagtcttattgtccaccagagaattcatactggagaaaaaccctataaatgcaaagaatgtggcaaagcctttaattgtagttcacgccttactcaacatcaaagaattcataccggagagaaaccctacatatgtaaagaatgtggcaaagcctttaactgtagttcatcccttactaaacatcagagaattcatactggagtaaaactttacaaatgtaaagcatgtagcaaatctttctctcattcctcatgtctttctgtgcatcagataactcatactggaatgaaaccatatatatgtaaggattgtggcatctcctttaaccggtcttcaaaccttagacgacatcagatgattcatactggagagaaaccctacaaatgtaaagaatgtggcaaattatttaatcgatgctcaacccttactcgacataaaagtattcatactagagaatttctatagttgtagtaaatgtgaaaagagttttatccaaaatttagaacttaaaaatcaccatagagtttatagggaaaccgactttacagattgaataaatgggaggaagtatttaatcagaactcaaatctgaatgtgtcaggacttacacaaaaaaggactaaagcacagatccccactttaaaattaaataagagtatttgttatggaggattactctaaagccaaagcagttacttattttgttatgtgtttcaaatgagcaaaagcattgatgtttggacaagtaattattcagtgagcatgttatttgtattgaaaacatttgaaatttgtataaagcaaatcataatttaattctcagattagttgttatacctt

SEQ ID NO: 203643 - DNA, 791 bp, Homo sapiens
  Payload ID: 20156
  Gene Name: zinc finger protein 720
  ENST ID: ENST00000534369
  CDS Start-End: 157-513
agagctcagtctcttcaccaggggctcccagtccttccatctgggaggccaaggcggcttcgcgttctgagaatagacagaacctctgttactctgtgaccggcaggcaccgggagatccgtagctcagacgccaggacatcccggaagctgggaaatggtctcctttacagaaaggggcttggataaggaggaaagaccatcagaagaaaagataagacactctcttctcattccagtaagagccacatgcaaggcaagaatcagagtccagctcagatgggggaactctaggaagagagaaatccattccatggacagctgccaagatagagcaggacagcatcaaggacatgagccaaaagtgcaaaaggactgcttgactttggaaaagaaaccaaaggcctctgacactgtacacatcagtgaaatgaggagacccatgatgcctgctgtgggggacccccagaggcccacaccgggcacagcgagcggcccagatctcagtctctaggagaccacccactaccacttcagaaaagcctggtgacctctctgcacactccatctgaagccatttatcacaacacagcccaggtgtgggaacagtaggcctattctctgctgacctgggagcagctgtctgagctcacctggctccaggggcctctgtgctgtggtacaaacctgtgccatggccacccaggtggcctatgtctttcgcactgagggctggctcatcccagccatactccctggtccctagggtggagaagctcagaactcctccta

SEQ ID NO: 203644 - DNA, 5994 bp, Homo sapiens
  Payload ID: 20156
  Gene Name: zinc finger protein 720
  ENST ID: ENST00000534277
  CDS Start-End: 189-347
ggatttggcggtggcctttgttggctgcagtaagagctcagtctcttcaccaggggctcccagtccttccatctgggaggccaaggcggcttcgcgttctgagaatagacagaacctctgttactctgtgaccggcaggcaccgggagatccgtagctcagacgccaggacatcccggaagctgggaaatggtgaatgtgccagggactgttgacattcagggatgtggccatagaattctctcgggaggagtgggaacacctggactcagatcagaagcttttatatggggatgtgatgttagagaactacggaaacctggtctctctgggtctcgctgtctctaagccggacctgatcacctttttggagcaaaggaaagagccctggaatgtgaagagtgcagagacagtagccatccagccagatatcttttctcatgatactcaaggcctcttaagaaagaagcttatagaagcatcattccaaaaagtgatattggatggatatgggagctgtggccctcagaatttaaacttaaggaaagagtgggaaagtgaggagaaaaatcagtacaataaatctgatacaacattaagccaaggcataagccccagaagacatcagaaaactcattttctacataaccattgcaaacgtaaaaaatgtgagaaagcctttcatgaatgcaccaaccatgtccatcagagtatctttattcaagagaagtctgccaaatgtaataagtgtatagaaacttttatccagtcatcaaaacatactcagcctcagagaatccatattggagaaaagtcacacagatgtaataatggtgagaaaatccttagtaaattgtcaagtctaagaaaacataagataatccataatgaagagaaaccttacaaatgtaaagaatgtgacaaagcctttaaccatcgttcacaccttactcaacatcaaataattcatactggagagaaaccatacaaatgtaaagaatgtggcaaagccttcaattctagttcatattttactagacatcagagaattcacactggagaaaaactttacaaatgtaaagcgtgtagcaaatgttttactcattcttcaaatcttcttgtgcatcagagaattcatactggagagaaaccttacaaatgtaaagaatgtggtaaatcatttaaagtgtcttcagcccttactcagcatgagagaattcatactggagagaaaccctataaatgtaaggaatgcagcaaagcctttaactgtaggtcgtacctaactaaacatcagagaattcataccggagaaaaactttacaaatgtaaatcatgtagcaaatctttttctcgttcctcaagtcttattgtccaccagagaattcatactggagaaaaaccctataaatgcaaagaatgtggcaaagcctttaattgtagttcacgccttactcaacatcaaagaattcataccggagagaaaccctacatatgtaaagaatgtggcaaagcctttaactgtagttcatcccttactaaacatcagagaattcatactggagtaaaactttacaaatgtaaagcatgtagcaaatctttctctcattcctcatgtctttctgtgcatcagataactcatactggaatgaaaccatatatatgtaaggattgtggcatctcctttaaccggtcttcaaaccttagacgacatcagatgattcatactggagagaaaccctacaaatgtaaagaatgtggcaaattatttaatcgatgctcaacccttactcgacataaaagtattcatactagagaatttctatagttgtagtaaatgtgaaaagagttttatccaaaatttagaacttaaaaatcaccatagagtttatagggaaaccgactttacagattgaataaatgggaggaagtatttaatcagaactcaaatctgaatgtgtcaggacttacacaaaaaaggactaaagcacagatccccactttaaaattaaataagagtatttgttatggaggattactctaaagccaaagcagttacttattttgttatgtgtttcaaatgagcaaaagcattgatgtttggacaagtaattattcagtgagcatgttatttgtattgaaaacatttgaaatttgtataaagcaaatcataatttaattctcagattagttgttataccttaatgcctagtgtttatataaaaacatatagtctattttttctgcatcagagctgtaagaggtcgttctatagtaggtgaacatcattaatatcaacttattttcttggaaatttaatggcaaatgtaaaatacatgaagaaaatctaaaagaggctctttgtgtttgaatcattaaacagtaatatgtgtaaacatatagtacatatttagggcattagtattctatactaaagtaaaagaggaatattctgaatttatttattacatcaattgctccttaagtagaaaaacactggtcagttatttaaaatactggcatacctttatagtacaatgaagtagtaatcttgaatattatttgatgtgttaaaaataaaaacatcttcacagatatcagagaaaagtgaaaactcatatctgaaagattataaatatactttatatcaattttccagagaacttaaacttctaataatattggtaatattctcatggttactattttatattctttcctgctttttgtagctactggtgtactatgacagttataataaagattatatgggggtatacttaaatgccatacttttaaaatcctgaatcattgtttataaagttttattcaatatttttctttgcacatgccctttttcagtccaattgaacacttagagatttttctttgctttcacttgcattaaatggaatatacagatgtactaagatagaaagaaaaaggtgaaagagaactatacaggcagaaatgcatgtgtgtgtacctgtcttcaaatggaaaagaaaatgatggatcacaacaggaaactggagaactgttgatttattacagttctcaaattagaaacctcccaaattcttaaagctaaattagcttttcattgcacactgaatttttctctgataaatctaatgtcttctgggttcagactttatcccgtacaaatccttttttcttgcctgtgattcatgtgagaagaattatataattttcttatttcaaagcttataaactattacttataagttctcatggattttaagaatgtttttgtaaaatttaatggtgctgtccaggtgtggtggctcacgccggtaatcccagcatttcgggaggctgaggcaggaggatcatttgaggtcaggagtttgagaccagcctggccaacatggtgatatctcgtctctactgaaaatacaaaaattagctggatgtggtggcacacacctgtaatcccagttactcaggaggcaaaggcaggagagttgcttgaactgaggagatgaaggttacagtgagccaagtttgtgcctcacactccagcctgggtaacagagtgagactctgtctataaacaaacaaattatctgtcatctacctatagacataaccctactgaggaggatggggataaaaggtctgcatctaagtcactttgaaaaacagtattttgattgaatgctgtaagactacacaaatgctgtattctactgagtaatattttattttcctacaaggatatgcattagcaattctgaaacagttttacatgttattatataatatatggaggctgtttctcagtgtagttcacaaaagttaaatggtgaatgctagcatgaatcttgtggtcctagcccaaagttggaaatatcaggatgaacccatgactaatacatctggatggatggatggatgaatagatataaagataggtaggtaggtaggtaggtaggtagatagatagatagatagatagatagatagatagatagatagatgaagcgatgtctaagatatctggaaggatggatggatggatggatggatagttagatagatagatagatagatagatacatagatagacgattcagagatagataatgttccaaactcttgagggccaagaactggtgacatcttgtatcaacacatctaggtctacaatcttggtttctaaacaacattcattaaaaggacccaagggttgaagttagaaaatacaagttgagctagagtatcttgtaaagccacaaagaaaaaagtgcttaataaaaatgatggggacttttcaaagggagccaacctgaaagacctcccaatggtccaagctccaacaatatgagcaataagttatgatagctttggattatggcccacagaataaagtaatactcatctctactgtgtgaataaaagagattaaataaggaaagaaggaatgaaatctacaatatttaaaatacagatcaatgtagttggataatgcaaaataaatcaacactagaacatcacagtaataattaccatagggaagattccccgaggaattcaaaaatttcaggaaaaacttaaacactaaagagtgtatttgggccagtctcggtggcacatgcctgtaatcctagcactttgggaggcctctgcgggtggatcacctgaggtcaggagttcaagaccagcctagccaacatggtgaaaccccgtctctattaaaaatgaaaaaattagtcgggcatggtggtgggtacctataatcccagctacttgggaggctgaagcaggagagtcacttgaacctgggaagcagaagttgttttgagccaagatcatgccattgcactccagcctgggcgacaagagcagaactctgtctcaaaaaaaaaaaaagaaaagaaaagtgtatttgcatattttaagtatctaccatctaatatttattaatacaattttttcttaatttcttagacttgtgactatttgaaacaaattataacactgtattgtaggatttataatttgtagttgtaaaatttataacacatggaataagaagataaatggaactgttctgtagcaaatttttcatgttttatatttaagacagtatagtattaactctaaaagtatggtggatatgttaaagattcatattgtattccctgcagcaaccactaaaaaatgcaaagaagtgtaatgtaaatgctaaaaaaggagataattataaaatatttatttgcacaatatttatgtatcttttagtcataatagcccaaaacaggaaacaaccaaaatgtccattaataagaaaatgaactaattgtatagcttttagaacaaaatacagctcaggaatatgaaaaaccaagcacacatcctggataaaattcataaacctgctcaatgagagaaaagttggacacaaaattgtactttatgtattttgtattttattccaggcaaaataatcctatggtgaaaaaaatcaacaagataatctctgcttgagaaaaaggaccaaagacaagtgaattttctgagggtgatgaaagtgttgcttcgaaaaggggtgaagtttatatgggtctatttatttgtctaacatgtacagttaaggtttatgccttgcaatgtatgtacatcttcacaaaaaaaatcttaaaaaaattaaatgggtgggggtagggaaagggttgaagtatagatgaagcagaagtggtacatgattagtagttgaagctgggggcaggtctatatattttatttttatgtctttaatagcatttgtataaatgtacaatattcgtttacaatgttagctcaggatcttgtttacctttggacagggagggagggagaaatttattttctgggtaggagtaaagctggttctattcctcagttatgtaaattatctgttataatccaaaaagctttacatgaatgtttctgtatgtaatgtggtatatcaataaaaaattaaatatta

SEQ ID NO: 203645 - DNA, 570 bp, Homo sapiens
  Payload ID: 20156
  Gene Name: zinc finger protein 720
  ENST ID: ENST00000530881
  CDS Start-End: 131-570
cccagtccttccatctgggaggccaaggcggcttcgcgttctgagaatagacagaacctctgttactctgtgaccggcaggcaccgggagatccgtagctcagacgccaggacatcccggaagctgggaaatggtgaatgtgccaggtcgggggtccccagaagagggagaggggcggtcggaagcggcgggaaccctctttgaggtcactgaacatctgactggctgggcacctgctcctgtcccttcagttgagggactgttgacattcagggatgtggccatagaattctctcgggaggagtgggaacacctggactcagatcagaagcttttatatggggatgtgatgttagagaactacggaaacctggtctctctgggtctcgctgtctctaagccggacctgatcacctttttggagcaaaggaaagagccctggaatgtgaagagtgcagagacagtagccatccagccagatatcttttctcatgatactcaaggcctcttaagaaagaagcttatagaagcatcattccaaaaagtgatattggatggatatgggagctg

SEQ ID NO: 203646 - DNA, 518 bp, Homo sapiens
  Payload ID: 20156
  Gene Name: zinc finger protein 720
  ENST ID: ENST00000529515
  CDS Start-End: 128-518
agtccttccatctgggaggccaaggcggcttcgcgttctgagaatagacagaacctctgttactctgtgaccggcaggcaccgggagatccgtagctcagacgccaggacatcccggaagctgggaaatgggactgttgacattcagggatgtggccatagaattctctcgggaggagtgggaacacctggactcagatcagaagcttttatatggggatgtgatgttagagaactacggaaacctggtctctctgggtctcgctgtctctaagccggacctgatcacctttttggagcaaaggaaagagccctggaatgtgaagagtgcagagacagtagccatccagccagatatcttttctcatgatactcaaggcctcttaagaaagaagcttatagaagcatcattccaaaaagtgatattggatggatatgggagctgtggccctcagaatttaaacttaaggaaagagtgggaaagtgaggagaaaaatcagtacaataaatctgatacaa

SEQ ID NO: 203647 - DNA, 837 bp, Homo sapiens
  Payload ID: 20156
  Gene Name: zinc finger protein 720
  ENST ID: ENST00000539915
  CDS Start-End: 202-372
ggggcggcttccgggatttggcggtggcctttgttggctgcagtaagagctcagtctcttcaccaggggctcccagtccttccatctgggaggccaaggcggcttcgcgttctgagaatagacagaacctctgttactctgtgaccggcaggcaccgggagatccgtagctcagacgccaggacatcccggaagctgggaaatggtgaatgtgccagatatcttttctcatgatactcaaggcctcttaagaaagaagcttatagaagcatcattccaaaaagtgatattggatggatatgggagctgtggccctcagaatttaaacttaaggaaagagtgggaaagtgagggcaaaataatcctatggtgaaaaaaatcaacaagataatctctgcttgagaaaaaggaccaaagacaagtgaattttctgagggtgatgaaagtgttgcttcgaaaaggggtgaagtttatatgggtctatttatttgtctaacatgtacagttaaggtttatgccttgcaatgtatgtacatcttcacaaaaaaaatcttaaaaaaattaaatgggtgggggtagggaaagggttgaagtatagatgaagcagaagtggtacatgattagtagttgaagctgggggcaggtctatatattttatttttatgtctttaatagcatttgtataaatgtacaatattcgtttacaatgttagctcaggatcttgtttacctttggacagggagggagggagaaatttattttctgggtaggagtaaagctggttctattcctcagttatgtaaattatctgttataatccaaaaagctttacatgaa

SEQ ID NO: 203648 - DNA, 1339 bp, Homo sapiens
  Payload ID: 20156
  Gene Name: zinc finger protein 720
  Uniprot ID: Q7Z2F6
  ENST ID: ENST00000398696
  CDS Start-End: 161-697
agtaagagctcagtctcttcaccaggggctcccagtccttccatctgggaggccaaggcggcttcgcgttctgagaatagacagaacctctgttactctgtgaccggcaggcaccgggagatccgtagctcagacgccaggacatcccggaagctgggaaatggtgaatgtgccagatatcttttctcatgatactcaaggcctcttaagaaagaagcttatagaagcatcattccaaaaagtgatattggatggatatgggagctgtggccctcagaatttaaacttaaggaaagagtgggaaagtgagggtaagtgtgaaggtcacaatggatattatgatggacatacaaaatgtaagacaactacctataacaaaaacctcactgttacaggaggtcaaaaacatgaaaaaactcaatttatgtcagttgctttttctaaaccatgtgtttctgtaagtaagtgtcaacatcaatttttgaaacttaccttttcttttaaaggaaatttggataatccgaatagtgacttagtccatgtttcaaataatcatttaaaccaattaaaatatagaactggagtaaatgttcagtcaaatatttctgaaaaggagagatttaaaaacgaggaggtgatttctaaatatgatcaatttgatggatctttgttaaaagtttgtttcaccaacaaataacacctcgttctgcctgtgatcaatatagaaaggtcttcattcattcatcattgcttaatcaatgtcaaggaatagataatttgggaaaatatcacacacataataaaactttgacagcctttaggcaggactataccctaaataattaccagtatatttgtgttgcagagaaaaatcagtacaataaatctgatacaacattaagccaaggcataagccccagaagacatcagaaaactcattttctacataaccattgcaaacgtaaaaaatgtgagaaagcctttcatgaatgcaccaaccatgtccatcagagtatctttattcaagagaagtctgccaaatgtaataagtgtatagaaacttttatccagtcatcaaaacatactcagcctcagagaatccatattggagaaaagtcacacagatgtaataatggtgagaaaatccttagtaaattgtcaagtctaagaaaacataagataatccataatgaagagaaaccttacaaatgtaaagaatgtgacaaagcctttaaccatcgttcacaccttactcaacatcaaataattcatactggagagaaaccatacaaatgtaaagaatgtggcaaagccttcaattctagttcatattttacta

SEQ ID NO: 203649 - DNA, 1214 bp, Homo sapiens
  Payload ID: 20156
  Gene Name: zinc finger protein 720
  ENST ID: ENST00000529943
  CDS Start-End: 205-363
gcaggggcggcttccgggatttggcggtggcctttgttggctgcagtaagagctcagtctcttcaccaggggctcccagtccttccatctgggaggccaaggcggcttcgcgttctgagaatagacagaacctctgttactctgtgaccggcaggcaccgggagatccgtagctcagacgccaggacatcccggaagctgggaaatggtgaatgtgccagggactgttgacattcagggatgtggccatagaattctctcgggaggagtgggaacacctggactcagatcagaagcttttatatggggatgtgatgttagagaactacggaaacctggtctctctgggtctcgctgtctctaagccggacctgatcacctttttggagcaaaggaaagagccctggaatgtgaagagtgcagagacagtagccatccagccagatatcttttctcatgatactcaaggcctcttaagaaagaagcttatagaagcatcattccaaaaagtgatattggatggatatgggagctgtggccctcagaatttaaacttaaggaaagagtgggaaagtgagggtaagtgtgaaggtcacaatggatattatgatggacatacaaaatgtaagacaactacctataacaaaaacctcactgttacaggaggtcaaaaacatgaaaaaactcaatttatgtcagttgctttttctaaaccatgtgtttctgtaagtaagtgtcaacatcaatttttgaaacttaccttttcttttaaaggaaatttggataatccgaatagtgacttagtccatgtttcaaataatcatttaaaccaattaaaatatagaactggagtaaatgttcagtcaaatatttctgaaaaggagagatttaaaaacgaggaggtgatttctaaatatgatcaatttgatggatctttgttaaaagtttgtttcaccaacaaataacacctcgttctgcctgtgatcaatatagaaaggtcttcattcattcatcattgcttaatcaatgtcaaggaatagataatttgggaaaatatcacacacataataaaactttgacagcctttaggcaggactataccctaaataattaccagtatatttgtgttgcagagaaaaatcagtacaataaatctgatacaacattaagccaaggcataagccccagaagacatcagaaaactcattttctaca

SEQ ID NO: 203650 - DNA, 4492 bp, Homo sapiens
  Payload ID: 20157
  Gene Name: zinc finger protein 721
  Uniprot ID: Q8TF20
  ENST ID: ENST00000338977
  CDS Start-End: 50-2785
ggggccgtcttcccggcgagtccgcgacggtcgccgcccacggcgagctatgtgttctcatttcacccaagactttttgccagtgcaggggatagaagattcattccacaaacttatactgagaagatatgagaaatgtgggcatgataatttacaattaaggaaaggctgtaaaagtatgaacgtgtgtaaagtgcagaagggagtttataatggaattaataaatgcttgtcaaatactcagagcaaaatatttcaatgtaatgcacgtgtcaaagtttttagtaaatttgcaaattcaaacaaagataagacaagacatactggagagaaacactttaaatgtaacgaatgtggcaagtcatttcagaagttctcagacctaactcaacataaaggaattcatgctggagagaaaccctacacttgtgaagaacgtggcaaagactttggatggtacacagacctgaatcaacacaagaaaattcatactggagagaaaccttacaaatgtgaagaatgtggcaaagcctttaataggtcaacaaaccttactgcacataagagaattcacaacagagagaaagcttacacaggtgaagatcgtgacagagcctttggatggtccacaaacctgaatgaatataagaaaattcatactggagataaaccctacaaatgtaaagaatgtgggaaagcctttatgcattcctcacacctgaataaacatgagaaaattcatactggagagaaaccctacaaatgtaaggaatgtggcaaagtcatttcctcatcctcaagctttgctaaacataagaggattcatactggcgagaaaccctttaaatgtttagaatgtggtaaagcctttaatatttccacaacccttactaaacataggagaattcatactggagagaaaccctacacatgtgaagtatgtggcaaagcctttagacagtccgcaaacctttatgtacataggagaattcatactggagagaaaccctacacatgtggagaatgtggcaaaacctttagacagtccgcaaacctttacgtacataggagaattcatactggagagaaaccttacaaatgcgaagactgtggcaaagcctttggacggtacacagccctgaatcaacacaagaaaattcatactggagagaaaccttacaaatgtgaagagtgtggcaaagcctttaatagttcaacaaaccttactgcacataagagaattcacaccagagagaaaccctacacatgtgaagatcgtggcagagcctttggattgtccacaaacctgaatgaatataagaaaattcatactggagataaaccctacaaatgtaaagaatgtgggaaagcctttatacattccttgcacctgaataaacatgagaaaattcatactggaaagaaaccctacaaatgtaagcaatgtggcaaagtcattacctcatcctcaagctttgctaaacataagaggattcatactggcgagaaaccctttgaatgtttagaatgtggtaaagcgtttactagttccacaacccttactaaacataggagaattcatactggagagaaaccctacacatgtgaagtatgtggcaaagcctttagacagtccgcaatcctttatgtacataggagaattcatactggagagaaaccctacacatgtgaagaatgtggcaaaacctttagacagtccgcaaacctttatgtacataggagaattcatactggagagaaaccttacaaatgtgaagagtgtggcaaagcctttggacggtacacagacctgaatcaacacaagaaaattcatactggagagaaactttacaaatgtgaagagtgtggcaaagactttgtatggtacacggacctgaatcaacagaagaaaatttacactggggagaaaccttacaaatgtgaagagtgtggcaaagcctttgccccatcaacagacctgaatcaacacacgaaaattcttactggagagcaaagttacaaatgtgaagagtgtggcaaagcctttggatggtccatagccctgaatcaacacaagaaaattcatactggagaaaaaccttacaaatgtgaagagtgtggcaaagcctttagtaggtcaagaaaccttactacacataggagagttcacactagggagaaaccctacaaatgtgaagatcgtggcagatcctttggatggtccacaaacctgaacgaatataagaaaattcatactggagataaactctacaaatgtaaagaatgtgggaaagtgtttaaacagtcctcacacctgaatagacatgagaaaattcatactggaaagaaaccctacaaatgtaaggaatgtggcaaagtcattacgtcatcctcaagctttgctaaacataagaggattcatacaggtgagaaaccctttaaatgtttagaatgtggtaaagcgtttactagttccacaacccttactaaacataggagaattcatactggagagaaaccctacacatgtgaagaatgtggcaaagcctttagacagtcagcaatcctttatgtacataggagaattcatactggagagaaaccctacacatgtggagaatgtggcaaaacctttagacagtctgcaaatctttatgcgcataagaaaattcatactggagagaaaccctacacgtgtggagactgtggcaaaacctttagacagtctgcaaatctttatgcacataagaaaattcatactggagataaaaccatacaagtgtaaagaatgtggcaaagcctttaagtcatactacagcattcttaaacataagagaactcataccaggggaatgtcttacgaaggtgacgaatgtcgcggtctttaaatgctcctcaatcctttctaatcataagataattcataatgaagagaaactctaaaatgtgaaaaatgtgagaaggcttttaatcacacctcaatctgttgtagacataagagtaattatattgatgagaagccaaattaaaattaaaaatgtggcaaagacttccaattctagtcagttcttaatgtaattcctactgaagaaaacacctggaaatacaaaaaatgtggcaaaacttgtaaccaatgcttagcatttttgcacatgatagtatttatatgtgagactacttgtacaaacataaaaatatacaaaagctattgtctacttgaaatttatagttaataaaagcattataaatgtaatttctgttgaaagaccttttagaaaatataggccattaaagtgaagaatagtcttaagacagagaatacaaagataaagagggctctagtacctgtacttgtatcccagaacttactatatgcattttgtactagaggaaaactctgaagcagttgcttaaactttgttcaacatcagagaatttatattggagagaaatcctacaaatgtaataaatgtggaaaaacctctgttcagaaactgcaggttaagaaaccagaggccaggcgcggtggctcacgcctgtaatcccaacactttgggaggccaaggagggtggatcacctgaggtcgggagttcaaggacagcctgaccaatatggagaaacctcgtctgtactaaaaatacaaaaattagcaggacatggtggtgcatggctgtaatcccagctactcaggaggctgagacaggagaatggcttgaacccaggaggtggaggttgcggtgagctgagatcgtgccattgcactccagcctgggtaacaagagtgaaactctgtctcaaaacaagataaaaagaaaagaaacaccagagaatttttactagaatataatttgtaggtgcagtaaatgtgaagaaatatttaggctaaaattaagactatgtaaacatcagaggatttacagtagaaagaactaaggaactaacacttcagactttaaaataaatcagagtattaagtataacaaaagttgaacctgttagaaaatttccttgtatataagttgaaaagtaggtttttgaagagatatattcgaaatatattttttcacttgaaaaaagtaaaaatttttttcaaaagcaaataattcaactctaaaattatactatttcaacattctcatttatgtgaaagcatgtgataaattgttgctgcgtcagagatatgagaaactcctttgcattaggtgggcattattcatagacttctacatgaaagagaagagaaataaaagatgcaccaggaaaatctgagcagagaggcttttagtggttgacttactgagtgatgcctgaagtaggtgttcagagtaatactttgcgttatactgagagagaatctgaattttagtagtaaattgttttgccaactgtatatttatgtaataagtgcaataaaatgcagtaaattttaaaattctcttaagataatgtgtgaacttaatttttgaaataaaaattgttattgtgttaaaa

SEQ ID NO: 203651 - DNA, 664 bp, Homo sapiens
  Payload ID: 20157
  Gene Name: zinc finger protein 721
  ENST ID: ENST00000505900
  CDS Start-End: 185-664
ccgggatcttcggcggccttggcctgttgcttcagcctgagctcggttagggcctcacttccctgcttccacacctcagggaggcctcggtgattttgccagagcctcagcctccatcgctctgtaacctgcgggtattggatgattcgtagctaagacttcgcgacacccttgaagctgagaaatggaacccttaacattcagggatgtggccatagaattctctccagaagagtggaaatgcctggaccctgcccagcagaatttgtatagagatgtgatgttggagaactacagaaacctggtctccctagctatgtgttctcatttcacccaagactttttgccagtgcaggggatagaagattcattccacaaacttatactgagaagatatgagaaatgtgggcatgataatttacaattaaggaaaggctgtaaaagtatgaacgtgtgtaaagtgcagaagggagtttataatggaattaataaatgcttgtcaaatactcagagcaaaatatttcaatgtaatgcacgtgtcaaagtttttagtaaatttgcaaattcaaacaaagataagacaagacatactggagagaaacactttaaatgtaacgaatgtggcaagtcatttcagaagttctcagacctaactcaacataaa

SEQ ID NO: 203652 - DNA, 935 bp, Homo sapiens
  Payload ID: 20157
  Gene Name: zinc finger protein 721
  ENST ID: ENST00000506646
  CDS Start-End: 160-558
gttgcttcagcctgagctcggttagggcctcacttccctgcttccacacctcagggaggcctcggtgattttgccagagcctcagcctccatcgctctgtaacctgcgggtattggatgattcgtagctaagacttcgcgacacccttgaagctgagaaatggaacccttaacattcagggatgtggccatagaattctctccagaagagtggaaatgcctggaccctgcccagcagaatttgtatagagatgtgatgttggagaactacagaaacctggtctccctagctatgtgttctcatttcacccaagactttttgccagtgcaggggatagaagattcattccacaaacttatactgagaagatatgagaaattttcctcgctgatctcttcatgccgtgtaatttcacatggactttcaagaggaaggaacagagccacagagaaaaatgacttgctcacaacagaagagccagtagtaaaacacaggtttgacttgcagtatccagaggaaatgtggagaaacacagttgtacagaagggaagaaaataggttgatactcctgttgcaggaccatttgaagtctgagagtttccaggatatgtcgttattgatccagctcaactttatgtatatgagaaacttggacagtctggacaatagaataaatgaagtcaataaaaccattcttttaacaaacttaataccataccttcagagtgttattttcctttttgtcataaggtgtctggaaatgaagtatggaaatgaaatcatgaataaagacccagttttcagaatctctccacgaagtagaggaactcataccaatccagaagagcctgaagaagatgttcaagctgaaagagtccaagcagcaaatgcactcactactccaaacttggaggaggaaccagtcataactgcaa

SEQ ID NO: 203653 - DNA, 2966 bp, Homo sapiens
  Payload ID: 20157
  Gene Name: zinc finger protein 721
  Uniprot ID: Q8TF20
  ENST ID: ENST00000511833
  CDS Start-End: 195-2966
acagcggggcgtcacctcggacatacgaacagcgggcggtgttcccggctccgtggggccgtcttcccggcgagtccgcgacggtcgccgcccacggcgaggaacccttaacattcagggatgtggccatagaattctctccagaagagtggaaatgcctggaccctgcccagcagaatttgtatagagatgtgatgttggagaactacagaaacctggtctccctagctatgtgttctcatttcacccaagactttttgccagtgcaggggatagaagattcattccacaaacttatactgagaagatatgagaaatgtgggcatgataatttacaattaaggaaaggctgtaaaagtatgaacgtgtgtaaagtgcagaagggagtttataatggaattaataaatgcttgtcaaatactcagagcaaaatatttcaatgtaatgcacgtgtcaaagtttttagtaaatttgcaaattcaaacaaagataagacaagacatactggagagaaacactttaaatgtaacgaatgtggcaagtcatttcagaagttctcagacctaactcaacataaaggaattcatgctggagagaaaccctacacttgtgaagaacgtggcaaagactttggatggtacacagacctgaatcaacacaagaaaattcatactggagagaaaccttacaaatgtgaagaatgtggcaaagcctttaataggtcaacaaaccttactgcacataagagaattcacaacagagagaaagcttacacaggtgaagatcgtgacagagcctttggatggtccacaaacctgaatgaatataagaaaattcatactggagataaaccctacaaatgtaaagaatgtgggaaagcctttatgcattcctcacacctgaataaacatgagaaaattcatactggagagaaaccctacaaatgtaaggaatgtggcaaagtcatttcctcatcctcaagctttgctaaacataagaggattcatactggcgagaaaccctttaaatgtttagaatgtggtaaagcctttaatatttccacaacccttactaaacataggagaattcatactggagagaaaccctacacatgtgaagtatgtggcaaagcctttagacagtccgcaaacctttatgtacataggagaattcatactggagagaaaccctacacatgtggagaatgtggcaaaacctttagacagtccgcaaacctttacgtacataggagaattcatactggagagaaaccttacaaatgcgaagactgtggcaaagcctttggacggtacacagccctgaatcaacacaagaaaattcatactggagagaaaccttacaaatgtgaagagtgtggcaaagcctttaatagttcaacaaaccttactgcacataagagaattcacaccagagagaaaccctacacatgtgaagatcgtggcagagcctttggattgtccacaaacctgaatgaatataagaaaattcatactggagataaaccctacaaatgtaaagaatgtgggaaagcctttatacattccttgcacctgaataaacatgagaaaattcatactggaaagaaaccctacaaatgtaagcaatgtggcaaagtcattacctcatcctcaagctttgctaaacataagaggattcatactggcgagaaaccctttgaatgtttagaatgtggtaaagcgtttactagttccacaacccttactaaacataggagaattcatactggagagaaaccctacacatgtgaagtatgtggcaaagcctttagacagtccgcaatcctttatgtacataggagaattcatactggagagaaaccctacacatgtgaagaatgtggcaaaacctttagacagtccgcaaacctttatgtacataggagaattcatactggagagaaaccttacaaatgtgaagagtgtggcaaagcctttggacggtacacagacctgaatcaacacaagaaaattcatactggagagaaactttacaaatgtgaagagtgtggcaaagactttgtatggtacacggacctgaatcaacagaagaaaatttacactggggagaaaccttacaaatgtgaagagtgtggcaaagcctttgccccatcaacagacctgaatcaacacacgaaaattcttactggagagcaaagttacaaatgtgaagagtgtggcaaagcctttggatggtccatagccctgaatcaacacaagaaaattcatactggagaaaaaccttacaaatgtgaagagtgtggcaaagcctttagtaggtcaagaaaccttactacacataggagagttcacactagggagaaaccctacaaatgtgaagatcgtggcagatcctttggatggtccacaaacctgaacgaatataagaaaattcatactggagataaactctacaaatgtaaagaatgtgggaaagtgtttaaacagtcctcacacctgaatagacatgagaaaattcatactggaaagaaaccctacaaatgtaaggaatgtggcaaagtcattacgtcatcctcaagctttgctaaacataagaggattcatacaggtgagaaaccctttaaatgtttagaatgtggtaaagcgtttactagttccacaacccttactaaacataggagaattcatactggagagaaaccctacacatgtgaagaatgtggcaaagcctttagacagtcagcaatcctttatgtacataggagaattcatactggagagaaaccctacacatgtggagaatgtggcaaaacctttagacagtctgcaaatctttatgcgcataagaaaattcatactggagagaaaccctacacgtgtggagactgtggcaaaacctttagacagtctgcaaatctttatgcacataagaaaattcatactggagataaaaccatacaagtgtaa

SEQ ID NO: 203654 - DNA, 1679 bp, Homo sapiens
  Payload ID: 20157
  Gene Name: zinc finger protein 721
  ENST ID: ENST00000515578
  CDS Start-End: 69-254
tcgctctgtaacctgcgggtattggatgattcgtagctaagacttcgcgacacccttgaagctgagaaatggaacccttaacattcagggatgtggccatagaattctctccagaagagtggaaatgcctggaccctgcccagcagaatttgtatagagatgtgatgttggagaactacagaaacctggtctccctagaggaaggaacagagccacagagaaaaatgacttgctcacaacagaagagccagtagtaaaacacaggtttgacttgcagtatccagaggaaatgtggagaaacacagttgtacagaagggaagaaaataggttgatactcctgttgcaggaccatttgaagtctgagagtttccaggatatgtcgttattgatccagctcaactttatgtatatgagaaacttggacagtctggacaatagaataaatgaagtcaataaaaccattcttttaacaaacttaataccataccttcagagtgttattttcctttttgtcataaggtgtctggaaatgaagtatggaaatgaaatcatgaataaagacccagttttcagaatctctccacgaagtagaggaactcataccaatccagaagagcctgaagaagatgttcaagctgaaagagtccaagcagcaaatgcactcactactccaaacttggaggaggaaccagtcataactgcaagctgtttacacaaggaatattatgagacaaagaaagttgcttttcaacaacaaagaagaaagcagccatcagaaatgtttcgttttgtgttaaaaagtgaagttttgggattactaggacacaatggagctggcaaaagtacttccattaaaatgataactgggtgcacagtgccaactgcaggagtggtggtgttacaaggcaacagagcatcagtaaggcaacagcgtgacaacagcctcaagttcttgggtactgccctcaggagaactcactgtgtcccaaacttacaatgaaagagcatttggagttgtatgcagccgtgaaaggactgggcaaagatgctgctcttagtatttcatgattggtggaagctctcaagctccaggagcaacttaaggctcccgtgaaaactctatcagagggaataaagagaaagctatgcttcgtgctgagcatactggggaacccatcagtggtgcttctagacgagctgttcaccgggatggaccctgaggggcagcagcaaatgtggcagatacttcaggctaccattaaaaaccaggagaggggcgccctcttgaccacccattacatgtcagaggctaagtctctgtgtgaccgtgtggccatcatggtgtcaggaacgctaaggtgtattggttccattcaacagctgaaaagtttggtaaagattatttactagaaataaaaatgaaagaacctactcaggtggaagctctccacacagagattttgaagcttttcccacaggctgcttggcaggaaagatattcctctttaatggcatgtaagttacctgtggaggatgtccaccctctgtctcaggcctttttcaaattaaaggcagtgaaacagaccttcaacctggaggaatacagcctctctcaggctaccttggagcaggtgttcttagaactctgtaaagagcaggcgctgggaaatgttgatga

SEQ ID NO: 203655 - DNA, 2764 bp, Homo sapiens
  Payload ID: 20158
  Gene Name: zinc finger protein 724, pseudogene
  Uniprot ID: A8MTY0
  ENST ID: ENST00000418100
  CDS Start-End: 119-1978
ctcgtcttccctgctttgtgtcccctgctcttagaggcccagcctctgtggccctctgacctgcaagcattgggagatccacagctaagacgccagggcctcccctggaagcctagaaatgggaccattgacatttatggatgtggccatagaattctctgtggaggagtggcaatgcctggacactgcacagcagaatttatataggaacgtgatgttagagaactacagaaacctggtcttcctgggtattgctgtctctaagccagacctgatcacctgtctggagcaaggcaaagagccctggaatatggagagacatgagatggtggccaaacccccaggtatgtgttgttattttgcccaagaccttcggccagagcagagcataaaagcttctttgcaaagaataatactgagaaaatatgaaaaatgtggacatcacaatttacagttaaaaaaaggctataaaagtgtggatgagtacaaggtgcacaaaggaagttataatggatttaaccagtgtttgacaactacccagagcaaaatatttcagtgtgataaatatgtgaaagactttcataaattttcaaattcaaatagacataagactgaaaagaatcctttcaaatgtaaagaatgtggcaagtcattttgtgttctttcacacctaactcaacataaaagaattcacactactgtcaattcctacaaacttgaagaatgtggcaaggcctttaatgtgtcctcaaccctttctcaacataagagaattcatacaggacaaaaacactacaaatgtgaagaatgtggcatagcctttaacaagtcctcacaccttaacacacataagataattcatactggagagaaatcctacaaacgtgaagaatgtggaaaagcttttaacatatcctcacaccttactacacataagataattcatactggagagaatgcctacaaatgtaaagaatgtggcaaagcttttaaccaatcatcaacccttactagacataagataattcatgctggagagaagccctacatatgtgaacattgtggcagagcttttaaccaatcctcgaaccttactaaacataagagaattcatactggtgataaaccttataaatgtgaagaatgtggcaaagcctttaatgtgtcctcaacccttactcaacataagagaattcatactggagagaaaccttacaaatgtgaagagtgtggcaaagcctttaacgtgtcctcaactcttactcaacataagagaattcatactggagaaaaaccatacaaatgtgaagaatgtggcaaagcctttaacacatcctcacacctcaccacacataaaagaattcataccggagagaaaccctacaaatgtgaagaatgtggcaaagcctttaaccagttctcacaacttactacacataagataattcatactggagagaaaccctacaaatgtaaagaatgtggcaaagcttttaagcggtcctcaaaccttactgaacataggataattcatactggagagaaaccctacaaatgtgaagaatgtggcaaagcttttaacctatcctcacaccttacaacacataagaaaattcatactggagagaaaccctacaaatgtaaagaatgtggcaaagcttttaaccaatcctcgacacttgctagacataagataattcatgctggagagaaaccctacaaatgtgaagaatgtggcaaagctttttaccaatactcaaaccttactcaacataagataattcatactggagagaaaccctacaaatgtgaagaatgtggcaaagcctttaattggtcctcaactctgactaaacataaggtaattcatactggagagaaaccctacaaatgtaaagaatgtggcaaagcttttaaccaatgctcaaaccttactacacacaagaaaattcatgctgtagaaaaatctgacaaataagaaaaatggaccaggcgtggtggctcacacctgtaatcccagcactttgggaggccaaggcgggtggatcacaagatcaagagattgagaccatcctggccaacgaagagaattactggagagaaaccgtacaaacctgaaagatataacagtgcagttgacaacacctcaatatttctaaacacctttaaatggttgtcatacttgattgtaggtaaaatatagtagaggaaacctctacaagtgtgaagaatgtggcaaaacttttaaccaatgctgacactttattggacaggaaatgatgtatacttgagaaaaattatgcaaatgtaaagaatgtgaagaagccattaatatctgttcacatcttattcaatatcagagagttcatacttaatagaagcattaaagatgaaattactgtcaatagatttttcagaaaatataagcctttaaagtgaagaagagtatttattttgaagacaagcattaaaatatcaagagtgtaagctgggcatggtggctcaggcctgtaatttcagcactttggaggccaaggcaggtggtttacttgaggtcagaagttcaagaccagcctggccaacatggtgaaactccatctctacccaaaatacaaaaattaggtgggtgtggtagtgcatgactaatcccagctactcggtggttgagacaggagaatcgcttgaacctgggaggcagaggttgcagtgagctgagtttgtgccaccacactccagcctgggcactccagctgcactccatctc

SEQ ID NO: 203656 - DNA, 780 bp, Homo sapiens
  Payload ID: 20158
  Gene Name: zinc finger protein 724, pseudogene
  ENST ID: ENST00000597037
  CDS Start-End: 149-382
ttgtctctcgctgcagctggagcgcttggtctcgtcttccctgctttgtgtcccctgctcttagaggcccagcctctgtggccctctgacctgcaagcattgggagatccacagctaagacgccagggcctcccctggaagcctagaaatgggaccattgacatttatggatgtggccatagaattctctgtggaggagtggcaatgcctggacactgcacagcagaatttatataggaacgtgatgttagagaactacagaaacctggtcttcctgggtattgctgtctctaagccagacctgatcacctgtctggagcaaggcaaagagccctggaatatggagagacatgagatggtggccaaacccccaggtaggtgagagtgaatatgacagatgacacagatgagaggtccaaatgtcaaggagaaagtcagtttttgaaatacgatttggggccaggtgtggtggctcatgcctgtaatcccagcacttggagaggctaaggcgggcagatgacctaaggtcgggtgttcgagaccagcctgaccaacatggagaaaccccgtctttactaaaaatacaaaattagctgggtgtggtggcgcatgcctgtagtcccagctacttgggaggctgaggcaggagaatcgcttgaacctgggaggcagaggttgtggtgagctgagatcgcgccattgcactgcagcctgggcaacaagagcgaaactccgtctcagataaataaataaataaacgaataaaaataagaaatacaa

SEQ ID NO: 203657 - DNA, 583 bp, Homo sapiens
  Payload ID: 20158
  Gene Name: zinc finger protein 724, pseudogene
  ENST ID: ENST00000597537
  CDS Start-End: 287-583
gtctctcgctgcagctggagcgcttggtctcgtcttccctgctttgtgtcccctgctcttagaggcccagcctctgtggccctctgacctgcaagcattgggagatccacagctaagacgccagggcctcccctggaagcctagaaatgacggagtctcgctctgtcacccaggctggagtgcaatggcgtgatcttggctcactgcaacctctgccttctgggttcaagtgattctcctgcctcagcctcccaagtagctgggattacagggaccattgacatttatggatgtggccatagaattctctgtggaggagtggcaatgcctggacactgcacagcagaatttatataggaacgtgatgttagagaactacagaaacctggtcttcctgggtattgctgtctctaagccagacctgatcacctgtctggagcaaggcaaagagccctggaatatggagagacatgagatggtggccaaacccccaggtatgtgttgttattttgcccaagaccttcggccagagcagagcataaaagcttctttgcaaagaataatactgagaaaatatgaaaaa

SEQ ID NO: 203658 - DNA, 2330 bp, Homo sapiens
  Payload ID: 20159
  Gene Name: zinc finger protein 726
  ENST ID: ENST00000322487
  CDS Start-End: 114-2330
ctttgtctctatctgcggccggagctccaggtctcgtcctcactactctgtgtcttctgcttttaggggcgcagcctctgtggccctgtgacctgccccctggaagcctagaaatgggactgttgacatttagggatgtggccatagaattctctctggaggagtggcagtgcctggacactgcacagaagaatttatataggaatgtgatgttagagaactacagaaacctggccttcctgggtattgctgtctctaagccagacctcatcatctgtctggagaaagaaaaagagccctggaatatgaagcgagatgagatggtggatgaacccccaggtatatgtcctcattttgctcaagacatttggccagagcagggcgtggaagattcttttcaaaaagtaatactaagaagatttgaaaaatgtggacatgagaatttacagttaagaaaaggttgtaaaagtgtggatgagtgtaaggtacacaaagaaggttataatggacttaaccagtgtttcacaactacccagggcaaagcttctcaatgtggtaaatatttgaaagtcttttataaatttataaatttaaacagatataagataagacatactagaaagaaacctttcaaatgtaaaaattgtgtcaaatcattttgcatgttttcacacaaaacccagcataaaagcatatatactacagagaagtcctacaaatgtaaagaatgtggaaaaacctttaattggtcctcaacccttactaatcataagaaaactcatactgaagaaaagccctacaaatgtgaagaatatggcaaagcttttaatcaatcctcaaattatactacacataaggtaactcatactggagagaagccttacaagtgtgaagaatgtggcaaagcatttagccaatcctcaacactaaccatacataagaggatacatactggagagaaaccctgcaaatgtgaagaatgtggcaaagcatttagccaaccctcagcactaaccatacataagaggatgcacattggagagaaaccctacaaatgtgaagaatgtggcaaagcatttgtttggtcctcaaccctaactagacataagaggctgcacagtggagagaaaccctacaaatgtgaagaatgtgccaaagcttttagccaattcggacaccttactacacataggataattcatactggagagaaaccctacaaatgtgaagaatgtggcaaagcatttatatggccctcaaccctaactaaacataagaggattcacactggagagaaaccctacaaatgtgaagaatgtggcaaagcttttcatcgatcctcaaatcttactaaacataagataattcatactggagagaaaccttacaagtgtgaagaatgcggcaaagcgtttatatggtcctcaaaccttactgaacataagaaaattcatactagagagaaaccctacaaatgtgaagaatgtagtaaagcatttagccgatcctcagccctaactacacataagaggatgcacactggagagaaaccctacaaatgtgaagaatgtggcaaagcttttagccagtcctcaacccttactgcacataagataattcatactggagagaaaccctacaaatgtgaagaatgtggcaaagcatttatattgtcctcgaccctatctaaacataagaggattcacactggagagaaaccctacaaatgtgaagaatgtggcaaaacttttaatcaatcctcaaatcttagtacacataagataattcatactggagagaaaccttacaagtgtgaagaatgtggaaaagcgtttaatcgatcctcaaatcttagtacgcataagataattcatactggagagaaaccttacaagtgtgacgaatgtggcaaatcatttatctggtcctcaaccctttttaagcataagataattcacactggagagaaaccttacaagtgtgaagaatgtgggaaagcttttaatcattctcaaatcttactacacataagacataagaggatgcacactggagagaaaccttacaaatgtgaggaatgtgggaaatcttttaacctgtcttcaacttttattaaacataaggtaattcatactggagtaaaactctacaaatgtgaagaatgtggcaaagtgtttttctggtcctcagccctaactagacataagaaaattcatgctggacagcaaccctacaaatgggaaaaaattggcaaagcctttaaccagtcctcacatcttactacagataagataactcatattggagagaaatcttacaagtgtgaataa

SEQ ID NO: 203659 - DNA, 847 bp, Homo sapiens
  Payload ID: 20159
  Gene Name: zinc finger protein 726
  ENST ID: ENST00000334589
  CDS Start-End: 119-445
ggggcctttgtctctatctgcggccggagctccaggtctcgtcctcactactctgtgtcttctgcttttaggggcgcagcctctgtggccctgtgacctgccccctggaagcctagaaatgggactgttgacatttagggatgtggccatagaattctctctggaggagtggcagtgcctggacactgcacagaagaatttatataggaatgtgatgttagagaactacagaaacctggccttcctgggtattgctgtctctaagccagacctcatcatctgtctggagaaagaaaaagagccctggaatatgaagcgagatgagatggtggatgaacccccaggccttgctgtctctaaccctgatctgatctcctgccttgagcaaataaaagagccctggaatgtgaagagacatgagacagtagtcaaatactcagggtgaaactgacctcagagtgacttaggaagaatttcatttttgggaagagtttcaagaggattgttattcaaatacatttggtagaatttggctgtgcatttttctagtcctaagcttttctttgtcaagacatttttaattactgactcaatcatgctactcattattggtttgttcaggtactctatttctttctggctctatcttgggaggttgtatgtttccataaatttatttactctaagttttcaggtttgtgagtgtctagttgtttataatcatttctagtgatcttttgtattactgttgtatccattgtaatgtctattctttcatttctgattttgtttatttagatctctcttctgtttgtgatgaatctagctagcaatttatcaattttgt

SEQ ID NO: 203660 - DNA, 1798 bp, Homo sapiens
  Payload ID: 20159
  Gene Name: zinc finger protein 726
  Uniprot ID: A6NNF4
  ENST ID: ENST00000531821
  CDS Start-End: 114-347
ctttgtctctatctgcggccggagctccaggtctcgtcctcactactctgtgtcttctgcttttaggggcgcagcctctgtggccctgtgacctgccccctggaagcctagaaatgggactgttgacatttagggatgtggccatagaattctctctggaggagtggcagtgcctggacactgcacagaagaatttatataggaatgtgatgttagagaactacagaaacctggccttcctgggtattgctgtctctaagccagacctcatcatctgtctggagaaagaaaaagagccctggaatatgaagcgagatgagatggtggatgaacccccaggtaggtgagagtgaatacaacagatgacctggatgagaggtccaacgtcaagaagaaagccagtctttaaagtgatttggaaagctgcattccaaaggaaaccgtttctggaaagcctgaaatttaaaaaaaaatatactctcagataggggcatcttctgcttatgcttataaaatctctaagaattctactctcccttcaatgatcttccttaacgtttacagtgacagccaaagtactgttcatggcatataaaagagtgtacaatctgactttttttttcttgtttttgtggacagatagatatctgcatagttttgagacactctatgttaaaatttttttttgttttagaaggagtttcgcttttgtggcccatgctggagtgcaatggtgcgatctcggctcactgcaacctctgcctcccaggttgaagtgattgtcctgcctcaggctcctgagtagctggggttacaggtgcacaccaccacaactggctaattttttgtatttctcgtagagacggagtttcatcatgttggccaggctggtctcctgacctcaggtgatccacccacctcagactcccaaagtgctgggattacaggtgtgagccaccgtgcctggcctctctttttgcacaagagtagtggtttctgtttcattaggggtttttttttgtttgtttgtttttctgctcatttcatcctgttttttttcttgctttcttttttttttttgtttatttaatatggccgtttttacttcctgcagaaagggtatactcgccagcagttttgccatgagagtacactgagcaaaggagacagggtcatttataacctgatgtgtccactctactgctgtgtccagtttccactggctggaacgggcatcctgttttcattactatagccttgaaatatagtttgggccatgcgtggtggctcacgcctgtaatcccagcattttgggaggccaaggtgggtgaatcacgaggtcacgaatttgagaccagcctggccaacatggtgaaaccccatctatactaaaaataaaaaaattagctgggctcagtggtgggcacctgtaatcccagctactcaggtggctgaggcaggagaattgcttgaacccaggagccagaggttgcaatgagctgagatcatgccactgtactttagcctgggcggcagagcaagactctctctcgatgtatatatatatagtttgaaattataaagtataatgtccttctgctttgttctttttcctcaagattgctttggctattcaaaatttattgtggtttcgtgtacattttaggattgtaattttcattactgtgaaaaactggaattttgacagggagtttattgagtctagagatcaccttagataatatggcagtttcacaatacttattctttcaatagaaataaaatatttttaaattta

SEQ ID NO: 203661 - DNA, 806 bp, Homo sapiens
  Payload ID: 20159
  Gene Name: zinc finger protein 726
  ENST ID: ENST00000525354
  CDS Start-End: 120-389
cggggcctttgtctctatctgcggccggagctccaggtctcgtcctcactactctgtgtcttctgcttttaggggcgcagcctctgtggccctgtgacctgccccctggaagcctagaaatgggactgttgacatttagggatgtggccatagaattctctctggaggagtggcagtgcctggacactgcacagaagaatttatataggaatgtgatgttagagaactacagaaacctggccttcctgggtattgctgtctctaagccagacctcatcatctgtctggagaaagaaaaagagccctggaatatgaagcgagatgagatggtggatgaacccccagatggagtctcgctctgtcacccaggctggagtgcagtggcgtgatcttggctcactgcaacctccgcctcccaggttcaagccattctcctgcctcagcctcctgagtagctgggactataggtgccgacaccgcgcttggctaattttttgtatttttagtagaaacggggtttcaccgtgctctcgatctcctgatctcgtgatctgcccgcctcggcctcccaaagtgctgggattacagatgccagtaatttaaaatgcctgccttccatgaatgcacagttacagtcaaacattgcagttatctagacaaattatttgttaatgtacataaatgttgccaactagttgtaatgagtaaacatttctgttattgtgttgcagttttatattagtgttttttgtagtgtaagtttcctaacatcagtttattgtgcctattggttttttcttatatat

SEQ ID NO: 203662 - DNA, 1522 bp, Homo sapiens
  Payload ID: 20159
  Gene Name: zinc finger protein 726
  ENST ID: ENST00000575986
  CDS Start-End: 77-406
cctcactactctgtgtcttctgcttttaggggcgcagcctctgtggccctgtgacctgccccctggaagcctagaaatgggactgttgacatttagggatgtggccatagaattctctctggaggagtggcagtgcctggacactgcacagaagaatttatataggaatgtgatgttagagaactacagaaacctggccttcctgggtattgctgtctctaagccagacctcatcatctgtctggagaaagaaaaagagccctggaatatgaagcgagatgagatggtggatgaacccccaggccttgctgtctctaaccctgatctgatctcctgccttgagcaaataaaagagccctggaatgtgaagagacatgagacagtagtcaaatactcaggtaggtaagcatgaatgaagccgataacacagatgacaggttcaaaggtcaaaaagaatgccagactttaaaatgtgatatgggatgctctgcttcagtggaaagatttcctaaaaagcctttttttttcctctagctctgaagtaggagcatttttgtcccatacccttaaattatttctaaggactctacttcctatttagtgattttcctttgagggtaccatgagaactaaactcctctttatggcttataaggtactgcatgatatacctgctcttccattgcttcgggggaatataaaaatatctcgagtatttttgaggaactgcatgttagattatttctcaaattttcccatcatgtctgaaatgtatgagagcagtggtgatattaagatttgtttcagaaatctcaggaacatcaatgacagaggttacttatttctctattttctgtttttaatattagcaatcctaactcaagtgatagctcattattgttttcatttgcagttgcctgttgttaggtgatattgaccactttttttatatacctattggtcatgtgtatatatttgctggcaaaatattttttgaatcttttgaccatttttctgttgggtttttattgttatacttgcctttgctttgaatttcctgtatattttgaatattaagcttttcttgtatatatggtttgctattgtgagcatgcaataaacattcaagtataggtatcattttcttataataaactatttttctttgagtagatacccaatgatgagacttttaaatcaaatggtagttctatttatagttgagactgagcatttttgtcatatgtgtgttggctatttgcatgtctttattgaaaaatgtttactaatgttatttgcccatttttcaatgggattctttattattatgatatttttgagttgtttgagttacttgtaaattctgaatgttagtttcattttggcacatagtttgcaaatatgttcatttattctgtaggttgcctatttaccctgttgattattttttttgctgtgccaaagctttttagtcccgtttgtctatttttaataataatataataaataataatacaataat

SEQ ID NO: 203663 - DNA, 2473 bp, Homo sapiens
  Payload ID: 20159
  Gene Name: zinc finger protein 726
  Uniprot ID: A6NNF4
  ENST ID: ENST00000594466
  CDS Start-End: 106-1956
ctatctgcggccggagctccaggtctcgtcctcactactctgtgtcttctgcttttaggggcgcagcctctgtggccctgtgacctgccccctggaagcctagaaatgggactgttgacatttagggatgtggccatagaattctctctggaggagtggcagtgcctggacactgcacagaagaatttatataggaatgtgatgttagagaactacagaaacctggccttcctgggtattgctgtctctaagccagacctcatcatctgtctggagaaagaaaaagagccctggaatatgaagcgagatgagatggtggatgaacccccaggtatatgtcctcattttgctcaagacatttggccagagcagggcgtggaagattcttttcaaaaagtaatactaagaagatttgaaaaatgtggacatgagaatttacagttaagaaaaggttgtaaaagtgtggatgagtgtaaggtacacaaagaaggttataatggacttaaccagtgtttcacaactacccagggcaaagcttctcaatgtggtaaatatttgaaagtcttttataaatttataaatttaaacagatataagataagacatactagaaagaaacctttcaaatgtaaaaattgtgtcaaatcattttgcatgttttcacacaaaacccagcataaaagcatatatactacagagaagtcctacaaatgtaaagaatgtggaaaaacctttaattggtcctcaacccttactaatcataagaaaactcatactgaagaaaagccctacaaatgtgaagaatatggcaaagcttttaatcaatcctcaaattatactacacataaggtaactcatactggagagaagccttacaagtgtgaagaatgtggcaaagcatttagccaatcctcaacactaaccatacataagaggatacatactggagagaaaccctgcaaatgtgaagaatgtggcaaagcatttagccaaccctcagcactaaccatacataagaggatgcacattggagagaaaccctacaaatgtgaagaatgtggcaaagcatttgtttggtcctcaaccctaactagacataagaggctgcacagtggagagaaaccctacaaatgtgaagaatgtgccaaagcttttagccaattcggacaccttactacacataggataattcatactggagagaaaccctacaaatgtgaagaatgtggcaaagcatttatatggccctcaaccctaactaaacataagaggattcacactggagagaaaccctacaaatgtgaagaatgtggcaaagcttttcatcgatcctcaaatcttactaaacataagataattcatactggagagaaaccttacaagtgtgaagaatgcggcaaagcgtttatatggtcctcaaaccttactgaacataagaaaattcatactagagagaaaccctacaaatgtgaagaatgtagtaaagcatttagccgatcctcagccctaactacacataagaggatgcacactggagagaaaccctacaaatgtgaagaatgtggcaaagcttttagccagtcctcaacccttactgcacataagataattcatactggagagaaaccctacaaatgtgaagaatgtggcaaagcatttatattgtcctcgaccctatctaaacataagaggattcacactggagagaaaccctacaaatgtgaagaatgtggcaaaacttttaatcaatcctcaaatcttagtacacataagataattcatactggagagaaaccttacaagtgtgaagaatgtggaaaagcgtttaatcgatcctcaaatcttagtacgcataagataattcatactggagagaaaccttacaagtgtgacgaatgtggcaaatcatttatctggtcctcaaccctttttaagcataagaggattcatacttgagagaaaccttaaaaagggtaaagaatgtggcaaagcatttatatggtcctcaacgctaaacataagaggatgcacactggagagaaaccctacaaatgtgaagaatgtgaaaaagcttttaatcctcaaatcttactaaacattagataattcacactggagagaaaccttacaagtgtgaagaatgtgggaaagcttttaatcattctcaaatcttactacacataagataattcatactggaaataaaccctacaaatgtgaaaaatgtggcaaagcatatggtccacacccctaagtagacataagaggatgcacactggagagaaaccttacaaatgtgaggaatgtggcaaagcctttaaatgttcctcaactgttactgaacataaagtaattcatactgaagagaaaccctacaaatgtgaaaaatgtgtcaaagcctttaagcagtcttcaatcctgagtaaccataagataattcaaactggaaagaaaccctgcaagtctgaagaat

SEQ ID NO: 203664 - DNA, 1679 bp, Homo sapiens
  Payload ID: 20160
  Gene Name: zinc finger protein 727
  Uniprot ID: A8MUV8
  ENST ID: ENST00000456806
  CDS Start-End: 180-1679
aatatggcaaggccttcgtctcctagcttctaggctctgagtccagtacccgtctgtactattccatctcttccgctccattagctcctcggtgactccaccatagcccctgttatcctgtgacctgcaggtactgggagatccatagggaagaaggcggaacatccggaggctgggaaatgcgagtgctaacattcagggatgtggctgtagaattctccccagaagagtgggaatgcctggactctgctcagcagcgtttgtatagggatgtgatgttagagaactacggaaacctgttctccttgggtcttgctatctttaagccagacttgattacctatctggagcaaagaaaagagccttggaatgcgaggagacagaagacagtagccaaacacccagctggctctttgcattttactgcagagatattgctggagcacgacataaacgattcatttcaaaaagtgatcctgagaaaatctggaagctgtgaccttaatactttacgtttaaagaaagactaccaacgtgtgggtaattgcaaggggcagaaaagcagttataatggcattcatcaatgtttgtcagctacccgtagcaaaacctgtcaatataataaatgtggcaaagcttttgggttgtgctcaatcttcactgaacataagaaaatttttagcagagagaaatgctacaaatgtgaagaatgtggcaaagactgtaggttgtcagattttaccatacagaagagaattcatactgcagatagaagttacaaatgtgaagaatgtggcaaagcctgtaaaaagttctcaaaccttactgaacataatagagttcatactggaaagaaaccctacaaatgtgaagaatgtggcaaaacatttacctgttcctcagcccttactaaacacaagagaaatcatactggagacagaccctacaaatgcgaagaatgtcacaaagcctttaggtgttgctcagaccttactaaacataagagaattcatactggagagaaaccctacaaatgtaaagaatgtcacaaagcctttaggtgttgctcagaccttactaaacataagagaattcatactggagagaaaccctacaaatgtaatgaatgtggaaaagcttttatgtggatctcggcccttagtcaacataacagaattcatactggagagaaaccctacatttgtgaagaatgtggcaaagcctttacctactcctcaacccttattagccacaagagaattcatatggaattgagaccttacaaatgtgaagaatgtggcaaaacctttaagtggttctcagacctgactaatcataagagaattcacactggagagaaaccctacaaatgtgaagaatgtggcaaaagctttacctgctcctcaaaccttattaaacacaagagaattcatatggaagtgagaccttacaaatgtgaagaatgtggcaaaacctttaagtggttcccagacctgactaatcataagagaattcacactggagagaagccctacaaatgtgaagaatgtggcaaaacctttacctgctcctcaagccttattaaacacaagagaagtcatactggagacagacctacaagtgcaaagaatgtggcaaagcctttaggtggttctcagaccttactaaacataaggtaa

SEQ ID NO: 203665 - DNA, 714 bp, Homo sapiens
  Payload ID: 20161
  Gene Name: zinc finger protein 728
  ENST ID: ENST00000599851
  CDS Start-End: 1-230
tggagcaaggaaaagagccctggaatatgaagagacatgagctggtgaaagaaccgccaggcagaactggccatgaactgtggcttaggaagctggaactgagtcttggaactgctattgggaccaaggtctgcaggcctgccagcattgctctaaatgggtatcactctccaggcctctggaagacccaagacctctcacagactgtggctgggaggagtttgggatgattacagattatatgttctcattttgctcaagacctttggccagagcagggcagagaagattctttccaaaaagtgatattgagaagatatgaaaaatgtggacatgagaatttacagttaaaaattggttgtaccaatgtggatgagtgtaaggtgcacaaaaaaggttataataagcttaaccagagtttgacaactacacaaagcaaagtatttcaatgtggcaaatatgcaaacatctttcataaatgttcaaattcaaaaagacataagataaggcatactggaaagaaacttttgaaatgtaaagaatatgtcagatcattttgcatgctttcacacctatctcaacataaaagaatttatactagagagaattcctacaaaagtgaagaacatggcaaagcctttaactggtcctcagcccttacttataagagaattcatactggagagaaaccctgcaaatgtgaagaatgtggca

SEQ ID NO: 203666 - DNA, 2015 bp, Homo sapiens
  Payload ID: 20161
  Gene Name: zinc finger protein 728
  Uniprot ID: P0DKX0
  ENST ID: ENST00000594710
  CDS Start-End: 147-2015
gttggctctcgctgcacgcggaggtcaaggtgtcgtccttactgctgtgtgtcgtccgctcctaaaggcccagcttctatggccctgtgacctgcaggtattgggagattcacaactaagtcgccaggacccccggaagcctagaaatgggatcgttgacatttcgggatgtggccatacaattctctctggaggagtggcaatgcctggacactgcacagcagaatttatataggaatgtgatgttagagaactacagaaacctggtcttcctgggtattgctgcccctaagccagacctgatcatttttctggagcaaggaaaagagccctggaatatgaagagacatgagctggtgaaagaaccgccagttatatgttctcattttgctcaagacctttggccagagcagggcagagaagattctttccaaaaagtgatattgagaagatatgaaaaatgtggacatgagaatttacagttaaaaattggttgtaccaatgtggatgagtgtaaggtgcacaaaaaaggttataataagcttaaccagagtttgacaactacacaaagcaaagtatttcaatgtggcaaatatgcaaacatctttcataaatgttcaaattcaaaaagacataagataaggcatactggaaagaaacttttgaaatgtaaagaatatgtcagatcattttgcatgctttcacacctatctcaacataaaagaatttatactagagagaattcctacaaaagtgaagaacatggcaaagcctttaactggtcctcagcccttacttataagagaattcatactggagagaaaccctgcaaatgtgaagaatgtggcaaagcctttagtaagttctcaatccttactaagcataaggtaattcatactggagagaaacattacaaatgtgaagaatgtggcaaagccttcacccggtcctcaagccttattgaacataagagaagtcatgctggagagaaaccctacaaatgtgaagaatgtggcaaagcctttagtaaggcctcaacccttactgcacataagacaattcatgctggagagaaaccctacaaatgtgaagaatgtggcaaagctttcaaccggtcctcaaaccttatggaacataagagaattcatactggagagaagccctgcaaatgtgaagaatgtggcaaagcctttggtaacttctcaacccttactaaacataaggtaattcatactggagagaaaccctacaaatgtgaagaatgtggcaaagccttcagctggccctcaagccttactgaacacaagagaattcatgctggagacaaaccttacaaatgtgaagaatgtggcaaaacctttaagtggtcctcaacacttactaaacataagataattcatactggagagaaaccctacaaatgtgaagaatgtggcaaagcctttactacattttcgagccttactaaacataaagtaattcatactggagagaaacactacaaatgtgaagaatgtggcaaagtcttcagctggtcctcaagccttactacacataaggcaattcatgctggagagaaactctacaaatgtgaagaatgtggcaaagcctttaagtggtcctcaaaccttatggaacataagagaattcatactggagagaaaccctacaaatgtgaagaatgtggcaaagccttcagtaaggttgcaaaccttactaaacataaggtaattcatactggagagaaacaatacaaatgtgaagaatgtggcaaagccttcatctggtcctcaagacttagtgaacataagagaattcatactggagagaaaccctacaaatgtgaagaatgtggcaaagcctttagctgggtctcagtccttaacaaacataagaaaattcatgctggaaagaaattctacaaatgtgaagaatgtggtaaagacttcaaccaatcctcacaccttactactcataagagaattcatactggaggaaaaaccctacaaatgtga

SEQ ID NO: 203667 - DNA, 3877 bp, Homo sapiens
  Payload ID: 20162
  Gene Name: zinc finger protein 729
  Uniprot ID: A6NN14
  ENST ID: ENST00000601693
  CDS Start-End: 119-3877
gatgtggcggggccgttgtttctggttgcagccgcagttcccggtctcgccttcactgctgtgtgtcctcagcctctgtggccctgtaacctgcggcattggaagatccacagctaacatgccaggtgcccctggcagcctagaaatgggaccattgacatttagagatgtgaccatagaattctctctggaggagtggcaatgcctggacacggttcagcagaatttatatagggatgtgatgttagagaactacagaaacctggtcttcctgggtatggctgtctttaagccagacttgataacttgtctgaagcaagggaaagagccttggaatatgaagagacatgagatggtaactaaacccccagttatgcgttctcattttacacaagacctttggccagatcagagcacaaaagattctttccaagaagtaatactgagaacatatgcaagatgtggacataagaatttacgattaagaaaagattgtaaaagtgccaatgagggtaagatgcacaaagaaggttataataaacttaaccaatgcaggacagctacccagagaaaaatatttcagtgtaacaaacatatgaaagtctttcataaatattcaaatagaaataaggttagacacactaaaaagaaaactttcaaatgtataaaatgtagcaaatcatttttcatgctttcatgcttaattcgacataagagaattcatattagacagaatatctacaaatgtgaagaacgtggcaaagcctttaaatcgttctcaacccttactaaacataagataattcatactgaagacaaaccttacaaatataagaaatgtggcaatgcctttaaattttcttcaacgttcactaaacataagagaattcatactggagagacacctttcagatgtgaagaatgtggcaaagcttttaaccagtcctcaaatcttactgaccataagagaattcatactggagagaaaacctacaaatgtgaagaatgtggcaaagcttttaaggggtcctcaaattttaatgcacataaggtaattcatactgcagagaaaccctacaaatgtgaagattgtggcaaaacttttaaccatttctcagcccttagaaaacataagataattcatactggaaagaaaccctacaagcgtgaagaatgtggcaaagcttttagccagtcctcaacccttagaaaacatgagataattcatactggagagaaaccctacaaatgtgaagaatgtggtaaagcttttaagtggtcttcaaaacttactgtacataaggtagttcatactggagagaaaccctacaaatgtgaagaatgtggcaaagcttttagccagttctcaacccttaaaaaacataagataattcatactggaaagaaaccctacaaatgtgaagaatgtggcaaagcttttaacagttcctcaacccttatgaaacataagataattcatactggggagaaaccatacaaatgtgaagaatgtggcaaagcttttaggcaatcctcacaccttactagacataaagcaattcatactggagagaaaccctacaaatgtgaagaatgtggcaaagcttttaaccatttctcagaccttagaagacataagataattcatactggaaagaaaccctacaaatgtgaagaatgtgggaaagcttttagccagtcctcaacccttagaaaccatcagataattcatactggagagaaaccctacaaatgtgaagaatgtggtaaagcttttaagtggtcatcaaaacttactgtacataaggtaattcatactggagagaaaccctgcaaatgtgaagaatgtggcaaagcttttaagcatttctcagccctcagaaaacataaggtaattcatactagggagaaattgtacaaatgtgaagaatgtggcaaagcttttaacaattcctcaatccttgctaaacataagataattcatactgggaagaaaccgtacaaatgtgaagaatgtggcaaagcttttaggcaatcctcacaccttactagacataaagcaattcatactggagagaaaccttacaaatgtgaagaatgtggcaaagcttttagccatttctcagcccttagaagacataagataattcatactggaaagaaaccgtacaaatgtgaagaatgtggcaaagcttttagccatttctcagcccttagaagacataagataattcatactggagagaaaccctacaaatgtgaagaatgtggtaaagcttttaagtggtcatcaaaacttactgtacataaggtaattcatactgcagagaaaccctgcaaatgtgaagaatgtggcaaatcttttaagcatttctcagcccttagaaaacataaggtaattcatactagggagaaattgtacaaatgtgaagaatgtgtcaaagcttttaacagtttctcagcccttatgaaacataaggtaattcatactggagagaaaccctacaagtgtgaagaatgtggtaaagcttttaagtggtcctcaaagcttactgtacataaggtaattcatactggagagaaaccctgcaaatgtgaagaatgtggcaaagcttttaagcatttctcagcccttagaaaacataaggtaattcatactggaaagaaaccctacaaatgtgaagaatgtggcaaagcttttagccaatcctcatcccttagaaaacatgagataattcatagtggagagaaaccatacaaatgtgaagaatgtggtaaagcttttaagtggttgtcaaaacttactgtacataaggtaattcatactgcagagaaaccctgtaaatgtgaagaatgtggcaaagcttttaagcatttctcagcccttagaaaacataagataattcatactggaaagaaaccctacaaatgtgaagaatgtggcaaagcttttaatgattcctcaacccttatgaagcataagataattcatactgggaagaaaccatacaaatgtgcagaatgtggcaaagcttttaagcaatcctcacatcttactagacataaagcaattcatactggggagaaaccctacaaatgcgaagaatgtggcaaagattttaacaattcctcaacccttaagaaacataagctaattcatactagggagaaattgtacaaatgtgaagaatgtgtcaaagcttttaacaatttctcagcccttatgaaacataagataattcatactggggagaaaccctacaaatgtgaagaatgtggtaaagcttttaagtggtcctcaaaacttactgaacataaggtaattcatactggagagaaaccctgcaaatgtgaagaatgtgacaaagcttttaagcatttctcagcccttagaaaacataaggtaattcatactggaaagaaaccctaccaatgtgacgaatgtggcaaagcttttaacaattcctcaacccttacgaaacataagataattcatactggggagaaaccctacaaatgtgaagaatgtggcaaagcctttagtcagtcctcaatccttactaaacataagataattcattctgtagagaaaccctacaaatgtgaagaatgtggcaaagcctttaaccagtcctcacaccttactagacacaaaacaattcatactggagagaaaccctacaaatgtgaagaatgtggcaaagcttttattcagtgctcataccttattagacataaaacaattcataccagagagaaacctacaaatgtgaagaaagtaccaaagcttttaagcaatcctcacaccttactagacaaaacaattcatactggagagaaaccctacaaatgtgaagaatgtgccaaagctttttaa

SEQ ID NO: 203668 - DNA, 148 bp, Homo sapiens
  Payload ID: 20162
  Gene Name: zinc finger protein 729
  ENST ID: ENST00000624059
  CDS Start-End: 119-148
gatgtggcggggccgttgtttctggttgcagccgcagttcccggtctcgccttcactgctgtgtgtcctcagcctctgtggccctgtaacctgcggcattggaagatccacagctaacatgccaggtgcccctggcagcctagaaatg

SEQ ID NO: 203669 - DNA, 792 bp, Homo sapiens
  Payload ID: 20163
  Gene Name: zinc finger protein 730
  ENST ID: ENST00000599195
  CDS Start-End: 1-241
cagaaacctggtcttcctgggtattgctgtctcaaagccagacctgatcacctgtctggagcaagaaaaagagccttggaatttgaagacacatgatatggtagccaaacccccaggaactgctttcagcatcttttatatgtttgtgaagttttataagtatatgcagtgccaatatactttttcagaatttggctattttggaacatcattttttcatttttcaggacagatttgctgatggtgttactctcacttgaaagctattttttttcccaggactttgactgcatcacacagtttctttccggcctacaaaatttttgttgacaattcactggttatatcgtaagactatgtttgtatatgacacatcacttttatcttgtagctcccaagatgctctgtgacttttgaaattgtgcttatatatgtatttgttataaatattttgtatgtattctagtttgtttgttaagcttcttcatgtttacattatttttcttactgagggatttttcaggtattatttcttcttgtattttttacccccataatttctattttttaattttttcaatatttttgttcttatcttcatttctgattttctgtagtctgtgttcctgtttcactcattgaatattcaattttttatcaatttttaaaattaatgtgtacatcttttctatggtttccttctgaaaattttataatatttttgatggaattatattgccctgttttgtatatattgtaatctttaattgagatttggacattaaaaaaatc

SEQ ID NO: 203670 - DNA, 464 bp, Homo sapiens
  Payload ID: 20163
  Gene Name: zinc finger protein 730
  ENST ID: ENST00000593635
  CDS Start-End: 272-409
ggtctttgtctctcgctcccgccagagcttgggatcggtcttcactgttccgcgtcctctacctgggaaccaccgacccccgcccggcgactttgtcacagactctgttgccctgtgatctgcaggtcctgggagacgcacagccaagatgccagggcaccctggaagctgtgaagtgggagcgttgacatttagagatgtggccatagaattctctctggaggagtggcaatgtctggacaccgaacaacagaatttatatagaaatgtaatgttagataactacagaaacctggtcttcctgggtattgctgtctcaaagccagacctgatcacctgtctggagcaagaaaaagagccttggaatttgaagacacatgatatggtagccaaacccccaggtaggtgacagtaaatacaatacacaaaactgataagagatctatagtttaaaaaaagaaaaa

SEQ ID NO: 203671 - DNA, 2374 bp, Homo sapiens
  Payload ID: 20163
  Gene Name: zinc finger protein 730
  Uniprot ID: Q6ZMV8
  ENST ID: ENST00000597761
  CDS Start-End: 200-1711
aatcaggcccgcagctggagcagacagggcggcttccgggatttggcgcggcctttgtttctcgctgccgccgaagctccaattttcgtctgtctgctttgtgtcctctgcacgtagaagcccagcctgtgtggccctgcgacctgcgggtattgggagatccacagctaagacgccagggccccctggaagcctagaaatgggagcgttgacatttagagatgtggccatagaattctctctggaggagtggcaatgtctggacaccgaacaacagaatttatatagaaatgtaatgttagataactacagaaacctggtcttcctgggtattgctgtctcaaagccagacctgatcacctgtctggagcaagaaaaagagccttggaatttgaagacacatgatatggtagccaaacccccagttatatgttctcatattgcccaagacctttggccagagcaaggcataaaagattatttccaagaagtcatactgagacaatataaaaaatgtagacatgagaatttactgttaagaaaaggctgtaaaaatgtggatgagtttaagatgcacaaaaaaggttataatagacataaccagtgtttgacaacttcccatagcaaaatatttcagtgtgacaaatatgtgaaagtctttcataaattttcaaattcaaacagacataagataagacatacttcgaagaaacctttcaaatgtaaagaatgtggaaaattattttgcattctttcacacttagctcaacataaaaaaattcatactggagagaaatcctacaaatgtgaagaatatggcaaagcctttaatgagtcctcaaactgtactacacataaaagaattactgagaaaaaaccttacaaatgtaaagaatgtggcaaagcctttaactggttttcacattttactacacataagagaattcatactggagaaaaaccctaccaatgtgagaaatgtggcaaattttttaaccaatccacaaaccttactacacataaaagaattcatactggagagaaaccctataaatgtgaagaatgtggcaaagcctttaaccagtcctcaaaccttactgaacataagaaaattcatactaaagagcaaccatacaaatgcgaaaaatgtggcaaagcttttaagtggtcctcaacccttacaaaacataaaagaattcataatggagaaaaaccctacaaatgtgaagaatgtggcaaagcttttaaccgatcctcaacccttaatagacataagataactcatactggagggaaaccctacaaatataaagaatgtggtaaagcttttaaccaatcctcaactcttactatacataagataattcatactgtagagaaattttacaaatgtgaagaatgtggcaaagcctttagccgtatctcacaccttactacacataagagaattcatactggagagaaaccctacaaatgtgaagaatgtggcagagctttcaaccagtcctcaacccttactacacataaaagaattcatactggagagaaaccctatgaatgtgaagaatgtggcaaagcttttaaccggtcctcaaccctcactacacataagataattcattctggggaaaaaatctacaaatgtaaagaatgtggtaaagcctttaggcggttctcacaccttactaggcataagacaattcatacataaaattgtaaagactgtggcaaagcttttaaacaatctttataccttactacacataagataattcatactgaagagaaaccctacaaatgtgaagaatgtggcaaagcttttaaccagtcctcaaatcttactaaacataaggtaattcatactggagaaaaacctacaaatgtgaagaatgtggcaaagtcttcaaccaatcttcacaccttactacacataagataattcatactggagagaaaccctacaagtgtgaagaatgtgacaaagcctttaacaaatccttaattcttaacagacatgattcataccagagagaaactctacaaacctgaaagttttaacagtgcttttgacaacacctcaaacttttccagatgtcaaagaaatgctggtgagaaattctagaaatatgaagaatgtgacaaagccattaaattgttgtcacatttaattgtaggtaaggtgattcatactggagaaaacttctacaagtgtaaacaaagtggcaaaacttttaaccaatgctcacactttattgcacaggacatttatacttgagaataaatatacaagtgtaaagaaagtgaaaaccctattaatatctgctcacatcaactcaacatcagagttcatacttaataaaatcattaaaagtgc

SEQ ID NO: 203672 - DNA, 2193 bp, Homo sapiens
  Payload ID: 20164
  Gene Name: zinc finger protein 732
  Uniprot ID: B4DXR9
  ENST ID: ENST00000419098
  CDS Start-End: 12-1769
gaagtggggaaatggaactcttaacattcagggatgtggccatagaattctctccagaagagtggaaatgcctggaccctgcccagcagaatttgtatagagatgtgatgttggagaactacaggaacctgatctccctgggtgttgctatctctaacccagacctggtcatctatctggagcaaagaaaggagccctacaaagtgaagatacatgagacagtagccaaacacccagctgtgtgttctcatttcacccaagactttttgccagtgcaggggatagaagattcgttccacaaacttatattaagaagatatgagaaatgtggacatgagaatttagaattaagaaaaagctgtaaaaggaaggtgcagaaaggaggttataatgaatttaatcaatgcttgtcaactatccagagcaaaatatttcagtgtaatgtacatgtcaaagtatttagtacattttcaaattcaaaccaacgtaggataagacatactggagagaaacactttaaagaatgtggcaagtcatttcagaagttctcagacctaactcaacatcaaggaattcatgctggagagaaaccctacacatgtgaagaatgtggcaaagactttaaatggtatttaatctttaatgaatatgagataattcatactggagagaaacccttcacatgtgaagaatgtggcaacatctttaccacatcctcaaactttgctaaacataaagttcatactggagagaaatcttacaaatatgaagaatgtggcaaagcctttaataggtcctcaacccttactaagcataagagaattcatgctgaagagaaacccttcacatgtgaagaatgtggcaaaatcattacctcatcctcaaatgttgccaaacataagaaaattcataccggagagaaactctacaaatgtcaggaatgtggcaaagtctttaataggtccacaacccttactaaacataacagaattcatactggagagaaaccctacacatgtgaagaatgtggcaaagcctttagtaggtcctcagttctgaatgaacataagagaattcatactggagagaagccctacaaatgtgaacaatgtggcaaagcctttagacaatccgcaacccttaataaacataagagtattcatactggagagaaaccctacacatgtgaagaatgtggaaaagcctttagtcggttcacaacccttaatgaacataagagaattcatactggagagaggccccacaaatgtgaagagtgtggcaaagcctttggatggtccacagacctgaataaacataagataattcatactggagagaaaccttacaaatgtgaagagtgtggcaaagcctttggatggtctgcatacctgagtaaacataagaaaattcatactggagagaaaccttatagatgtgaagagtgtggcaaagcctttttatgttccagagccctgaataaacataagacaattcatactggagagaaaccttacgaatgtgaagagtgtggcaaagcctttggatggtccacatacctgagtaaacataagaaaattcatactggagagaaaccttatagatgtgaagagtgtggcaaagcatttagacgttccagagtcctgaataaatataagacaattcatactggagataaaacccccaaatgtaaaggatgtggcaaagcctttaagtggtcctcataccttaatcaacataataaaatttatactggagagaaactctagaaatatgaagaatgtggcaaagcctttggatgatccacaaacctgaatgaacataagaaaatttatactggaaataaactatacaaatgtgaagaatgtggcaaagcttttggatggtccacaaccctgaatgaaagtaagaattcatactggagaaaaaccctacaaatgtaaagaatgtgggaaagccttcaaacagtccgcatacctgaatcaacataagaaaattgatgctggagagcaaccctacaaatgtgaagaatgtggcaaagcttttagatggtccacaaccctgagtgaacataagaaaattcatatgggagatgaatcctacaaatgtaaagaatgtgggaaagcctataaacggtcctcacccataaataaacatgagaaaattcataatggagagaacacctacaaatgt

SEQ ID NO: 203673 - DNA, 2179 bp, Homo sapiens
  Payload ID: 20164
  Gene Name: zinc finger protein 732
  ENST ID: ENST00000619749
  CDS Start-End: 1-1755
gaactcttaacattcagggatgtggccatagaattctctccagaagagtggaaatgcctggaccctgcccagcagaatttgtatagagatgtgatgttggagaactacaggaacctgatctccctgggtgttgctatctctaacccagacctggtcatctatctggagcaaagaaaggagccctacaaagtgaagatacatgagacagtagccaaacacccagctgtgtgttctcatttcacccaagactttttgccagtgcaggggatagaagattcgttccacaaacttatattaagaagatatgagaaatgtggacatgagaatttagaattaagaaaaagctgtaaaaggaaggtgcagaaaggaggttataatgaatttaatcaatgcttgtcaactatccagagcaaaatatttcagtgtaatgtacatgtcaaagtatttagtacattttcaaattcaaaccaacgtaggataagacatactggagagaaacactttaaagaatgtggcaagtcatttcagaagttctcagacctaactcaacatcaaggaattcatgctggagagaaaccctacacatgtgaagaatgtggcaaagactttaaatggtatttaatctttaatgaatatgagataattcatactggagagaaacccttcacatgtgaagaatgtggcaacatctttaccacatcctcaaactttgctaaacataaagttcatactggagagaaatcttacaaatatgaagaatgtggcaaagcctttaataggtcctcaacccttactaagcataagagaattcatgctgaagagaaacccttcacatgtgaagaatgtggcaaaatcattacctcatcctcaaatgttgccaaacataagaaaattcataccggagagaaactctacaaatgtcaggaatgtggcaaagtctttaataggtccacaacccttactaaacataacagaattcatactggagagaaaccctacacatgtgaagaatgtggcaaagcctttagtaggtcctcagttctgaatgaacataagagaattcatactggagagaagccctacaaatgtgaacaatgtggcaaagcctttagacaatccgcaacccttaataaacataagagtattcatactggagagaaaccctacacatgtgaagaatgtggaaaagcctttagtcggttcacaacccttaatgaacataagagaattcatactggagagaggccccacaaatgtgaagagtgtggcaaagcctttggatggtccacagacctgaataaacataagataattcatactggagagaaaccttacaaatgtgaagagtgtggcaaagcctttggatggtctgcatacctgagtaaacataagaaaattcatactggagagaaaccttatagatgtgaagagtgtggcaaagcctttttatgttccagagccctgaataaacataagacaattcatactggagagaaaccttacgaatgtgaagagtgtggcaaagcctttggatggtccacatacctgagtaaacataagaaaattcatactggagagaaaccttatagatgtgaagagtgtggcaaagcatttagacgttccagagtcctgaataaatataagacaattcatactggagataaaacccccaaatgtaaaggatgtggcaaagcctttaagtggtcctcataccttaatcaacataataaaatttatactggagagaaactctagaaatatgaagaatgtggcaaagcctttggatgatccacaaacctgaatgaacataagaaaatttatactggaaataaactatacaaatgtgaagaatgtggcaaagcttttggatggtccacaaccctgaatgaaagtaagaattcatactggagaaaaaccctacaaatgtaaagaatgtgggaaagccttcaaacagtccgcatacctgaatcaacataagaaaattgatgctggagagcaaccctacaaatgtgaagaatgtggcaaagcttttagatggtccacaaccctgagtgaacataagaaaattcatatgggagatgaatcctacaaatgtaaagaatgtgggaaagcctataaacggtcctcacccataaataaacatgagaaaattcataatggagagaacacctacaaatgt

SEQ ID NO: 203674 - DNA, 1570 bp, Homo sapiens
  Payload ID: 20165
  Gene Name: zinc finger protein 735
  Uniprot ID: P0CB33
  ENST ID: ENST00000429565
  CDS Start-End: 114-1352
cttttgtgtttctctgcgtccagagctccagttcttctcttcactgctctgcgtcctctgctcttagaggtcaagccactgtggccttgtgtcctgcaggtatccgcagatttatggctaaaagaccgggaccccctggaagccgagaaatgggactgttgacattcagagacatagctatagaattctctctggcggagtggcaatgcctggatcatgctcagcagaatttatatagagatgtgatgttagagaactacagaaacctgttctccctgggtatgactgtctctaagccagacttgatcgcctgtctggagcaaaataaagagccccagaatataaagagaaatgagatggcagccaaacacccagttacatgttctcatttcaaccaagaccttcagccagagcagagcataaaagattcactccaaaaagtaataccaagaacatatggaaaatgtggacatgagaatttacaattaaaaaaatgttgtaaaagagtagatgagtgtgaggtgcacaaaggaggttataatgaccttaaccaatgtttgtcaaatacccaaaacaaaatatttcagactcataaatgtgtcaaagtcttcagtaaattttcaaattccaatagacacaatgcaagatatactggaaagaaacatttgaaatgtaaaaaatatggcaaatcattttgcatgttttcacacctaaatcaacatcagataattcatactaaggagaagtcctacaaatgtgaagaatgtggcaaatcctttaaccactcctcaagcggtactacacataaaagaattcttactggagagaaaccctacagatgtgaggaatgtggcaaagcctttaggtggccctcaaaccttactagacataagagaattcacactggagagaaaccctacgcatgtgaagaatgtggccaagcctttaggcgctcctcaacacttactaaccacaagagaattcatactggagagagaccctacaaatgtgaagaatgtggcaaagcctttagcgtatcctcagccctcatttaccacaagagaattcatactggagagaaaccctacacatgtgaagaatgtggcaaagcctttaactgctcctcgactcttaagacacataagataattcatactggagagaaaccctacacatgtgaagaatgtggcagaacctttaactgctcctcaactgtaaaggcacataagagaattcatactggagagaaaccatacaaatgtgaagaatgtgacaaagcttttaagtggcattcaagtcttgctaaacataagataattcacactggagagaaaccctacaaatgtaaataatgtggcaaagtccagccctcagaccttataatacataaaataatttatactggaaagaaagcattacaagtgtagagaatgtggccaagcctttatctagttccataccttaattgtacataagagaattcatattggacaaaaatcttataaatgtaaaaaaatgtaacaaagcctttaaccaaccctcaaagcataatgaacctaagagaatttat

SEQ ID NO: 203675 - DNA, 2098 bp, Homo sapiens
  Payload ID: 20166
  Gene Name: zinc finger protein 736
  Uniprot ID: B4DX44
  ENST ID: ENST00000355095
  CDS Start-End: 323-1606
ggtggccaacttgggtgtcttcctctgccagggtcaaggacaaggattgaaacgggtggggcctggagccctagccaatcagtggcgccagcgtgaaactgtccaatcaagtgcgcagctacagaggaagaggcggcctcttcaatatggcggggcctttgtctcctagcttccgggctctgatcctagttcgcgtctccactgttccatctcctccgttcctggagttcctcggtgactctactatagcttctgttatcctgtgacctgcaggtactgggagatccatagggaggacggcggaacatctggaggctgggaaatgggagtgttgacattcagggatgtggctgtagaattctccccagaagagtgggaatgcctggactctgctcagcagcgtttgtatagggatgtgatgttagagaactatggaaacctggtctccttgggtcttgctatctttaagccagacttgatgacctgtctggagcaaagaaaagagccttggaaagtgaagagacaggaggcagtagccaaacacccagctggttcttttcattttactgcagagatattgccggatcatgacataaaagattcatttcaaaaagtgattctgagaaaatatggaagctgtgaccttaataatttacatttaaagaaagactaccaaagtgtgggtaattgcaaggggcagaaaagcagttataatggccttcatcaatgtttgtcagctacccatagcaaaacctgtcaatgtaataaatgtggcagaggttttcagttgtgctcaatcttcactgaacataaagacatttttagcagagagaaatgccacaaatgtgaagaatgtggcaaagactgtaggttgttctcagattttactagacataagaaaattcatactgtagagagatgctacaaatgtgaagaatgtggcaaagcgtttaaaaagttttcaaaccttactgaacataagagagttcatactggagagaaaccttacaaatgtgaaggatgtggcaaaacttttacctgctcctcaacccttgttaaacacaagagaaatcatactggagacagaccctacaaatgtgaagaatgtggcaaagcctttaagtgcttctcagaccttactaatcataagagaattcatactggagagaaaccctacaaatgtgaagaatgtaacaaagcctataggtggttctcagaccttgctaaacataagataattcatactggagacaaaccctacacatgtaatgaatgtggaaaagcttttaagtggttctcggcccttagtaaacataagagaattcatactggagagaaaccctacatctgtgaagaatgtggcaaagcctttacccgctcctcaaccctttttaaccacaagagaattcatatggaagagagaccttacaaatgtgaagaatgcagcaaaacctttaagtgcttctcagacctgactaatcataagagaattcacactggagagaaaccctacaaatgtgaagaatgtggcaaagcatcgagctggttctcacacctcatcagacataagagaattcatactagagagaagctccacaagtgttaaaaatgtggaaaagcctttaccaagtcctcatactgtgttcaacatctgaaatttaatactgaacaaatgcagtataaatgtaatgacagtggaagaacatttatcatcttagagggtctctaagaacttactttataatctggttgcttatatgttgggtacatatatagccctttgctattatgtaatgccctttttttttaaatctatgttaatttcaagtctgttttgtcagaaactaggattgcaacccctgcttcttttcctgttttctatttgcttggtaggcttttctttttccctttattttgagcttatttgagatgggtgtcttgattaaagcataccattagatcttgattcttttttcagcttgccatctgtgctttaatttgggtatttagcccatttacatttaaggttagtattcatatgtgtggattggattctgttattaggatcttagctggctattttgcacatttgtttctg

SEQ ID NO: 203676 - DNA, 562 bp, Homo sapiens
  Payload ID: 20166
  Gene Name: zinc finger protein 736
  ENST ID: ENST00000438373
  CDS Start-End: 533-562
gtgcctgcccagctggagtgctgggcccccggggtcaccatgcagcagggcctgacactgaccagggagccatggccacaggctcttggcagctggcccaaaataaatattctccataacctctgccgatctgctggaccctcacctctcagtctcactgagccactccgttaactggaggcagacccaaaattgctccacaggctgaagggtggccaacttgggtgtcttcctctgccagggtcaaggacaaggattgaaacgggtggggcctggagccctagccaatcagtggcgccagcgtgaaactgtccaatcaagtgcgcagctacagaggaagaggcggcctcttcaatatggcggggcctttgtctcctagcttccgggctctgatcctagttcgcgtctccactgttccatctcctccgttcctggagttcctcggtgactctactatagcttctgttatcctgtgacctgcaggtactgggagatccatagggaggacggcggaacatctggaggctgggaaatgggagtgttgacattcagggatgtggct

SEQ ID NO: 203677 - DNA, 7119 bp, Homo sapiens
  Payload ID: 20166
  Gene Name: zinc finger protein 736
  Uniprot ID: B4DX44
  ENST ID: ENST00000423484
  CDS Start-End: 123-1406
actgttccatctcctccgttcctggagttcctcggtgactctactatagcttctgttatcctgtgacctgcaggtactgggagatccatagggaggacggcggaacatctggaggctgggaaatgggagtgttgacattcagggatgtggctgtagaattctccccagaagagtgggaatgcctggactctgctcagcagcgtttgtatagggatgtgatgttagagaactatggaaacctggtctccttgggtcttgctatctttaagccagacttgatgacctgtctggagcaaagaaaagagccttggaaagtgaagagacaggaggcagtagccaaacacccagctggttcttttcattttactgcagagatattgccggatcatgacataaaagattcatttcaaaaagtgattctgagaaaatatggaagctgtgaccttaataatttacatttaaagaaagactaccaaagtgtgggtaattgcaaggggcagaaaagcagttataatggccttcatcaatgtttgtcagctacccatagcaaaacctgtcaatgtaataaatgtggcagaggttttcagttgtgctcaatcttcactgaacataaagacatttttagcagagagaaatgccacaaatgtgaagaatgtggcaaagactgtaggttgttctcagattttactagacataagaaaattcatactgtagagagatgctacaaatgtgaagaatgtggcaaagcgtttaaaaagttttcaaaccttactgaacataagagagttcatactggagagaaaccttacaaatgtgaaggatgtggcaaaacttttacctgctcctcaacccttgttaaacacaagagaaatcatactggagacagaccctacaaatgtgaagaatgtggcaaagcctttaagtgcttctcagaccttactaatcataagagaattcatactggagagaaaccctacaaatgtgaagaatgtaacaaagcctataggtggttctcagaccttgctaaacataagataattcatactggagacaaaccctacacatgtaatgaatgtggaaaagcttttaagtggttctcggcccttagtaaacataagagaattcatactggagagaaaccctacatctgtgaagaatgtggcaaagcctttacccgctcctcaaccctttttaaccacaagagaattcatatggaagagagaccttacaaatgtgaagaatgcagcaaaacctttaagtgcttctcagacctgactaatcataagagaattcacactggagagaaaccctacaaatgtgaagaatgtggcaaagcatcgagctggttctcacacctcatcagacataagagaattcatactagagagaagctccacaagtgttaaaaatgtggaaaagcctttaccaagtcctcatactgtgttcaacatctgaaatttaatactgaacaaatgcagtataaatgtaatgacagtggaagaacatttatcatcttagagggtctctaagaacttactttataatctggttgcttatatgttgggtacatatatagccctttgctattatgtaatgccctttttttttaaatctatgttaatttcaagtctgttttgtcagaaactaggattgcaacccctgcttcttttcctgttttctatttgcttggtaggcttttctttttccctttattttgagcttatttgagatgggtgtcttgattaaagcataccattagatcttgattcttttttcagcttgccatctgtgctttaatttgggtatttagcccatttacatttaaggttagtattcatatgtgtggattggattctgttattaggatcttagctggctattttgcacatttgtttctgtggttgctttatagtgtccacagtttgtatactttagtgtgcttttgtagtgactggtaatagtctttttcttatttaatgctttcttcagaagctcttttaagacagatcctgtggtaacattttctcagcatttgcttgtctgaataggatcatatatattttttacttctgaagcttaccttggtcagatatgaaattctgtgttggaattctttttttaagaatgttgaatattggcccctataatctcttttgacttgtaggatttcagctgaaagatttgttgttttcctgatgagcttctttttagaggtgacctggcctttctctctagctgcctttaacatattttttctttcattttgaccctggagaatctcatgattatgtgtcttgaggatgaccttctcctggggtatcttactggggttctccacatttcctgcatttgaatgttggcctctctaggttggggaagttctcatggatgttatcctgaaatacgtatttcaagttgttttcattctccccatcactttcaggcaatctcttgcatcatagatttggtttctttacataatcccatatttcttagaggttttgttcattcctctttattcttttttcactgttcttgtctgtctgatttcagaaagccagtcttgaggccctgagattctttcctctgcttggcctattctgctgttaatatatgtgattacattataaaggttttgtattgtgtttttcagttctatcaggttggccacattttttctccagactggctgttttttccgtcagttcctgcaattttttttcctcccttgcattgggttgcaaattacttttgtaactcagtgaagtttgtttctacccatattctgaattctacttctgtcatcttaggccttgctggaaatgtaatttggtcatttggatgaaagaagtcactctggctttttgtgtttttatctttgcactgattgtgtcttatctttgtgggcatatctttgaggttgctgacctttgggcttttttttttttaatcctatttgatggtcttgagtatttgattgtggtataagatggatgcagccaacaggctttgttcctgggaggttttttttgttttgttttgttttgttttgttttgtttggtggtggtggtgggtgggcaatgctcagctcacaactcagaggctgcatactctaactccgggggacttgttttgagccccaactgtgttctctggctccttgagatttggagtttgcgagtttgtgggatgaaggtgccatagctggagcagagtgctagtggatatgggatttctgcctgtctttgggtactcacctcagtggcaggagcaaagcagctgggaagggagtgggggatacctgctggaggctgtgtgctgttgcactaaaggtggtgttggcttggggcaggatactggccagtaaaggttttgatgccttctctgtgccccccaagaaagagtgattgttcagagtgtgggaggttaccctgttctctgcacagtgttagcacaaaggcaggggtggagttttctggctctctgcccaccaaagtttcatctacaatggcagttgctgggggtggcggggcatattgcattcccatttgctggtggggcaagcaaagccaaacctgcctttgcagacatgtgccagcaaagaaatatcaggagttgccatggtgtcacgggaagctgcagtatggggaagaaatgtgggctggtgcagtcataggggctgctttgctggagctcttcatgagtcaggcatgtccctccagtgcagatgctctggtatgagcttccagggtacctgagactgccctgtaagcagctgtggccagactgggtccctgggagaggccagcagaccaaggagtgctcagttggaccagcttcttctgatttgcaagaccatcctgcagaaattaggcccaacagttcccgtagggctaaagtctcttatgggagacagttgagcctagagaaatggccatcactggccacactttactacagatgctcttgcaccaaaccctctggccaccacatgagctggcttgctgcattatctctttgcttgtcttctgggggctgcatctcagagagatgtaggtcagcaattactcagtgcagccagcccaggatggaagatctttacttttggccaagttaggggtttactgtctgctgaggagcagtgggtagtttgtgggacccatggaggatgggctggcttcctctccttgggtaaactgcagtttgaggtgtgaataaggcacttagggtttgggattttttattagtctgagggtagcaaggacagttgtactgcagaggcccctggaggctctgtccagggagttgctaagctgctactggctcaatagctctggcaatgattggctagtggcccgggcctggagaacctgcctcgtgagaatatatgagaacaggcactcacgtaacagtccgaccacttctgaagggctgctgcagtatgctgggtgtccactacagtttctagtcacctcagattttccagtactggaagttatcaccactgaatgctgcaaaacagcaacaatggcagcatgcccttttctctgggagcgccatcccagggaggtatagacctgttgccagcccaaaagcacctgtaggaggtagctggaagcccctgttgaaggtcctacccagtgaggaaaacatgattggggacccacttaagaaagcagtctagccatatttttgcaggacagctctgctattcagaggtaccacttccacccccagtttatttggattctccaaagccagaaggctggaacagctaactcacacaaacagcaaaaatggcagctcactcctccctctaggaactgtatcccaaagaggtttcaaaactccatcaaccaaagagcgctggtggtggtagctggagaccctcattgggaagtactttccagtgagaaggaatgaaacgggggacctgctttaacaggcagtctggccatgtctttttagagcacctgtactgtgctaggagatcctttccgccccccggtcagcttgggctcttcaaagcctgaaggctggaatggctaagttgctcaagcagcaaagatggtggcccactcctctttctggtagctccatcccagggaggtgcagtgctgctaccaatggttggctggaatctaagccagtaggtcttaccacgtgaggcattgttgaagtgggtcctacagaccatcactatcagccccctggattctgcctctttcctatgggtatgttcaggggtgtaacctgctttgctcgagttgcagctactttttctgggaagcctggaaagccagtatctaaggctcttgaatctgcgcaggcctaagtggcttatctgctgagactccatgtagctctgtgtgttaaactgaaggccttggtgaagtgggttcatgagggtatctcctcacctgaaggttgcagagatctgtgggagaatcatgggtttctagggtcacacatgcactcactgctttactgggtggggaggttcccttggctccatgttgttcccaggtggcccattgtcctgccttgctttactccattctccatagattgtttctttgattattcccaatgcaagtacctggatgtttcagttgcaggtgctgtatttatgtataccttgcattcctgtctatgagaactgcacagtctagctgcttctagtcagcaatctcgatcacttttctctaaagggaacctacttttttatattaaaaggattcaatatttttcaaaagcaaatttcaatataatttaactcttacatttgatgctgtgtcttcatttctagaatttatgtgaaagaacatggtcagtggttgcaccagagttgtgagaggttcttctatattagatggacagatttatatacttttccatggaggattaagtaaactgaaacctaagacacacgaagaaattctaagtggaaaggccacttattagtttacagcagtatcgtaagtgacaggatgataggagtgtggtaagtgatcaggataataatctgcttagtaagagaaacaatttgaattttagaaggaaattgccttaccatttgcaaattaaggtaattaaaatacagtgaatttcaaaatgcctttttaatgacaatgtgtgaacttaatttgttttaataaaccaaaattattgttattgtgttaaggctattttacattgaatgtgtatcttgccactgatgttaacttatcccatcttacccaaggttgtaggtaacaatatactattgggtgacagtggactaacatctctagtgatccctttgtcagtggtctttaacttaaaataatttagagaatatggtttctacaacttacatttttgtttacttgtaactacagattattatgatggttgtaatgaagattatgagtataattggagctatatgtttctgaattctgaacaactatttataaaattttatcctacttttttctgttgaacatatgacttctctggtctgctaaacacatacagacctttagttttggtttacatggatttaaatatatagatatatcactgtaaaataaacttcaggtgtaacagatttatagagaaagtaatcatatttgtttatggttgtgtacctactttgagaagaaaagaaaaatattagaatgaacagataattttacaagtgttgatcacttaccagcaaaccagaaacttcagagattttgaaagcaaatctattttctctgctgtgtattaaattcatttatctaaaatgttattgctcctggcttagaatcatcttgtgcaaattctttttttgttgtttgtctgtttgcctgttgctcaccatagacataattttcttttcataaaacattctttgtataatcacctcagagattatgaaagtgactttgataaaatttaatggtgttcacaaaataattttcacgtgagtaatttcacagtgcgtgtattgtatgttatttagtgtattttatattttgtttcaattagagaatgctattgaatccagtttttgtttagttactgttcattttactttataaaattgacataattgagtttattaaatttattgggccaatttaagtaaa

SEQ ID NO: 203678 - DNA, 2867 bp, Homo sapiens
  Payload ID: 20167
  Gene Name: zinc finger protein 737
  Uniprot ID: O75373
  ENST ID: ENST00000427401
  CDS Start-End: 96-1706
ctctgctcctagaggcccagcctctgtggccctgtgtcctgcaggtattgggagatccacagctaagacgcccgggagcccctggaagcctagaaatggggccattgcaatttagagacgtggccatagaattctctctggaggagtggcattgcctggacactgcacagcggaatttatataggaatgtgatgttagagaactacagaaacctggtcttccttggtattgttgtctctaagccagacctcatcacctgtctggagcaaggaaaaaaacctttgaccatgaagaaacatgagatggtagccaacccctcagttacgtgttctcattttgcccgagatctttggccagagcagagcataaaagattctttccaaaaagtgacactgagaagatatgaaaactatggacatgacaatttacagtttaaaaagggctgtgaaagtgtagatgagtgtaaggtgcacaaaagaggttataatggacttaaccaatatttgacaactactcaaagcaaaatatttcagtgtgataaatatgtgaaagtcattcataaattttcaaattcaaacagacataagataagacatactggaaaaaaacctttcaaatgtatagaatgtggcaaagcttttaaccagtcttcaacccttactacacataagaaaattcatactggggagaaacccttcaaatgtgaagaatgtggcaaagccttcaactggtcctcacaccttactacacataagagaattcatactggagagaaacggtacaaatgtgaagactgtggcaaagcctttagccggttttcataccttactgcacataagataattcatagtggagagaaaccctacaaatgtgaagaatgtggcaaggcctttaagcgctcctctaaccttactacacataagataattcatactggagagaaaccctacaaatgtgaagaatgtggcaaggcctttaagcgctcctctatccttactgcgcataagataattcatagcggagagaaaccctacaaatgtgaagaatgtggcaaagcctttaagcacccctctgtccttactacacataaaagaattcatactggagagaaaccctacaaatgtgaagaatgtggcagagcctttaagtacttctcatcccttactacacacaagataattcatagtggagagaaaccctacaaatgtgaagaatgtggcaaagccttcaactggtcctcacaccttactacacataagagaattcatactggagagaaaccctacaaatgtgaagaatgtggcgaagcctttaagtactcctcttcccttactacacataagataatccatactggacagcaacccttcaagtgtgaagaatgtggcaaggcctttaagtgcttctctatccttactacacataagagaattcatactggagagaaaccctacaaatgtgaagaatgtggcaaagccttcaactcgtcctcacaccttactgcacataagagaattcatactggagagaaaccctacaaatgtgaacgatgtggcaaggcttttaagcgctcctttatccttactagacataagagaattcatactggagagaaaccctacaaatgtgaagaatgtggcaaaggctttaagtgcccctctacccttactacacataaggtaattcatactggagagaaactataaatgtgaggaatgtggcaaagctttaagctatcccactatgcttttttcacataagaaaattcatattggagggaaactgtacaagtgtgataaatgtggcaaagcctttatttcatcctcaaaccttagtagacattagataattcatgcgggaaagaaacccaacaaataagaaaatgcagcaaagcctttaaggacacctctgcccttactagacataagataattcgtactggagagaaaccctgtgagtttgatgaatgtcggaaagcctttaaccagctatcaacttttactaaatatgagaatttatatggaacataaaccctacaaatataaagaatgtgacaacgcttttaggaagttctgaacccttcttacacataattcatgctggacaaaaatcctacaagtttgaggaatgtggcaaatcctataacaagttttcaatatttttttttttgagatgaagtttcatgcttgtcatccaagctggagtacagtgccatgatctcggctcactgcaacctctgcctcctgggtttaagccattctcctacctcagcttcctgagtagctgggattacaggtgtcctccaacatgcccagctaatttttttatttttagtagagatgcgacttcgccatgtttgccaggctggtctcgaactcctgacctcaggtgatccacccaccttggcctcctaaagtgctgggattacaggcgtgagccacgacgcccagccacaagttctcaattcttaagaggcatggcaataattcatgttgaagaggaaatccgcaaagctaaaaaatgtgacattgcttttacgaacacctccaacttctctacacataacaataattatactagtgtgaaaccctagaaatatataaaatgtgacaaagcctttatatggttgccactcttgattgtaggttggataattcatactggcaaaactcctacaagtgtgaagaatgtggcaaaacttttaatcagttcttacaccttatctcacagaaaagctagtatccttgagaaaaattgtacaaatagaaggaatatggaaaacctattaattcctactcacatctaactcaacataaaaatcttccttttaataaaagcattaaaatggcaattactgtcaaaacttt

SEQ ID NO: 203679 - DNA, 544 bp, Homo sapiens
  Payload ID: 20167
  Gene Name: zinc finger protein 737
  ENST ID: ENST00000597940
  CDS Start-End: 140-271
ctctgcagccggagctccaggtcttgtcttcactgctgtgtgtcctctgctcctagaggcccagcctctgtggccctgtgtcctgcaggtattgggagatccacagctaagacgcccgggagcccctggaagcctagaaatggttggagtgcagtggcgtgatctcggcttactgcagcctccacctcctgggttcaagcaattctcctgcctcagcctcctgagtagctgggattacaggggccattgcaatttagagacgtggccatagaattctctctggaggagtggcattgcctggacactgcacagcggaatttatataggaatgtgatgttagagaactacagaaacctggtcttccttggtattgttgtctctaagccagacctcatcacctgtctggagcaaggaaaaaaacctttgaccatgaagaaacatgagatggtagccaacccctcagttacgtgttctcattttgcccgagatctttggccagagcagagcataaaagattctttccaaaaagtgacactgagaagat

SEQ ID NO: 203680 - DNA, 872 bp, Homo sapiens
  Payload ID: 20167
  Gene Name: zinc finger protein 737
  ENST ID: ENST00000594419
  CDS Start-End: 172-872
tgctgtgtgtcctctgctcctagaggcccagcctctgtggccctgtgtcctgcaggtattgggagatccacagctaagacgcccgggagcccctggaagcctagaaatggtattgttgtctctaagccagacctcatcacctgtctggagcaaggaaaaaaacctttgaccatgaagaaacatgagatggtagccaacccctcagttacgtgttctcattttgcccgagatctttggccagagcagagcataaaagattctttccaaaaagtgacactgagaagatatgaaaactatggacatgacaatttacagtttaaaaagggctgtgaaagtgtagatgagtgtaaggtgcacaaaagaggttataatggacttaaccaatatttgacaactactcaaagcaaaatatttcagtgtgataaatatgtgaaagtcattcataaattttcaaattcaaacagacataagataagacatactggaaaaaaacctttcaaatgtatagaatgtggcaaagcttttaaccagtcttcaacccttactacacataagaaaattcatactggggagaaacccttcaaatgtgaagaatgtggcaaagccttcaactggtcctcacaccttactacacataagagaattcatactggagagaaacggtacaaatgtgaagactgtggcaaagcctttagccggttttcataccttactgcacataagataattcatagtggagagaaaccctacaaatgtgaagaatgtggcaaggcctttaagcgctcctctaaccttactacacataagataattcatactggagagaaaccctacaaatgtgaagaatgtggcaaggcctttaagcgctcctc

SEQ ID NO: 203681 - DNA, 569 bp, Homo sapiens
  Payload ID: 20167
  Gene Name: zinc finger protein 737
  ENST ID: ENST00000596797
  CDS Start-End: 170-565
gaaggcttccgggttttgcggggcctttgtctctgcagccggagctccaggtcttgtcttcactgctgtgtgtcctctgctcctagaggcccagcctctgtggccctgtgtcctgcaggtattgggagatccacagctaagacgcccgggagcccctggaagcctagaaatggggccattgcaatttagagacgtggccatagaattctctctggaggagtggcattgcctggacactgcacagcggaatttatataggaatgtgatgttagagaactacagaaacctggtcttccttggtattgttgtctctaagccagacctcatcacctgtctggagcaaggaaaaaaacctttgaccatgaagaaacatgagatggtagccaacccctcagagactgggtttcaccatgttggcaagggtggtctcaaactcctgacctcagatgatctgcctgcctcggcctcccaaagtactggaattacaggcatgaggcaccccgcccggcccaattgtgtgggcttctatgtaggcagaactgaccataaactgtggctcaggtaaccga

SEQ ID NO: 203682 - DNA, 417 bp, Homo sapiens
  Payload ID: 20167
  Gene Name: zinc finger protein 737
  ENST ID: ENST00000596530
  CDS Start-End: 1-160
acataagagaattcatactggagagaaaccctacaaatgtgaagaatgtggcaaaggctttaagtgcccctctacccttactacacataagttttttgtttattgcagagaagtggctgtcctactagaaaactgctactctcatctgtatccacattgaataatagtgaatggaagtgaagcggataaaaggtaaatgtgtcttctctgtatcttttttcatccattggctgaagaacaggaaaatgtggaaaataaaagaaaatataacccctgaaaaatcctgaagaagctctcttaaccagacaaaaaaccttataggggattttttgtttgttttattattgtaccatctgcttctatgagtttaattttttttttttttttacactttacatagaaataggattatgtggg

SEQ ID NO: 203683 - DNA, 2442 bp, Homo sapiens
  Payload ID: 20168
  Gene Name: zinc finger protein 738
  Uniprot ID: Q8NE65
  ENST ID: ENST00000311015
  CDS Start-End: 212-625
gtccaatcaggcacgcagcttgagcggagaggacggcttccgggatgtggcgggatttgtccgcttctttgtctttggctgccgctggaactccgggtctcgtcttcactgctctgtgtcctctgctcctagaggcccagcctctggtcctgtgacctgcaggtattgggaatccacagctaagacgccgggacaccctggaagcctagaaatggacgacctgaggtatggagtgtatcctgtcaagggggcaagtggataccctggggctgagaggaatcttctggagtactcttattttgaaaaggggccgttgacatttagggatgtggtcatagaattctctcaggaggagtggcaatgcctggacactgctcagcaagatttgtataggaaagtgatgttagagaacttcagaaacctggtgttcttgggtattgatgtctctaagccagatctgatcacctgtctggagcaaggaaaagatccctggaatatgaagagacacagtatggtagccacacccccagaaagtggggtattgaaatttcctactataattatattgctgtctaggtgtttcttccagtctgtcaatatttgctttatatatttggaaccttagtgtgacatacacacagacacacagacgtgcacacacacacacacacacacaaaatttgtcataggttcccagttaataaatctattattgtttaatgtctttctttgtctctttgcagttttgacttaaagtactttatgtaagatatgacagtttttgacttaagatgtggcttttgtaatactattttgacctcttctgctctcatttggttaatatttgcatgcaatgtctaaatctatcttgccaccttcagtatgtttttaatcattagatgtcagctgacccttgtagaaaggcaaattggatcttggtttttaataattttaaataaatttctttattgaaagtatgtctcttgattggaaagttttctgaaacaaagagacttactaattttttttgttgttctatttgattcttgcatctttgtcccacattttctctctttgtttctctctgtggctgttttatttttactttgatatgcttttacttctttcttatgttgttttctgtgtctatacaggcatattctttgtggtacgtgggggattacataaaacctttaagagatacaatgtatttcagtctagttaaaaatgaacttttgttgcatgcaaaaattttttctcattacatatgttctcagatttgttcttgatgttgctaattatatttttatatgtatatttattaacatgtttataatgatttctatgcctttatctttcaaattttggggaataattaaaaatttcttctgtgccattatgataatgctaagaaatgtatttttgtgtatgtgcgtatctttcccagaaaataatgtgttttaatatgattttgtgttgctttgttaaatcatcttattttcattggaagcaactgttttcagcaccttttatatgtaaggaagtaccaatatactttttaaaatttggttatttttgaagtttgttttctttttatttagcaggacagatttggtgatggtattatactcacttgataactattttcttcagatttcactatatcacacagttttcttctgtcctgaaaaatttttgttgagaatccactggctatctcataagagtattcttgcaaataatatcactttttttttttttttttttgagatggagtttcactgttgttccccaggccggagtgaaatggcgcgatttcacctcgctgtgtcccaggttcaagcagttctcctacctcagcctcccgagtagctgggattacgggcatatgccaccacacccagctaagtttgtatttttagtagagacagggtttctccatgttggtcaggctagtctcgatctcctgacctcaggtgattcacccacctcagcttcccaaagtgccgggattacaagcttgagctaccgcgcccagccaacacatcacttttatcttgcagctcccgagattctcttttctgtgacttttaaaattgtgcttacatatgtgtttgatataaatatctttgtattctagtttgtttgttcagcttcttcatttttacatcactttttaaaagatttctgttattttttatatttttttacctccataatttctgtttttccaatattttaaatatttctgttcttatttccagttttctgattttctgtagttctctgtgttcatattttactcattgagtattcaatttattttgtttttaaaattaatgtatacattttttatttctttctgaaaaatttataataattttgttggtactacattgccctgttttgtatatattctaatcttttattaaaatttgcaca

SEQ ID NO: 203684 - DNA, 1142 bp, Homo sapiens
  Payload ID: 20168
  Gene Name: zinc finger protein 738
  ENST ID: ENST00000380870
  CDS Start-End: 150-503
gcttctttgtctttggctgccgctggaactccgggtctcgtcttcactgctctgtgtcctctgctcctagaggcccagcctctggtcctgtgacctgcaggtattgggaatccacagctaagacgccgggacaccctggaagcctagaaatggacgacctgaggtatggagtgtatcctgtcaagggggcaagtggataccctggggctgagaggaatcttctggagtactcttattttgaaaaggggccgttgacatttagggatgtggtcatagaattctctcaggaggagtggcaatgcctggacactgctcagcaagatttgtataggaaagtgatgttagagaacttcagaaacctggtgttcttgggtattgatgtctctaagccagatctgatcacctgtctggagcaaggaaaagatccctggaatatgaagagacacagtatggtagccacacccccagatggagtttcactgttgttccccaggccggagtgaaatggcgcgatttcacctcgctgtgtcccaggttcaagcagttctcctacctcagcctcccgagtagctgggattacgggcatatgccaccacacccagctaagtttgtatttttagtagagacagggtttctccatgttggtcaggctagtctcgatctcctgacctcaggtgattcacccacctcagcttcccaaagtgccgggattacaagcttgagctaccgcgcccagccaacacatcacttttatcttgcagctcccgagattctcttttctgtgacttttaaaattgtgcttacatatgtgtttgatataaatatctttgtattctagtttgtttgttcagcttcttcatttttacatcactttttaaaagatttctgttattttttatatttttttacctccataatttctgtttttccaatattttaaatatttctgttcttatttccagttttctgattttctgtagttctctgtgttcatattttactcattgagtattcaatttattttgtttttaaaattaatgtatacattttttatttctttctgaaaaatttataataattttgttggtactacattgccctgttttgtatatattctaatcttttattaaaatttgcacatt

SEQ ID NO: 203685 - DNA, 1086 bp, Homo sapiens
  Payload ID: 20168
  Gene Name: zinc finger protein 738
  ENST ID: ENST00000594245
  CDS Start-End: 112-318
cgtcttcactgctctgtgtcctctgctcctagaggcccagcctctggtcctgtgacctgcaggtattgggaatccacagctaagacgccgggacaccctggaagcctagaaatggacgacctgaggtatggagtgtatcctgtcaagggggcaagtggataccctggggctgagaggaatcttctggagtactcttattttgaaaagacggagtttcgctcttgttgcccaggctggagtgcaatggcgcgatctcagctcacctcaacctccgcctcccgggttcaagcgattctcctgcctcagccttccgagtagctgggattacaggcatgcaccaccaccctggctaattttgtatttttagtagagatggggtttctccatgttggtcaggctggtcttgaactcccgacctcaggtgacctacctacctcgacctcccaaaatgctgggattacaggcatgagccaccgtgccaggctgggatttaagtttttcttaggtaaacttaggaaaaacagaactggaaatactccagtgacatagaaaacaaattctacctaggttcttttccctgccccagttctgatcagattcaccatttttggaggccttatttaggtctggcctcactctggagtgttcccttacaaaactgatttataaagattcaagtttttgggggtaaatcctgctgactttctagagctgctgctcacagtatcctgaaacccaaaagcagatacataagaaaaataaactatacattttaagatcttaatttttaaattttgtagtaaaaccagtgcttacagaaacgttccatttagcagattttctgttcctgcagatccagtagctgctctacaagtcataaacaagtaaacataaacacaaaaaaatttctctaaactacattctaaatcctgagaattattgaacacttagtatgaactttcaaggtgttagtaggacataataacaaataataacacataatgtgttattcccagcacagtgctctgcaacatactattgagcacatagtacctgcttaataaacattgcattagttcatgtgta

SEQ ID NO: 203686 - DNA, 747 bp, Homo sapiens
  Payload ID: 20168
  Gene Name: zinc finger protein 738
  ENST ID: ENST00000597810
  CDS Start-End: 131-520
ccgctggaactccgggtctcgtcttcactgctctgtgtcctctgctcctagaggcccagcctctggtcctgtgacctgcaggtattgggaatccacagctaagacgccgggacaccctggaagcctagaaatggacgacctgaggtatggagtgtatcctgtcaagggggcaagtggataccctggggctgagaggaatcttctggagtactcttattttgaaaaggggccgttgacatttagggatgtggtcatagaattctctcaggaggagtggcaatgcctggacactgctcagcaagatttgtataggaaagtgatgttagagaacttcagaaacctggtgttcttgggtattgatgtctctaagccagatctgatcacctgtctggagcaaggaaaagatccctggaatatgaagagacacagtatggtagccacacccccaggcatattctttgtggtacgtgggggattacataaaacctttaagagatacaatgtatttcagtctagttaaaaatgaacttttgttgcatgcaaaaattttttctcattacatatgttctcagatttgttcttgatgttgctaattatatttttatatgtatatttattaacatgtttataatgatttctatgcctttatctttcaaattttggggaataattaaaaatttcttctgtgccattatgataatgctaagaaatgtatttttgtgtatgtgcgtatctttcccagaaaat

SEQ ID NO: 203687 - DNA, 1021 bp, Homo sapiens
  Payload ID: 20168
  Gene Name: zinc finger protein 738
  ENST ID: ENST00000597492
  CDS Start-End: 121-255
tccgggtctcgtcttcactgctctgtgtcctctgctcctagaggcccagcctctggtcctgtgacctgcaggtattgggaatccacagctaagacgccgggacaccctggaagcctagaaatgatggagtctcgctctgtctcccaggctggagtgcaatggcgcgatctcggctcacctcaacctccgcctcccggttttaaacaattctcccacttcagcctccttagtagctgggattacaggacgacctgaggtatggagtgtatcctgtcaagggggcaagtggataccctggggctgagaggaatcttctggagtactcttattttgaaaaggggccgttgacatttagggatgtggtcatagaattctctcaggaggagtggcaatgcctggacactgctcagcaagatttgtataggaaagtgatgttagagaacttcagaaacctggtgttcttgggtattgatgtctctaagccagatctgatcacctgtctggagcaaggaaaagatccctggaatatgaagagacacagtatggtagccacacccccaggtaggtgagagtgaataaaacagttgacatagatgaaaggttggaagattacaaaaaaaaaaaagcagtccctataatgtgatttgggaagctgtgttccaaagcaaatagattctgggaagcctgaggtgtgtggtttttttgtttgttttctttttgttgttgttactgtcacatagggccatcttctgtcttaggcttttaaattctctaaggattctactttcccttcattgattttccttcaagttcacagtgagagccagagtcctcttcatggcatataaaagactgcacaatctgactgcatttccattgttttgggggacacacaaatatctgcatgattttgagaaactttatgttaaactatttttttagttctcttttgcatcatgtctaaaatgtgtgagagtagtggtcactgttctattggtttttatgttaattttctgcacat

SEQ ID NO: 203688 - DNA, 2416 bp, Homo sapiens
  Payload ID: 20169
  Gene Name: zinc finger protein 74
  ENST ID: ENST00000356671
  CDS Start-End: 163-1881
cctgctctttccctgaaagagaatctcgaggatatatcgggttggggtcttcccgaagccaggtccaaggaatcggtgagtttcaaggatgtggctgtggacttcacccaggaggagtggggtcaactagactcccctcagagggccttgtaccgggatgtgatgttggagaactaccagaaccttcttgccctaggacctccactgcacaagccagatgtgatctctcatctggaacgaggcgaggagccatggagcatgcagagggaagtccccagagggccctgtccagaatgggagctgaaggcggtgccctctcaacagcagggcatttgcaaagaagaaccggcccaggagcccatcatggagcggcccctcggcggggcgcaggcgtgggggcgccaggcaggtgctctgcagaggagtcaggctgcgcctgggcgccgcacctgccatggtctgggacgtcctgtagaggaattccccctcaggtgtcccctcttcgcccagcaacgcgttcccgaggggggacccttgctggacacacgcaagaacgtccaggccactgagggcagaaccaaggcccccgcgagactgtgtgcaggggaaaacgcctccacgccaagtgagccagaaaagttcccccaggtgcgccggcagcgcggggcgggcgccggggagggcgagttcgtgtgcggcgagtgcgggaaggcgttccgccagagctcctccctcacgctgcaccggcgctggcacagccgggagaaggcttacaagtgcgatgaatgcggcaaggccttcacctggagcaccaaccttctggagcaccggcgcatccacaccggcgagaagcccttcttctgcggcgagtgcgggaaggccttcagctgccactcgtccctcaacgtgcaccagcgcatccacacgggcgagcggccctacaagtgcagcgcctgcgagaaggccttcagctgcagctcgctgctcagcatgcacctgcgggtgcacaccggcgagaagccctaccggtgcggcgagtgcggcaaggccttcaaccagcgtacacacctcacacgccaccaccgcatccacacgggcgagaagccctaccagtgcggctcctgcggcaaggccttcacctgccactcatccctcaccgtgcatgagaagatccacagcggggacaagccgttcaagtgcagcgactgcgagaaggccttcaacagccgctcgcgcctcaccctccaccagaggacgcacacgggcgagaagcccttcaagtgcgccgactgcgggaagggcttcagctgccacgcgtacctgctcgtgcaccggcgcatccacagcggcgagaagcccttcaagtgcaacgagtgcggcaaagccttcagctcccacgcctacctcatcgtgcaccggcgcatccacacaggcgagaagcccttcgactgcagccagtgttggaaggccttcagctgccactcgtccctcatcgtgcaccagcgcatccacaccggtgagaagccctacaagtgcagcgagtgcggcagagccttcagccagaaccactgtctcattaaacatcagaaaatccactccggggagaagtcgtttaagtgtgagaaatgtggggagatgttcaactggagctcgcacctcactgagcaccagaggctgcacagcgaggggaagcccttggccatccagttcaacaaacacctgctcagcacatactacgtgcctggcagcctgctgggtgcaggggatgctggactgagggacgtggatcccatcgacgcgctggatgtggcaaagctcttgtgcgtggttccccccagagctggcaggaatttctccctggggagcaaacctcgaaactaacatgatgtgctttggtgtcagtagctgctttctgagctactcaacaaggaaagcaccctggtcctccctggctcctagatccagaccaccttcctccaggtgtgggagccttgccttatcacccccatcaggtctgcatgccagggtgcctcctctagttaaagtcagtcacctccccagaagggccacactccaggaggagtgttgagagtcatttgaggtagtcttgccacctgttttccttgatgggcctggaagttgttgacaaggggaaagatctttcttgccaataaaaagaagggatatcgttgggtgccatggctcacacctgtaatcttaacactgtgggaggccaaggcaaggggatcacttgagcccaggagtctaggaccagcctggacaacatggtgagacctcgtctctacaaaaaatgcaaaaattagccagatgtggcggcatgtccctgtggtcccagctactcaggaggctgaggtgggaggatcatttgagcctaggaggtcaaggctgcagtgag

SEQ ID NO: 203689 - DNA, 2788 bp, Homo sapiens
  Payload ID: 20169
  Gene Name: zinc finger protein 74
  ENST ID: ENST00000357502
  CDS Start-End: 125-763
cctgctgctctttgtggcagtcgcagtccttttgtgggagtccggtctgtccacttgccggtccctcagaccgtcggcggtctctgtccgcttcgggacctgtccgctggtcgctccgcgtccgatggctcctggccgcggaaccttaggcctggccctggtctccgagcgcggctctttcctctcaggatcctgctctttccctgaaagagaatctcgaggatatatcgggttggggtcttcccgaagccaggtccaaggaatcggtgagtttcaaggatgtggctgtggacttcacccaggaggagtggggtcaactagactcccctcagagggccttgtaccgggatgtgatgttggagaactaccagaaccttcttgccctaggacctccactgcacaagccagatgtgatctctcatctggaacgaggcgaggagccatggagcatgcagagggaagtccccagagggccctgtccagaatgggagctgaaggcggtgccctctcaacagcagggcatttgcaaagaagaaccggcccaggagcccatcatggagcggcccctcggcggggcgcaggcgtgggggcgccaggcaggtgctctgcagaggagtcaggctgcgccctgggcgcccgcacctgccatggtctgggacgtccctgtagaggaattccccctcaggtgtcccctcttcgcccagcaacgcgttcccgaggggggacccttgctggacacacgcaagaacgtccaggccactgagggcagaaccaaggcccccgcgagactgtgtgcaggggaaaacgcctccacgccaagtgagccagaaaagttcccccaggtgcgccggcagcgcggggcgggcgccggggagggcgagttcgtgtgcggcgagtgcgggaaggcgttccgccagagctcctccctcacgctgcaccggcgctggcacagccgggagaaggcttacaagtgcgatgaatgcggcaaggccttcacctggagcaccaaccttctggagcaccggcgcatccacaccggcgagaagcccttcttctgcggcgagtgcgggaaggccttcagctgccactcgtccctcaacgtgcaccagcgcatccacacgggcgagcggccctacaagtgcagcgcctgcgagaaggccttcagctgcagctcgctgctcagcatgcacctgcgggtgcacaccggcgagaagccctaccggtgcggcgagtgcggcaaggccttcaaccagcgtacacacctcacacgccaccaccgcatccacacgggcgagaagccctaccagtgcggctcctgcggcaaggccttcacctgccactcatccctcaccgtgcatgagaagatccacagcggggacaagccgttcaagtgcagcgactgcgagaaggccttcaacagccgctcgcgcctcaccctccaccagaggacgcacacgggcgagaagcccttcaagtgcgccgactgcgggaagggcttcagctgccacgcgtacctgctcgtgcaccggcgcatccacagcggcgagaagcccttcaagtgcaacgagtgcggcaaagccttcagctcccacgcctacctcatcgtgcaccggcgcatccacacaggcgagaagcccttcgactgcagccagtgttggaaggccttcagctgccactcgtccctcatcgtgcaccagcgcatccacaccggtgagaagccctacaagtgcagcgagtgcggcagagccttcagccagaaccactgtctcattaaacatcagaaaatccactccggggagaagtcgtttaagtgtgagaaatgtggggagatgttcaactggagctcgcacctcactgagcaccagaggctgcacagcgaggggaagcccttggccatccagttcaacaaacacctgctcagcacatactacgtgcctggcagcctgctgggtgcaggggatgctggactgagggacgtggatcccatcgacgcgctggatgtggcaaagctcttgtgcgtggttccccccagagctggcaggaatttctccctggggagcaaacctcgaaactaacatgatgtgctttggtgtcagtagctgctttctgagctactcaacaaggaaagcaccctggtcctccctggctcctagatccagaccaccttcctccaggtgtgggagccttgccttatcacccccatcaggtctgcatgccagggtgcctcctctagttaaagtcagtcacctccccagaagggccacactccaggaggagtgttgagagtcatttgaggtagtcttgccacctgttttccttgatgggcctggaagttgttgacaaggggaaagatctttcttgccaataaaaagaagggatatcgttgggtgccatggctcacacctgtaatcttaacactgtgggaggccaaggcaaggggatcacttgagcccaggagtctaggaccagcctggacaacatggtgagacctcgtctctacaaaaaatgcaaaaattagccagatgtggcggcatgtccctgtggtcccagctactcaggaggctgaggtgggaggatcatttgagcctaggaggtcaaggctgcagtgagccatgattcacagcactgcactgcagcctgggtgacaaagcaagaccctgtgtgaaattaaaaggaggtatatcaactgttgtatcctcggacgggctcctgacacggctttaatcaggagtttcctccataaactattattttcagaataataataaaacaagaattatgactagca

SEQ ID NO: 203690 - DNA, 3159 bp, Homo sapiens
  Payload ID: 20169
  Gene Name: zinc finger protein 74
  Uniprot ID: Q16587
  ENST ID: ENST00000400451
  CDS Start-End: 515-2449
gtagtttgcgcctatttcgcgcaggcgcgctttcccgcagcggccgcctgctgctctttgtggcagtcgcagtccttttgtgggagtccggtctgtccacttgccggtccctcagaccgtcggcggtctctgtccgcttcgggacctgtccgctggtcgctccgcgtccgatggctcctggccgcggaaccttaggcctggccctggtctccgagcgcgggttcgccgggaggagcgtgtggcgggggtgtgccggggcgtgagtgcgccgagcatggggctgagcctggtgtggggagtgggtatctgcggagccggcctgaaccccacctcagccgggcgcggggagggggctccgtgcgtgtgatcgtgcagctgtgagcgcgtggccgccccgcggggctccgctgcaggcccctcagccccaggagcagtactcgctcttcagggcctgccctggatcctggaggctacacagctgcccactcctcctggggaggctgccgtggaggccatggagatccctgccccggagcccgagaagacagctctttcctctcaggatcctgctctttccctgaaagagaatctcgaggatatatcgggttggggtcttcccgaagccaggtccaaggaatcggtgagtttcaaggatgtggctgtggacttcacccaggaggagtggggtcaactagactcccctcagagggccttgtaccgggatgtgatgttggagaactaccagaaccttcttgccctaggacctccactgcacaagccagatgtgatctctcatctggaacgaggcgaggagccatggagcatgcagagggaagtccccagagggccctgtccagaatgggagctgaaggcggtgccctctcaacagcagggcatttgcaaagaagaaccggcccaggagcccatcatggagcggcccctcggcggggcgcaggcgtgggggcgccaggcaggtgctctgcagaggagtcaggctgcgccctgggcgcccgcacctgccatggtctgggacgtccctgtagaggaattccccctcaggtgtcccctcttcgcccagcaacgcgttcccgaggggggacccttgctggacacacgcaagaacgtccaggccactgagggcagaaccaaggcccccgcgagactgtgtgcaggggaaaacgcctccacgccaagtgagccagaaaagttcccccaggtgcgccggcagcgcggggcgggcgccggggagggcgagttcgtgtgcggcgagtgcgggaaggcgttccgccagagctcctccctcacgctgcaccggcgctggcacagccgggagaaggcttacaagtgcgatgaatgcggcaaggccttcacctggagcaccaaccttctggagcaccggcgcatccacaccggcgagaagcccttcttctgcggcgagtgcgggaaggccttcagctgccactcgtccctcaacgtgcaccagcgcatccacacgggcgagcggccctacaagtgcagcgcctgcgagaaggccttcagctgcagctcgctgctcagcatgcacctgcgggtgcacaccggcgagaagccctaccggtgcggcgagtgcggcaaggccttcaaccagcgtacacacctcacacgccaccaccgcatccacacgggcgagaagccctaccagtgcggctcctgcggcaaggccttcacctgccactcatccctcaccgtgcatgagaagatccacagcggggacaagccgttcaagtgcagcgactgcgagaaggccttcaacagccgctcgcgcctcaccctccaccagaggacgcacacgggcgagaagcccttcaagtgcgccgactgcgggaagggcttcagctgccacgcgtacctgctcgtgcaccggcgcatccacagcggcgagaagcccttcaagtgcaacgagtgcggcaaagccttcagctcccacgcctacctcatcgtgcaccggcgcatccacacaggcgagaagcccttcgactgcagccagtgttggaaggccttcagctgccactcgtccctcatcgtgcaccagcgcatccacaccggtgagaagccctacaagtgcagcgagtgcggcagagccttcagccagaaccactgtctcattaaacatcagaaaatccactccggggagaagtcgtttaagtgtgagaaatgtggggagatgttcaactggagctcgcacctcactgagcaccagaggctgcacagcgaggggaagcccttggccatccagttcaacaaacacctgctcagcacatactacgtgcctggcagcctgctgggtgcaggggatgctggactgagggacgtggatcccatcgacgcgctggatgtggcaaagctcttgtgcgtggttccccccagagctggcaggaatttctccctggggagcaaacctcgaaactaacatgatgtgctttggtgtcagtagctgctttctgagctactcaacaaggaaagcaccctggtcctccctggctcctagatccagaccaccttcctccaggtgtgggagccttgccttatcacccccatcaggtctgcatgccagggtgcctcctctagttaaagtcagtcacctccccagaagggccacactccaggaggagtgttgagagtcatttgaggtagtcttgccacctgttttccttgatgggcctggaagttgttgacaaggggaaagatctttcttgccaataaaaagaagggatatcgttgggtgccatggctcacacctgtaatcttaacactgtgggaggccaaggcaaggggatcacttgagcccaggagtctaggaccagcctggacaacatggtgagacctcgtctctacaaaaaatgcaaaaattagccagatgtggcggcatgtccctgtggtcccagctactcaggaggctgaggtgggaggatcatttgagcctaggaggtcaaggctgcagtgagccatgattcacagcactgcactgcagcctgggtgacaaagcaagaccctgtgtgaaattaaaaggaggtatatcaactgttgtatcctcggacgggctcctgacacggctttaatcaggagtttcctccataaactattattttcagaataataataaaacaagaattatgacta

SEQ ID NO: 203691 - DNA, 2789 bp, Homo sapiens
  Payload ID: 20169
  Gene Name: zinc finger protein 74
  Uniprot ID: Q16587
  ENST ID: ENST00000403682
  CDS Start-End: 502-1038
atttcgcgcaggcgcgctttcccgcagcggccgcctgctgctctttgtggcagtcgcagtccttttgtgggagtccggtctgtccacttgccggtccctcagaccgtcggcggtctctgtccgcttcgggacctgtccgctggtcgctccgcgtccgatggctcctggccgcggaaccttaggcctggccctggtctccgagcgcgggttcgccgggaggagcgtgtggcgggggtgtgccggggcgtgagtgcgccgagcatggggctgagcctggtgtggggagtgggtatctgcggagccggcctgaaccccacctcagccgggcgcggggagggggctccgtgcgtgtgatcgtgcagctgtgagcgcgtggccgccccgcggggctccgctgcaggcccctcagccccaggagcagtactcgctcttcagggcctgccctggatcctggaggctacacagctgcccactcctcctggggaggctgccgtggaggccatggagatccctgccccggagcccgagaagacaggaatcggtgagtttcaaggatgtggctgtggacttcacccaggaggagtggggtcaactagactcccctcagagggccttgtaccgggatgtgatgttggagaactaccagaaccttcttgccctaggacctccactgcacaagccagatgtgatctctcatctggaacgaggcgaggagccatggagcatgcagagggaagtccccagagggccctgtccagaatgggagctgaaggcggtgccctctcaacagcagggcatttgcaaagaagaaccggcccaggagcccatcatggagcggcccctcggcggggcgcaggcgtgggggcgccaggcaggtgctctgcagaggagtcaggctgcgccctgggcgcccgcacctgccatggtctgggacgtccctgtagaggaattccccctcaggtgtcccctcttcgcccagcaacgcgttcccgaggggggacccttgctggacacacgcaagaacgtccaggccactgagggcagaaccaaggcccccgcgagactgtgtgcaggggaaaacgcctccacgccaagtgagccagaaaagttcccccaggtgcgccggcagcgcggggcgggcgccggggagggcgagttcgtgtgcggcgagtgcgggaaggcgttccgccagagctcctccctcacgctgcaccggcgctggcacagccgggagaaggcttacaagtgcgatgaatgcggcaaggccttcacctggagcaccaaccttctggagcaccggcgcatccacaccggcgagaagcccttcttctgcggcgagtgcgggaaggccttcagctgccactcgtccctcaacgtgcaccagcgcatccacacgggcgagcggccctacaagtgcagcgcctgcgagaaggccttcagctgcagctcgctgctcagcatgcacctgcgggtgcacaccggcgagaagccctaccggtgcggcgagtgcggcaaggccttcaaccagcgtacacacctcacacgccaccaccgcatccacacgggcgagaagccctaccagtgcggctcctgcggcaaggccttcacctgccactcatccctcaccgtgcatgagaagatccacagcggggacaagccgttcaagtgcagcgactgcgagaaggccttcaacagccgctcgcgcctcaccctccaccagaggacgcacacgggcgagaagcccttcaagtgcgccgactgcgggaagggcttcagctgccacgcgtacctgctcgtgcaccggcgcatccacagcggcgagaagcccttcaagtgcaacgagtgcggcaaagccttcagctcccacgcctacctcatcgtgcaccggcgcatccacacaggcgagaagcccttcgactgcagccagtgttggaaggccttcagctgccactcgtccctcatcgtgcaccagcgcatccacaccggtgagaagccctacaagtgcagcgagtgcggcagagccttcagccagaaccactgtctcattaaacatcagaaaatccactccggggagaagtcgtttaagtgtgagaaatgtggggagatgttcaactggagctcgcacctcactgagcaccagaggctgcacagcgaggggaagcccttggccatccagttcaacaaacacctgctcagcacatactacgtgcctggcagcctgctgggtgcaggggatgctggactgagggacgtggatcccatcgacgcgctggatgtggcaaagctcttgtgcgtggttccccccagagctggcaggaatttctccctggggagcaaacctcgaaactaacatgatgtgctttggtgtcagtagctgctttctgagctactcaacaaggaaagcaccctggtcctccctggctcctagatccagaccaccttcctccaggtgtgggagccttgccttatcacccccatcaggtctgcatgccagggtgcctcctctagttaaagtcagtcacctccccagaagggccacactccaggaggagtgttgagagtcatttgaggtagtcttgccacctgttttccttgatgggcctggaagttgttgacaaggggaaagatctttcttgccaataaaaagaagggatatcgttgggtgccatggctcacacctgtaatcttaacactgtgggaggccaaggcaaggggatcacttgagcccaggagtctaggaccagcctggacaacatggtgagacctcgtctctacaaaaaatgcaaaaa

SEQ ID NO: 203692 - DNA, 1839 bp, Homo sapiens
  Payload ID: 20169
  Gene Name: zinc finger protein 74
  Uniprot ID: Q16587
  ENST ID: ENST00000405993
  CDS Start-End: 1-1839
atggagatccctgccccggagcccgagaagacagctctttcctctcaggatcctgctctttccctgaaagagaatctcgaggatatatcgggttggggtcttcccgaagccaggtccaaggaatcggtgagtttcaaggatgtggctgtggacttcacccaggaggagtggggtcaactagactcccctcagagggccttgtaccgggatgtgatgttggagaactaccagaaccttcttgccctagaatgggagctgaaggcggtgccctctcaacagcagggcatttgcaaagaagaaccggcccaggagcccatcatggagcggcccctcggcggggcgcaggcgtgggggcgccaggcaggtgctctgcagaggagtcaggctgcgccctgggcgcccgcacctgccatggtctgggacgtccctgtagaggaattccccctcaggtgtcccctcttcgcccagcaacgcgttcccgaggggggacccttgctggacacacgcaagaacgtccaggccactgagggcagaaccaaggcccccgcgagactgtgtgcaggggaaaacgcctccacgccaagtgagccagaaaagttcccccaggtgcgccggcagcgcggggcgggcgccggggagggcgagttcgtgtgcggcgagtgcgggaaggcgttccgccagagctcctccctcacgctgcaccggcgctggcacagccgggagaaggcttacaagtgcgatgaatgcggcaaggccttcacctggagcaccaaccttctggagcaccggcgcatccacaccggcgagaagcccttcttctgcggcgagtgcgggaaggccttcagctgccactcgtccctcaacgtgcaccagcgcatccacacgggcgagcggccctacaagtgcagcgcctgcgagaaggccttcagctgcagctcgctgctcagcatgcacctgcgggtgcacaccggcgagaagccctaccggtgcggcgagtgcggcaaggccttcaaccagcgtacacacctcacacgccaccaccgcatccacacgggcgagaagccctaccagtgcggctcctgcggcaaggccttcacctgccactcatccctcaccgtgcatgagaagatccacagcggggacaagccgttcaagtgcagcgactgcgagaaggccttcaacagccgctcgcgcctcaccctccaccagaggacgcacacgggcgagaagcccttcaagtgcgccgactgcgggaagggcttcagctgccacgcgtacctgctcgtgcaccggcgcatccacagcggcgagaagcccttcaagtgcaacgagtgcggcaaagccttcagctcccacgcctacctcatcgtgcaccggcgcatccacacaggcgagaagcccttcgactgcagccagtgttggaaggccttcagctgccactcgtccctcatcgtgcaccagcgcatccacaccggtgagaagccctacaagtgcagcgagtgcggcagagccttcagccagaaccactgtctcattaaacatcagaaaatccactccggggagaagtcgtttaagtgtgagaaatgtggggagatgttcaactggagctcgcacctcactgagcaccagaggctgcacagcgaggggaagcccttggccatccagttcaacaaacacctgctcagcacatactacgtgcctggcagcctgctgggtgcaggggatgctggactgagggacgtggatcccatcgacgcgctggatgtggcaaagctcttgtgcgtggttccccccagagctggcaggaatttctccctggggagcaaacctcgaaactaa

SEQ ID NO: 203693 - DNA, 3744 bp, Homo sapiens
  Payload ID: 20169
  Gene Name: zinc finger protein 74
  ENST ID: ENST00000437275
  CDS Start-End: 227-436
ggtgtggggagtgggtatctgcggagccggcctgaaccccacctcagccgggcgcggggagggggctccgtgcgtgtgatcgtgcagctgtgagcgcgtggccgccccgcggggctccgctgcaggcccctcagccccaggagcagtactcgctcttcagggcctgccctggatcctggaggctacacagctgcccactcctcctggggaggctgccgtggaggccatggagatccctgccccggagcccgagaagacagctctttcctctcaggatcctgctctttccctgaaagagaatctcgaggatatatcgggttggggtcttcccgaagccaggtccaagagtttggctcttgtcacccaggctggagtgcagtggcgcaatcttggctcactgcaacctccacctcttgggttcaagcaattctcctgacctcaggaatcggtgagtttcaaggatgtggctgtggacttcacccaggaggagtggggtcaactagactcccctcagagggccttgtaccgggatgtgatgttggagaactaccagaaccttcttgccctaggacctccactgcacaagccagatgtgatctctcatctggaacgaggcgaggagccatggagcatgcagagggaagtccccagagggccctgtccagaatgggagctgaaggcggtgccctctcaacagcagggcatttgcaaagaagaaccggcccaggagcccatcatggagcggcccctcggcggggcgcaggcgtgggggcgccaggcaggtgctctgcagaggagtcaggctgcgccctgggcgcccgcacctgccatggtctgggacgtccctgtagaggaattccccctcaggtgtcccctcttcgcccagcaacgcgttcccgaggggggacccttgctggacacacgcaagaacgtccaggccactgagggcagaaccaaggcccccgcgagactgtgtgcaggggaaaacgcctccacgccaagtgagccagaaaagttcccccaggtgcgccggcagcgcggggcgggcgccggggagggcgagttcgtgtgcggcgagtgcgggaaggcgttccgccagagctcctccctcacgctgcaccggcgctggcacagccgggagaaggcttacaagtgcgatgaatgcggcaaggccttcacctggagcaccaaccttctggagcaccggcgcatccacaccggcgagaagcccttcttctgcggcgagtgcgggaaggccttcagctgccactcgtccctcaacgtgcaccagcgcatccacacgggcgagcggccctacaagtgcagcgcctgcgagaaggccttcagctgcagctcgctgctcagcatgcacctgcgggtgcacaccggcgagaagccctaccggtgcggcgagtgcggcaaggccttcaaccagcgtacacacctcacacgccaccaccgcatccacacgggcgagaagccctaccagtgcggctcctgcggcaaggccttcacctgccactcatccctcaccgtgcatgagaagatccacagcggggacaagccgttcaagtgcagcgactgcgagaaggccttcaacagccgctcgcgcctcaccctccaccagaggacgcacacgggcgagaagcccttcaagtgcgccgactgcgggaagggcttcagctgccacgcgtacctgctcgtgcaccggcgcatccacagcggcgagaagcccttcaagtgcaacgagtgcggcaaagccttcagctcccacgcctacctcatcgtgcaccggcgcatccacacaggcgagaagcccttcgactgcagccagtgttggaaggccttcagctgccactcgtccctcatcgtgcaccagcgcatccacaccggtgagaagccctacaagtgcagcgagtgcggcagagccttcagccagaaccactgtctcattaaacatcagaaaatccactccggggagaagtcgtttaagtgtgagaaatgtggggagatgttcaactggagctcgcacctcactgagcaccagaggctgcacagcgaggggaagcccttggccatccagttcaacaaacacctgctcagcacatactacgtgcctggcagcctgctgggtgcaggggatgctggactgagggacgtggatcccatcgacgcgctggatgtggcaaagctcttgtgcgtggttccccccagagctggcaggaatttctccctggggagcaaacctcgaaactaacatgatgtgctttggtgtcagtagctgctttctgagctactcaacaaggaaagcaccctggtcctccctggctcctagatccagaccaccttcctccaggtgtgggagccttgccttatcacccccatcaggtctgcatgccagggtgcctcctctagttaaagtcagtcacctccccagaagggccacactccaggaggagtgttgagagtcatttgaggtagtcttgccacctgttttccttgatgggcctggaagttgttgacaaggggaaagatctttcttgccaataaaaagaagggatatcgttgggtgccatggctcacacctgtaatcttaacactgtgggaggccaaggcaaggggatcacttgagcccaggagtctaggaccagcctggacaacatggtgagacctcgtctctacaaaaaatgcaaaaattagccagatgtggcggcatgtccctgtggtcccagctactcaggaggctgaggtgggaggatcatttgagcctaggaggtcaaggctgcagtgagccatgattcacagcactgcactgcagcctgggtgacaaagcaagaccctgtgtgaaattaaaaggaggtatatcaactgttgtatcctcggacgggctcctgacacggctttaatcaggagtttcctccataaactattattttcagaataataataaaacaagaattatgactagcatcactttccagtgaacattattatattgctagagaggagaataatcttgggtggtgggcatttggaaaaagtgaatttcctggacttaactcatgtaaatagctctactgcagagctgtgtgtttagtgacagtgcagtcaggggcattcccacagctgtcacagcacggcccagcatcattgtagccagatcctaacatgccaacatcacctcttgccatttagcccctagtgagaaattgggagctaccaggcaggtgcccagtgcattcagggaagatgggcacaacatcaggatgggtgtgtctggaagctcctcttcactgaccagggctgggcagggccaccctgggctggtgaggctgccctgcagggcttctcactatgtagcaccagtcaccagcccaggtcacagaagaagcccctcccagcacccactggagaggggaagctgaagcccagggagacgggctccatggtggtcccacatggagctgttttgcaaaccctggaaaaggcggctctccctgtcccaacactcttcagagacaggaagacagagttaatcttgaatgaatgttatttctacttagtcctaagcaagaataagctgccctcttggtgatcatactttatacggagtgctatcgtttatgaaatgctttcagtatgctttttaaattatgcaggcaaaataaccacacttcagaaaatgtggacttctgaaaaataaaatccccataattcttaataaaactgccttttgcactttga

SEQ ID NO: 203694 - DNA, 591 bp, Homo sapiens
  Payload ID: 20169
  Gene Name: zinc finger protein 74
  ENST ID: ENST00000420626
  CDS Start-End: 441-591
cttttgtgggagtccggtctgtccacttgccggtccctcagaccgtcggcggtctctgtccgcttcgggacctgtccgctggtcgctccgcgtccgatggctcctggccgcggaaccttaggcctggccctggtctccgagcgcgggttcgccgggaggagcgtgtggcgggggtgtgccggggcgtgagtgcgccgagcatggggctgagcctggtgtggggagtgggtatctgcggagccggcctgaaccccacctcagccgggcgcggggagggggctccgtgcgtgtgatcgtgcagctgtgagcgcgtggccgccccgcggggctccgctgcaggcccctcagccccaggagcagtactcgctcttcagggcctgccctggatcctggaggctacacagctgcccactcctcctggggaggctgccgtggaggccatggagatccctgccccggagcccgagaagacagaatgggagctgaaggcggtgccctctcaacagcagggcatttgcaaagaagaaccggcccaggagcccatcatggagcggcccctcggcggggcgcaggcgtgggggcgccaggcag

SEQ ID NO: 203695 - DNA, 3714 bp, Homo sapiens
  Payload ID: 20169
  Gene Name: zinc finger protein 74
  Uniprot ID: Q16587
  ENST ID: ENST00000611540
  CDS Start-End: 287-2221
gtagtttgcgcctatttcgcgcaggcgcgctttcccgcagcggccgcctgctgctctttgtggcagtcgcagtccttttgtgggagtccggtctgtccacttgccggtccctcagaccgtcggcggtctctgtccgcttcgggacctgtccgctggtcgctccgcgtccgatggctcctggccgcggaaccttaggcctggccctggtctccgagcgcggggcctgccctggatcctggaggctacacagctgcccactcctcctggggaggctgccgtggaggccatggagatccctgccccggagcccgagaagacagctctttcctctcaggatcctgctctttccctgaaagagaatctcgaggatatatcgggttggggtcttcccgaagccaggtccaaggaatcggtgagtttcaaggatgtggctgtggacttcacccaggaggagtggggtcaactagactcccctcagagggccttgtaccgggatgtgatgttggagaactaccagaaccttcttgccctaggacctccactgcacaagccagatgtgatctctcatctggaacgaggcgaggagccatggagcatgcagagggaagtccccagagggccctgtccagaatgggagctgaaggcggtgccctctcaacagcagggcatttgcaaagaagaaccggcccaggagcccatcatggagcggcccctcggcggggcgcaggcgtgggggcgccaggcaggtgctctgcagaggagtcaggctgcgccctgggcgcccgcacctgccatggtctgggacgtccctgtagaggaattccccctcaggtgtcccctcttcgcccagcaacgcgttcccgaggggggacccttgctggacacacgcaagaacgtccaggccactgagggcagaaccaaggcccccgcgagactgtgtgcaggggaaaacgcctccacgccaagtgagccagaaaagttcccccaggtgcgccggcagcgcggggcgggcgccggggagggcgagttcgtgtgcggcgagtgcgggaaggcgttccgccagagctcctccctcacgctgcaccggcgctggcacagccgggagaaggcttacaagtgcgatgaatgcggcaaggccttcacctggagcaccaaccttctggagcaccggcgcatccacaccggcgagaagcccttcttctgcggcgagtgcgggaaggccttcagctgccactcgtccctcaacgtgcaccagcgcatccacacgggcgagcggccctacaagtgcagcgcctgcgagaaggccttcagctgcagctcgctgctcagcatgcacctgcgggtgcacaccggcgagaagccctaccggtgcggcgagtgcggcaaggccttcaaccagcgtacacacctcacacgccaccaccgcatccacacgggcgagaagccctaccagtgcggctcctgcggcaaggccttcacctgccactcatccctcaccgtgcatgagaagatccacagcggggacaagccgttcaagtgcagcgactgcgagaaggccttcaacagccgctcgcgcctcaccctccaccagaggacgcacacgggcgagaagcccttcaagtgcgccgactgcgggaagggcttcagctgccacgcgtacctgctcgtgcaccggcgcatccacagcggcgagaagcccttcaagtgcaacgagtgcggcaaagccttcagctcccacgcctacctcatcgtgcaccggcgcatccacacaggcgagaagcccttcgactgcagccagtgttggaaggccttcagctgccactcgtccctcatcgtgcaccagcgcatccacaccggtgagaagccctacaagtgcagcgagtgcggcagagccttcagccagaaccactgtctcattaaacatcagaaaatccactccggggagaagtcgtttaagtgtgagaaatgtggggagatgttcaactggagctcgcacctcactgagcaccagaggctgcacagcgaggggaagcccttggccatccagttcaacaaacacctgctcagcacatactacgtgcctggcagcctgctgggtgcaggggatgctggactgagggacgtggatcccatcgacgcgctggatgtggcaaagctcttgtgcgtggttccccccagagctggcaggaatttctccctggggagcaaacctcgaaactaacatgatgtgctttggtgtcagtagctgctttctgagctactcaacaaggaaagcaccctggtcctccctggctcctagatccagaccaccttcctccaggtgtgggagccttgccttatcacccccatcaggtctgcatgccagggtgcctcctctagttaaagtcagtcacctccccagaagggccacactccaggaggagtgttgagagtcatttgaggtagtcttgccacctgttttccttgatgggcctggaagttgttgacaaggggaaagatctttcttgccaataaaaagaagggatatcgttgggtgccatggctcacacctgtaatcttaacactgtgggaggccaaggcaaggggatcacttgagcccaggagtctaggaccagcctggacaacatggtgagacctcgtctctacaaaaaatgcaaaaattagccagatgtggcggcatgtccctgtggtcccagctactcaggaggctgaggtgggaggatcatttgagcctaggaggtcaaggctgcagtgagccatgattcacagcactgcactgcagcctgggtgacaaagcaagaccctgtgtgaaattaaaaggaggtatatcaactgttgtatcctcggacgggctcctgacacggctttaatcaggagtttcctccataaactattattttcagaataataataaaacaagaattatgactagcatcactttccagtgaacattattatattgctagagaggagaataatcttgggtggtgggcatttggaaaaagtgaatttcctggacttaactcatgtaaatagctctactgcagagctgtgtgtttagtgacagtgcagtcaggggcattcccacagctgtcacagcacggcccagcatcattgtagccagatcctaacatgccaacatcacctcttgccatttagcccctagtgagaaattgggagctaccaggcaggtgcccagtgcattcagggaagatgggcacaacatcaggatgggtgtgtctggaagctcctcttcactgaccagggctgggcagggccaccctgggctggtgaggctgccctgcagggcttctcactatgtagcaccagtcaccagcccaggtcacagaagaagcccctcccagcacccactggagaggggaagctgaagcccagggagacgggctccatggtggtcccacatggagctgttttgcaaaccctggaaaaggcggctctccctgtcccaacactcttcagagacaggaagacagagttaatcttgaatgaatgttatttctacttagtcctaagcaagaataagctgccctcttggtgatcatactttatacggagtgctatcgtttatgaaatgctttcagtatgctttttaaattatgcaggcaaaataaccacacttcagaaaatgtggacttctgaaaaataaaatccccataattcttaataaaactgccttttgcactttgatacatt

SEQ ID NO: 203696 - DNA, 8578 bp, Homo sapiens
  Payload ID: 20170
  Gene Name: zinc finger protein 740
  Uniprot ID: Q8NDX6
  ENST ID: ENST00000416904
  CDS Start-End: 446-1027
aaacgggccggggttggtgtttgtaaacttgcctcggtcccggtgggggcagccgcggcggtggggttggcagggtgtgctggggcctggaggaggcgccgcgcggccagggagccagcgggaggccgcgcctggcaggtttctgaaacagatcgtgagcttcatcaagagaattcaactggaaaaccaagactggtagactctctttttcttcagacaataggcaggagccaggcagagtccagggattcttggaacacctatcttttcttcggaggacactaagttctatttgaagacaaagttcaatatggcaacaggactgatgggacacgaaggagtcgctaccgtgatttggtgacagttcttcaaaacgacagtgtctcaaggaaaggtggacctaggaactcctgaacttttgggttgccttaagtgagaaatcagcatggctcaggcaagtctcctggcttgtgaaggcctagcaggtgtgagtttggttcccactgcagccagcaagaagatgatgctgagccagattgccagcaagcaggccgagaatggcgagcgggcaggtagccctgatgtgctgaggtgctcgagtcagggtcaccgaaaagacagtgataagtcccggagccgcaaagatgatgacagcttgtctgaggcctctcattcaaaaaagactgttaaaaaggtggtggtagtggaacaaaatggttcttttcaagtaaagattcccaaaaattttgtttgtgaacactgctttggagcctttcggagcagttaccacctaaagaggcacatccttattcacactggtgagaagccatttgaatgcgatatatgtgatatgcgtttcatccagaagtaccacctggaacgccacaagcgtgtgcacagtggtgaaaagccttaccagtgtgaacggtgtcatcagtgtttttctcggacagatcgattactcagacacaaacggatgtgccaagggtgccagtccaagacttccgacgggcagttttctctataggcgcaaggggccccgggtggtgggagtgatcagaagaacctgccgaagagcacaccccctctggtctgatggtcccaccaccgccccatgtgaacctgtcccactcctggaggagtggacccaggagaccagaagagtgcatcaggggacagtggccccagaacctcagctctgtaaataatctgagactatgagtatctcggggaagttcttacagcattcctgggtaggggagctagtccctggacccttggctgaggtcataggtggggactcaaggtacaggaccaagactgaagtgtggctcccacaaccttggactccagctggcagctgaaatggaaaagattggggaaggggatttgtttgttctgttcttgtttttgtttatccaaaagcaacttcagcgggtaaactgtggatacaggtaatccagaggcataagagtcctggtccaaagtagggactatagctggtccagctctccccaaaaattgggtttttagttgcagtagctcctcagtgtttcacaatcctgcacttcgcctcctttttgaggaagaataaggtcaggaatggcagctgagcttactttggcttccttatacactgtagggacaaaaggaaaaacggggtggagcagacaagggctggatccaaaaagtggatggcacctcttccttcctcaagggaaaaggaagagttgtgccagtgggtgttgtcatggcccatgtcacattggcacctgatggcatcagctcaaatgcctttaggaggaaacttgggtgagagtggcccatgaagcccttttcttctttttttggggagtcggtcttggagatggtatgtggctacctcgctgccattgactcctaaagtgagacagatgtgttgagcaaggagtcatggaagtcaaagtgggttctctctccttgtgccctcttaggaacaacccaagactggtcccaagttggctaacagctgctcaagaaacaaaggaatctggggtcttctgacatgcctgttgagcagtaggagctgttctccctccccaagtcctatcactgtattcaggtagaggaggtagggaggggtctgtcctttggtcccaaaaaacaagatctcggcttgcttcctgatggccatccctacccaacagagtgtgggggatgggggtgggggtgctgcagagaaaagactaaagaagaaacctaatgtaggttccattcttaaccatattctttgctcctctctgctccaataccaccaccttgtccactcccaaaaaagtaatcgggtgtgtgtgtgtgtgtgagagagagtgtgtgtgagatatgaatgcatgtatttgtatgcttgcaggagatggcatattattgagccaaacccttctctggccctcaccttcagggaggatgagtggaaaatagcctcctcttgcccaaacatgaagggtgcttgaggtctcagcaggagctgaagaacacaatttggggaacagaagggcttttgttttggagggtttttttttttaagatgaattcaacagcctggtggttaggatgtttctaacccaagccagggcttgtgaacatgaattttctaaggtgaaataaaccttttctttctgctaaagaaagaatccttatgggaagttttggggtttggttgacccccactgtaacctgacctgacctgtggcgggtacgggaactgtcttagtaatcatggagactggctgaacctgagtgccaagctgtcagtagggtctgagatgggaaactcctgaaagtatgatttcatttcccagaaaatgtaaagaatggataccagcaatgattcctggctgttacctattctggaggggtggggttggggagggggttgtccatacctctgtggtatgagtatttcagggaaaaagaaagcaggcatggcacccattcgattttccctgacagcatctgagatccttttggggagacgctgaggagtgtttgctgccatgtactcttacagctctatgctgacactcccatttgatgtggtccagaacttagacctcagtccttggatcagccctgtggtccctgcaagcaggggcatctttctgcatgtgagccagcccccttcctgttcaagggttctgctggatctgggcttttcctgtccttcacttctgggatgattcaccccacatcttccagtaccctgtaaaccattttaaaatatttagaaaactatcctcccaaaaatgcttttgaaaatgagagccctctgtccctgccacttacagctagtctctttgggataggggtgtatgtggagagattcatgtaagtctcacatgagtgacctgtgcccctatgtgtactaatgtgtgtactgggtcagaaggtgccctgggttcccacagaccttggtttcctgcctgggtgggtgggagggagggaacttcagagagtatgtgcgaacagccatagcagagccacccctgccaaggacccagtgagggaaactcaggagcaggtggttggttcagttcccgcgctgatgtctggggcagtgcatgtgtgagaagagaggcgcaaagcagtgaaaggagtgatttggcatccagagggcccgggagccccacggataccccagggaagccactgactcacaccgctgcagaggctcctgggcccaatgcccgacccctgctggccagcatggggcctagcactggaagatgcctcaggtgtgtttggagtgggggaaacggaagtagggcacgctctcagagaccaggatagagagtcagggaacctgggaaagagtagtgccagttccgggtaggctgctgcaccaggccctaccagctcaggctataaacagtctgctttgccccaagtcttttccgtccacccccaacagccttgtcatcacttagctactgatcacgcccatggcttgacattggagggttacattagtggagtccgccacagcttcgaaccctctccccagatgccctttgcctctgctgtggccctggggttttatcaactgtccccttcctatcctcctctccaccctgttttttgttttttttttttttaaataatattttgctatgggggaggggaatatcaaatggacaagatcacttttaaatggtagtttttataagatgttataaacttgtatctttttaccattaaagtgcagtgtatgttccttcgtgatatatttaggatatttaaataaaaggaaaatggggcttttctacatactatctcctctttggggaagctttttcatactggttttagttgttttccttttttctccctacataatcaccccacaacttccagcaccctataagccattttaaaaccccttctccacagaggaacaagcaagtaggagcaaaaacagggcatcagttctgagcaagacgaaaaagcacacgcagcaggacggaaggaggctagacaccaacagatgcagtgtctctgacctgggacccccctgcatccgcagcacttgagaattcataggccctttccagacctggcttcctgggtcccagggtgcaccccgggagtttcctgcacattcgcgcttgggcacctctccctgccctcaggtggcaagaggaggatggacaagagctttcccgaggcccaggctataaacagtctgctttggccttgatgaggtaaagcaaagtgacagctgtggtctgaggtaagactttattgtatacttgggtggggtagcccagatggatgcaaggttgcaggcatgggaagcagccctcttgggtgtcactctgaaaatgaagtagggtggtggccgcacctcgccagtgaattagtcccctaccaaggtcttacagacccacccttcctctcaccctccagttcccactgtcctccaaggagaagagccttgggtaagtgtccctccctccttcagagagtgggactgtctgcctcttgaaagcgaggattgatggtggtcgtgatggcacttttgtagagaggattactgtcctggagaaagatgttgcagattataagcaaaaatcccaggattcctcgtcccctttctagacctaagaggccagccttgagccgaatcctaggagctgatggaagttagcagaggggttggttacatgtgccaggggctgggggaacccagtgggaggaatcagggctggtcttgtggtgggggaacagctaaaaaggggcctaaccaggaagtctcctcacctgcttccagttgagttgttgctgctccttctcaaagcgactgtattcccggcggtcatagatttccaccgagagccggtaagccaggaccagccccagccccactgccacgatgccccctacgcagcccagcacaatggcctgcgtgtggtctgctccctctgtgaacaagaaaccagacacacttgtgggagctggagcatagggacagatcatcagttgctcacagtgtgtccagcctgtccaaccctgtctgtcactgaaagcaaagggaacccagggaggtccaaggttatcctcaccgcccagggccttagcctcgtccacttgctcaattgcctctgcctttgtcctggattcacagttctgcttcagcccccagcctgtttcccattatcttcactctgcatccccagagttgagaccctgcccatcaaacttccagggtttgtggcatccctgcccacttactttcttggggtctcactctgagcacgaccgtgcctctggcgtcatcctccaccaagaagaagaacagctggttgtccagggtccgctctttgcaccagccatcatccaagataggggccaaggccagggtcacattggtatgggcacaagctgtactgcagttggtggccagtgggccagtcctgaaggccccacactctgcacagtccctgtgtagtagatgccaataggttaccagctgggcagttgtcacccaatgccccttgcccaactacaagcaggacggagagtaggcagatgggagtagctcaacaagccccactgtgcccctgctcccaagatgcaagacctgaggcctcaccggtgtctctcgcatggtgtcttgcagcctgggcattggtcgcatagagcaccatagtagccgtccaagcactggcagcggttgcatttgcagcgtccatgcccactgcagagccctccctcgggactgatgcaactgtccatgtccccactgcattcgcatgctctgcccgtgcggttggcatgacagtgacatactccacattggcagcgaccaaagcctggggtagagccatgcagagggtgacaaccatactccacacacacagttggccatcatgtggcacgacaagcccacgcatccaatctttttgaagtatgccaaccacaccctctaacccatacaccggaatcttttgatatttgccttccatgccaggagattcccagagcctaagtgccttgggaaggcctctcagaccccgcccttctccccaaggctccaggtacctccgcagaggatgccctcatgtcgctcacagctggcatcgtcacactcgcacagatgcccagagctctgtccactgcagctgcagcgtccacattgacagtgaccctttccactgcacaggggccctgtgccattgggagcccggcacccagattccaggtctggggaggacagctctgccacagagcactcacagagccgacctaggcggccaggggcacagctggaaggggaaggcaaaggagagaagtaggtcagagggtttgatcacccctgacttgtctctcccaggaacctctaaacccaagttctcaaaagagttggagacagacaaacagctgaaaggatgttaagtatagtgaaacactgaggggtgagagagtggagggagccccagtcagggggagggcctggacatacatgggaagcttcaagggatgaaactgagtggggagtcgggatgtcgaggagactcctgtgggggggatggaaagcagcggaggaatacgggccagggttggttggttgttgggagccaggtggttgaagggaagaggaggccctcacctgcatacaccacattgtaggtgtccctggccatcactgcagtggggagcctggggctgggtgtcactgcaattacagtcacacagcgtgtgcaactccacaatcagctcctctgagaagccaagggcccggagcctcaggagatggggctctgggaggcagtgggtggcttggagagaaacccagaaagtcacctgagaagaggcaggaatcaggccatggttatacacatgcacacacacataccccaaactcaccaatcatccagaacctcaccccttagtaaatgaagggatggggtcatgttaacacccaactcctagaaacatgcctgaggaagccactcagactgctccaggaaggatggatggaggactacctcaggctctcatgtcactccctgtacctgccacccatcttttcctgcctgcttaatttcccactcccacctccccctgcccgccttctgcctgtgcttgctggctctcaccgtctggttgattcggacgtggttgcactgtcctcgatcctcagccttaccctccctcttctcaggaccctcacactgggattcgtaagaaatgtggaccccaggagggagtgaagagtgttcaagggtcacggtggaagacaggctctatgggaagagagcgagtggataaccacgtgaaggcagaaaaggactccaaccccaccttatgtcctctccaggtgttcccaattctgccagcaccctgccctctgccacctggggctccttccattctgcccagtcgaggcatttctggagggaggacccgtgagaaccttgcatagaacatacaggatccagaggcctctaatacagcatttcagtgcagctgccagcaagggccactgagggtcacaggctggccaggtgctgtaaatgtacagagaccatgtttgtgaagccccacatcaggacacataacctgggtgcatgccaggtctaaagggcagattcattacagagtttatcttgggaaatttgatactgtctcagattttcttgccataggtttaggagatgctccctgttatcaagaagcctacagcctagttgcagaggtaagacctaaaccactaagaatttttatggttccttctacctgtaaaattctatggttcttgtgaagaatagctctgaattatttataaacttagtgaaagcaggctccagatctcacattgtttatgtacagactgactggggacaaatgccagcccttctgtttgttatctttgtgaccttggacaagtcacttagcctccttgtgtgggtttcctcatctgtaaaatagggatggtaacagttatgaagcaaggcttttggcagggttaaatgaagtagcaaacagtatgtacacctaggatggtgggcgcatgaaataaaagctcagtgattgaaacttt

SEQ ID NO: 203697 - DNA, 3806 bp, Homo sapiens
  Payload ID: 20171
  Gene Name: zinc finger protein 746
  Uniprot ID: Q6NUN9
  ENST ID: ENST00000340622
  CDS Start-End: 282-2216
gtggggctgtgcggccgcgctgcctccaggaagcctcacgggccttcgtctgccgggccgcggcgccggctcccaggatgcagtgtggaccggccgggcgctgacggaggcggcgcgactgcgggcggcgcggcgcaggggcagccagcgaggagcggcggcagaggaaaggccaggcaggcgccgcctgcggagagcaccgggcggccgggcctgcgtggtgccgcgcgcggcggcggcgacgacgacttcctccgggccgggcgggacagcgcagggccatggccgaggcggtcgcggctccgatttctccgtggacgatggcagccacgattcaggccatggagaggaagattgaatcgcaggctgctcgcctgctttccctagaaggtcgaaccgggatggccgagaagaagctggctgattgcgagaagacagccgtggagttcgggaaccagctggagggcaagtgggccgtgctggggaccctgctgcaggagtacgggctgctgcagaggcggctggagaacgtggagaacctgctgcgcaacaggaacttctggatcctgcggctgcccccgggcagcaagggggagtcccctaaggagtggggcaagctggaggactggcagaaggagctctacaagcacgtgatgaggggcaactacgagacgctggtctccctggactacgccatctccaagcccgaggtcctctcccagattgaacaagggaaggagccctgcaactggcgccgccctggccccaagattccagatgttcctgtggaccccagtccaggctcggggcccccagttcccgccccagacctcttgatgcagatcaagcaggagggtgagctccagctccaggagcagcaggccctgggcgtggaggcgtgggcagccgggcagccagatattggggaggagccctggggcctcagccagctggattccggagcaggagacatctccacggatgccacctctggtgtccattccaacttttccaccaccatcccgcccacctcctggcaaacggatctccctccccaccatccctcttcagcatgctcggacgggaccctgaagctcaacacagcagcctccacggaagatgtaaaaattgtaataaaaacagaagtccaggaagaggaggtggtggccacacccgtacatcctactgacctagaggctcacgggaccctgtttggaccaggccaagccacacggttcttccctagtcctgcccaggaaggagcctgggaaagccagggcagctccttccccagccaggaccctgtgctggggctgcgagagcccgcccggcctgagagggacatgggtgagctcagtcctgctgtggcccaggaggagacccctcctggggactggctcttcggaggggtccggtggggctggaatttccggtgtaaaccgccagtgggcctgaacccgaggacggggcccgaggggcttccttactcctccccggacaacggagaggccatcttggaccccagccaggccccaaggccattcaacgaaccctgtaaataccctggccggaccaaaggctttggccacaagccagggctgaagaagcaccccgcggcgccccccgggggccggcccttcacctgcgccacgtgtgggaagagcttccagctgcaagtcagcctgagcgcgcaccagcgcagctgtggggcgcccgacgggtcgggcccgggcacaggcggtggcggcagcggcagtggcggcggcggtggcggcagcggtgggggcagcgcacgggatggcagcgcccttcggtgtggggagtgcggccgttgcttcacgcgccccgcgcacctcatccgccatcgcatgctgcacaccggcgagcggcccttcccctgcaccgagtgtgagaagcgcttcaccgaacgctccaagctcatcgaccactaccgaacgcacacgggcgtgcggcccttcacctgcaccgtctgcggcaaaagcttcatccgcaaggaccacctccgcaagcaccagcgcaaccatgcagcgggcgccaagaccccggcccgaggccagccactcccgacgccgcccgcacctcctgatcccttcaagagccccgcctccaaaggacctttggcctccacagaccttgtgaccgactggacttgtggcctcagcgtcctgggacccaccgatggcggggacatgtgagcgcctccagccccatagcccctgccggccgcacgtgtaaaaagccccgtgtgcaggcagcagggcggcgtggaagcttcaggcagacgcgggacggggagaaccaaatgtccaagttgctgaactgatgatcactggagaaagagaaactatccaccaggacagctgccacctctaaaccaagtagaattctctgtgaaatgggagcgccgtagaattttaagtaatttaattgcaaacctgttttgttttttgttttttgtttttttttaattcttgaggaaaaagctggaaaatagtaatagggctatttaaattttgtaggtacttttggttttcagggcgtgcatttctgtcactatctcactgagtctgatagtgtgttggaaggttggccagttggggacccctggcccactgactcctggggatggggtcctgtgtgtgcccctgctctgcccagttgggctgagtgggcctagcgcaccaagcccctgggcagtgagggccattgggtcccttggagcacacctcagtgcagcaggaaggacccctccgggagtagcggttgcatttcccagcttgcctctcctgaaaaggccccccaaaagtgctggccccaacttttctctattttgggccatctgtggtacccgtcccaagggcacttggtggtgtcccctagtgtgtgactccctggcctcataaggacgagttgtctgaaatcccagcgttaggtctggggagatggagaagctgaaactggggagctgcaccacaaacgtctagctctcagcagagctgggagcaaagcctggccgcccaccccaacctggggctgcctcccactccgtgagatgcttctgtctcctgttcactttgtgtggtagtttcttattttcaaaatgcatctcatttgatcattactgtgaccttgggaagcagcaggacagggatttctttttagaggtgcaaactgctcagaggggacacacctcagcctctcactgtgggtacacgtggcgtgccatgagtggggaagagcaacaggcgagatgcctcattctactggaacatcactgtgggtgaacagagatttccaggttttccctcttaaaatatttgtcccacaccgacaagagtccagtcaccaggcctcaaaggaacttctgcttgtagcagccgcctcccctgtgccccagcctccttaatgtgtgcactctcagagggcacagctcgcgaggctgggtttgggggccaagtggcttgttcattccagcatctaacatcataaaggtgggcccagatttcttgattcgaccacagtgctgttcctaccacacaaatatccattcctgttttgttgaagcagccactggtcctcttgtttcccctgcagacggagggacctggcagtgcccattcattcagccccctcatgcatacttttattaggcgatagactagttaagaaaattgtttctatgtactgtatattttgtacctgtttacacttctaatattgatataactgatattttgaaaaataagagaaaacatcctgttaaaataaaacctaaccagcaccaa

SEQ ID NO: 203698 - DNA, 3797 bp, Homo sapiens
  Payload ID: 20171
  Gene Name: zinc finger protein 746
  Uniprot ID: Q6NUN9
  ENST ID: ENST00000458143
  CDS Start-End: 272-2209
gcggccgcgctgcctccaggaagcctcacgggccttcgtctgccgggccgcggcgccggctcccaggatgcagtgtggaccggccgggcgctgacggaggcggcgcgactgcgggcggcgcggcgcaggggcagccagcgaggagcggcggcagaggaaaggccaggcaggcgccgcctgcggagagcaccgggcggccgggcctgcgtggtgccgcgcgcggcggcggcgacgacgacttcctccgggccgggcgggacagcgcagggccatggccgaggcggtcgcggctccgatttctccgtggacgatggcagccacgattcaggccatggagaggaagattgaatcgcaggctgctcgcctgctttccctagaaggtcgaaccgggatggccgagaagaagctggctgattgcgagaagacagccgtggagttcgggaaccagctggagggcaagtgggccgtgctggggaccctgctgcaggagtacgggctgctgcagaggcggctggagaacgtggagaacctgctgcgcaacaggaacttctggatcctgcggctgcccccgggcagcaagggggagtcccctaaggagtggggcaagctggaggactggcagaaggagctctacaagcacgtgatgaggggcaactacgagacgctggtctccctggactacgccatctccaagcccgaggtcctctcccagattgaacaagggaaggagccctgcaactggcgccgccctggccccaagattccagatgttcctgtggaccccagtccaggctcggggcccccagttcccgccccagacctcttgatgcagatcaagcaggagggtgagctccagctccaggagcagcaggccctgggcgtggaggcgtgggcagccgggcagccagatattggggaggagccctggggcctcagccagctggattccggagcaggagacatctccacggatgccacctctggtgtccattccaacttttccaccaccatcccgcccacctcctggcaaacggatctccctccccaccatccctcttcagcatgctcggacgggaccctgaagctcaacacagcagcctccacggaagcagatgtaaaaattgtaataaaaacagaagtccaggaagaggaggtggtggccacacccgtacatcctactgacctagaggctcacgggaccctgtttggaccaggccaagccacacggttcttccctagtcctgcccaggaaggagcctgggaaagccagggcagctccttccccagccaggaccctgtgctggggctgcgagagcccgcccggcctgagagggacatgggtgagctcagtcctgctgtggcccaggaggagacccctcctggggactggctcttcggaggggtccggtggggctggaatttccggtgtaaaccgccagtgggcctgaacccgaggacggggcccgaggggcttccttactcctccccggacaacggagaggccatcttggaccccagccaggccccaaggccattcaacgaaccctgtaaataccctggccggaccaaaggctttggccacaagccagggctgaagaagcaccccgcggcgccccccgggggccggcccttcacctgcgccacgtgtgggaagagcttccagctgcaagtcagcctgagcgcgcaccagcgcagctgtggggcgcccgacgggtcgggcccgggcacaggcggtggcggcagcggcagtggcggcggcggtggcggcagcggtgggggcagcgcacgggatggcagcgcccttcggtgtggggagtgcggccgttgcttcacgcgccccgcgcacctcatccgccatcgcatgctgcacaccggcgagcggcccttcccctgcaccgagtgtgagaagcgcttcaccgaacgctccaagctcatcgaccactaccgaacgcacacgggcgtgcggcccttcacctgcaccgtctgcggcaaaagcttcatccgcaaggaccacctccgcaagcaccagcgcaaccatgcagcgggcgccaagaccccggcccgaggccagccactcccgacgccgcccgcacctcctgatcccttcaagagccccgcctccaaaggacctttggcctccacagaccttgtgaccgactggacttgtggcctcagcgtcctgggacccaccgatggcggggacatgtgagcgcctccagccccatagcccctgccggccgcacgtgtaaaaagccccgtgtgcaggcagcagggcggcgtggaagcttcaggcagacgcgggacggggagaaccaaatgtccaagttgctgaactgatgatcactggagaaagagaaactatccaccaggacagctgccacctctaaaccaagtagaattctctgtgaaatgggagcgccgtagaattttaagtaatttaattgcaaacctgttttgttttttgttttttgtttttttttaattcttgaggaaaaagctggaaaatagtaatagggctatttaaattttgtaggtacttttggttttcagggcgtgcatttctgtcactatctcactgagtctgatagtgtgttggaaggttggccagttggggacccctggcccactgactcctggggatggggtcctgtgtgtgcccctgctctgcccagttgggctgagtgggcctagcgcaccaagcccctgggcagtgagggccattgggtcccttggagcacacctcagtgcagcaggaaggacccctccgggagtagcggttgcatttcccagcttgcctctcctgaaaaggccccccaaaagtgctggccccaacttttctctattttgggccatctgtggtacccgtcccaagggcacttggtggtgtcccctagtgtgtgactccctggcctcataaggacgagttgtctgaaatcccagcgttaggtctggggagatggagaagctgaaactggggagctgcaccacaaacgtctagctctcagcagagctgggagcaaagcctggccgcccaccccaacctggggctgcctcccactccgtgagatgcttctgtctcctgttcactttgtgtggtagtttcttattttcaaaatgcatctcatttgatcattactgtgaccttgggaagcagcaggacagggatttctttttagaggtgcaaactgctcagaggggacacacctcagcctctcactgtgggtacacgtggcgtgccatgagtggggaagagcaacaggcgagatgcctcattctactggaacatcactgtgggtgaacagagatttccaggttttccctcttaaaatatttgtcccacaccgacaagagtccagtcaccaggcctcaaaggaacttctgcttgtagcagccgcctcccctgtgccccagcctccttaatgtgtgcactctcagagggcacagctcgcgaggctgggtttgggggccaagtggcttgttcattccagcatctaacatcataaaggtgggcccagatttcttgattcgaccacagtgctgttcctaccacacaaatatccattcctgttttgttgaagcagccactggtcctcttgtttcccctgcagacggagggacctggcagtgcccattcattcagccccctcatgcatacttttattaggcgatagactagttaagaaaattgtttctatgtactgtatattttgtacctgtttacacttctaatattgatataactgatattttgaaaaataagagaaaacatcctgttaaaataaaacctaaccagcacc

SEQ ID NO: 203699 - DNA, 5051 bp, Homo sapiens
  Payload ID: 20171
  Gene Name: zinc finger protein 746
  ENST ID: ENST00000461958
  CDS Start-End: 198-761
gtggaccggccgggcgctgacggaggcggcgcgactgcgggcggcgcggcgcaggggcagccagcgaggagcggcggcagaggaaaggccaggcaggcgccgcctgcggagagcaccgggcggccgggcctgcgtggtgccgcgcgcggcggcggcgacgacgacttcctccgggccgggcgggacagcgcagggccatggccgaggcggtcgcggctccgatttctccgtggacgatggcagccacgattcaggccatggagaggaagattgaatcgcaggctgctcgcctgctttccctagaaggtcgaaccgggatggccgagaagaagctggctgattgcgagaagacagccgtggagttcgggaaccagctggagggcaagtgggccgtgctggggaccctgctgcaggagtacgggctgctgcagaggcggctggagaacgtggagaacctgctgcgcaacaggaacttctggatcctgcggctgcccccgggcagcaagggggagtcccctaaggagtggggcaagctggaggactggcagaaggagctctacaagcacgtgatgaggggcaactacgagacgctggtctccctggactacgccatctccaagcccgaggtcctctcccagattgaacaagggaaggagccctgcaactggcgccgccctggccccaagattccagatgttcctgtggaccccagtccagatatcagcgtctcagatttccctggagccagtcagcacctttgaaagttaagggaaggacaggtggacacaggagaaaaaccaaattcctaaagtgaagacctgctgggtcatttgactagggagaccacatctctgcaaggctcgacccctgattcctccagaagacccgcccttgaccgtcccacctgccttggttttccctttcgtctgacactgagaaaggtggtggtccgcagaggccctcctgtgcgccacttgtgtgaaattaaatgcatcccccatgttcgtcatctcatctcagtcagatttgcactttcctaagggcagaagcatgttccgggctggccgctttgccagtcgtcatcgggacattgacagtttagctctacagatgcatttttaagaatcttctaggcgtcaaggacagtgctgaacactagaggacagaaagatggctgagaacagatactattgggctggaaaagagggttacaacccgtgcgcgtccccagcttcctagcctgggtgggaggttctgggtgggtgggtttcgttgtatttacaccatgtgtggaggcttccctcacttccacagcatcattcaatgagagtaaagaggggctggaaatacgctggttgctggtaagaccctgtaacactctctagctgcaccgtatgatgttcagcagcatccgtggcctctacccaccagtagacaagatgagtagacacaaactccactgtccatcctgagcctgttggcagggatctgtgtggcgtttatccctgtcccctttgtctgagaagccaggactcccagctcatcccttgccacatttggcctgacccatccccttgtgagacctcacctccccttctcctcacctcctgcacatccctccactgagccttgtgggactcagggctcagcagacccgccaggtcctgagtgttccctgctcggactgagctccaggggactgcagccctctgagtgcttgtcatcctcttccctgcctctgtcttgagcccaggcccactgggacagggtcctcacccctcagattgtgcctctgccagcctcaatccctctctagagaccttgcctttgggtcccaggccttgtctttttgctacttctgcagaccttccctctcttctcaacactcttcctgccctcagtcttggccatggcagcctccttgttgattgtcctgtgcccccccaacccatcccacagccatccgtgactgtgacgacagtgactttaccatacccaccatctccatctccagcacaccactccctggccgcctcctgccgtcccttcaattccgtctggtgtcctgattccagcagttttccagtccttcaagacctgcaagccatcgaccctgctgccttttcactgccctgactcatcctcatttccctccatgcccaccattgtggtccccccttacacacaccctcagcactcttgcccctgttttgttcattgtatccacttagtgaaatccatcggtgttctgcacctgcagccaagcagctgcacgtggctgcagagaaccaggtaagctggctgctggtgtcacgtgacattcatgaccagcgacttcagtgggcgctctgccacacagtcacaccgtgtctccttagcccaggggccagcaaactgtggctgagggccaaacctagctcatctgtttctgtatggtgcacagctgagaacagttttatattttaacccgttttttaaaagagaaacgcaccactcacacagccctctccacgccatctgcctgcaccagtgcccccttctctgccttcacttctgtgactgctaaactgtcaaccctccagccaaagccccacttcgatctggcaccagatcccacctcatgccatcttctcaagggcaatacaagcaatcctgccttgacctctaccccggcagccactgcccgcttgtctgttcccctttgtggcagagcccttggggacatctgcgcttgctgtctcctgcaccttcccccccactctgttaccccttccaccaaaacctctccaacctcggttaccagggccctccgtggtcctgaatggtctgtcttcttacttggccttgtcccctctactctgccacgtaggcccgtcatctcctgccagcccctctcctcctgccctgatcccccagtcttgcctcagcccagcagagtaatcccttttagacccaagtcctggctttccatctgacccgcaccgtcagctcaccacctccacttttctctcactctgcccagctgcagagtgctgttccctggtgctgttccctccgccctgtgccagggccttcgcagtgccctctactgggaatcctcctcaggcaggtcccacctgcaggcctttcgtgtcatcggcactgcaggccctccccacccaggactccaggcctactttcctgctttgggtcttccgtgttagacagtgtcacataatatatatgtttcctatttatagattcatcgtatgtcaggtctcctccattagaatgtcaatttcaaaagtataaaaatttttacctgtttaatcattttaggaacctagagtattgcctagtacagagtaggaattcaataactatttgctgaatgtatgctgtttcaaaatttaaaacgtgtgtgtgtgtgtgtgtgtgtgtgtgtgtgtgtgtgtgtgaaataatgtatttctgatagcatttaaattcctttttaggtctcccaggcctccctaggaattttctgtttattctttctatccacattttaaaacgtctgctgtgtactttggtagctgtaaacaatatataatacggttttttgtgttctgaaaaattacatagatgtcattatatttatcactcattattctgtatttcagacttatccatgttgatacatgtagatcaagttcattccttttaacagatgcttaatattccagaagcaactatattgtaacttattttccattcctccactgattggcacttaagctttttctgattgttcactctcacaagcaatactgtagtgagcgttcttgcgcctgtttttttgtggccctgtggggatgctgctccagggagtagacccagcggtggcctcaccacgtcgtaggcttgatttcatctcttccgttactgtatggccctccccaggggtacccagtgccagcgggtgctcctagaacttgcttcctaacgtctgcccagtttccataattacatttttgccgacctgatgggggtgagatggcctctcgtttcaacttgtattttcccccttaagttgcacgccctttttatacgattatttggctgcttctccagtgagttgtcttctgtttttctattgagatattcttcattttcttcttgattcagggcttctttgtatgtgttctagatacaaatcctttgtctattatttgtgttacaaacattttctccgtgtcggtggcaggtctttaacgttgtagttcttgtatggaagttttcactgttgaaagagtcaaacatgtcagtcttttcctttatgatctgtgctttttctgtagtgagatatccttgcttacctcactcaaggtcagaaagatactcttctctattttttttataaatttttaaaagttttgcttttcaaatttaagtctttaatttatctagaattaaaatttgtgtagcttgcaagggagggtttcagttttttctcccacaacgatggtctcattttccaacaaagtttgctgaatgtgttagcttttctccactgatttgtgatgcgattctgtcctgagctggtttctgcatgtgcacaagtctgtttctgggtgcttgcttctgtgtcattggtctctttgtcagtctctgcaccaacagcttgctcttttagcttcataataagccttgatatctagtagactaatccttctctgcttgttcttcaaaaaactgtcttggctattcttggatatttgttcttttatatgaattttgggatctgtatgtcaagttcctaagaaaatcctgttggaaatttgattggaattgcattgactttacagtctaatttctggagaattgctctcatgacaacattagcctttctactcattggaacactcatttattgaaggcttctatgtgcttgaataagattttacagttttcttctgatagttgtttttcattataaatgggatttttacagtttattagatgtattagttatttcaggtgtacaggtatgctgttgacttttgtttattaaaaaaaatcttgctctcatg

SEQ ID NO: 203700 - DNA, 3936 bp, Homo sapiens
  Payload ID: 20172
  Gene Name: zinc finger protein 747
  Uniprot ID: Q9BV97
  ENST ID: ENST00000252799
  CDS Start-End: 669-1244
aaaactaagctatgcccagaccaccttgggcacatgtcgtgaggacttcctgaggctgtcacgcgcgcgtcctcaaccttggcaagtaattgagatctgtctcggaatttctgggttcacactttttgctctcaacattgggaagaggctgctgtcgccgtttctgaggacaaaacgagacagtgatgggctgaagtccgattataaaaaggtccagagacgaaaactaacttctgagttcacgagggctgccttccgcagggcgctgctttgttcccgcaaacccgggcggaagctctgagctgcgccgcctcacctggcggggccggagcatgcgcggctggttttcaaggccggcgcctgtagccgcaacggccattttggattagggcaaggagagaactgggcctggagcgggggcgcggggaggggggcgtcgtcgtgggtacaattgcgcaggggcaaaggtcgagaggtcgcgctgccgccgttttatttgaagacatcgtccagttctgaccatggactcgcagccatcggcccttagtttccatcccctctagtgggccttcgggggctctactgacgtccctccttcccttggtaccgggccggggaagtgttctcgggcgcgggaggttccgcatgcccaggcctggccaggggagatgaccgatccgtcgctggggctgacagtccccatggcgccgcctctggccccgctccctccccgggacccaaacggggcgggatccgagtggagaaagcccggggccgtgagcttcgccgacgtggccgtgtacttctcccgggaggagtggggctgcctgcggcccgcgcagagggccctgtaccgggacgtgatgcgggagacctacggccacctgggcgcgctcggtgagagccccacctgcttgcctgggccctgcgcctccacaggccctgccgcgcctctgggagctgcgtgtggagttgggggccccggggccgggcaggcggcctcctcgcagcgtggggtttgcgttcttctcccccaggagtcggaggcagcaagccggcgctcatctcctgggtggaggagaaggccgaactgtgggatccggctgcccaggatccggaggtggcgaagtgtccgacagaagcggacccagcagattccagaaacaaggaagaggaaagacaaagggaagggacgggagccctggagaagcccgaccctgtggccgccgggtctcctgggctgaaggctccccaagccccctttgccgggttggagcagctgtccaaggcccggcgccggagtcgcccccgcttttttgcccacccccctgtcccccgagctgaccagcgtcacggctgctacgtgtgcgggaagagcttcgcctggcgctccacactggtggagcacatttacagccacaggggcgagaagcccttccactgcgcagactgcggcaagggcttcggccacgcttcctccctgagcaaacaccgggccatccatcgtggggagcggccccaccgctgtcccgagtgtggtcgggccttcatgcgccgcacggcgctgacttctcacctgcgcgttcacactggcgagaagccctaccgctgcccgcagtgtggccgctgcttcggcctgaagaccggcatggccaagcaccaatgggtccatcggcccgggggcgaggggcgtaggggccggcgccctggggggctgtctgtgaccctgactcctgtccgcggggacctggacccgcctgtgggcttccagctgtatccagagatattccaggaatgtgggtgacggcctaaaaagtgaccatctagacattgtgggcggcccgagatgggctcaggggcccgaacctctgcagcggcctgcagggaggtcccagaatccaccgcaagagctggcctggggtgcggacagtctgatcttgggctctcagcagcctcttctgccagcaccttgctccccgctgccctgggctctccaaggccccctttgctgaggcagggctgaggtgagaaccccccagacctccatacagggaagcaaaagctgtttctcctcccagagatgctaagaggattgaggtagagaagaaccttgttttctctgttgtctttttctttttacttttttaattttttgagacggagttttgctcttgttgcccaggctggagtgcaatggtgcgatctcgactcactgcaacttccacctcctggagtcaagcgattctcctgcctcagccacccaagtagctggaattacaggcacctgccactatgcccggctaactttttgtatttttagtagagatggggtttcaccatgttggctaggctggtctcgaactcctgccctcaggtgatccacccacctctgcctcccaaagtgctgggattacaggcgtgagccacctcacctggccttttcttttttattctttgaccttcccacaagacaatacccattgtctgttttttttgtttatttatttacttattaagacagcatcttgctcctcacccaggctggaatgcagtggtgtgaactgggctcactgcagcctagacctgctgggctcaaggaatcctcctgccccagcctctcagatggctgtgactacaggtgggcaacactatgcctggctaatttttaaatttttttgcagagatggggttcccactatgttgatcaggctggtctcaaactcctcggttcaagcaattcgcccaccttggcctcccaaagtgctgggattacaggggagccactgcactggccttcattgtctttttgctgcacaacctaaaaaaccagtgaccctgtattggatctcgcctgcagttgctgtattgatttgggcccaggcagtgtttttaagtgataagaattagtgatgaagatctaaagggatattttgcaccaaaatccaggtttctggcatctcttgaaaaatccaaagatttcgcaagttcacctaggctctcagaaagtcgcagttgttgggagttgggccggagccagaactcccaacttactgtggtccggccactcatcccatcagctcctgaccaagcatgagtagccattcatcatggcttgcttttagtgtttttggtgtttatcttaaagtacagcaaagaagaaagggaagtatttcttgaacccatgtctgtgtcaaaacagtccttgcatctttcctgtctttaggtacgcaccatctttgctgtctttaagtatgtgccatcatgggcagagggggctaggccaggaacacctggtgttagatttgtagccagtggcaaccgtacccatctgtatccccaagttctacacggaatccctccagcacttcacgactccattatccagctaccactaattcctttgtgggcagagtccagccacgggcagcccctgccctgcctctggtcaggacaacacctgcccaaggagagcaagggcctgtgacctctgctggcctgtgcgccctcacctgtcacccagctcagccctgtgtctggcctacccagggaggaaggaaccagatttatcagcctgaaaggaggtagaagttttggagaaaagacactgttcgggtgtcaagtaatgaactgactttattcgaacctcatctccaatccaatcccaccgtggtctctctctccctcagcttttctggggcgggttgactcgtgtgtcactttatcacaggggcacatggggtgagaagaggaaccttggcagtaggagatacctttgtaccaggttttaatttccagtgtacatctcagtcccctcccctaaccctcaacacagcctggggaaagcccagcttgcaacaccagttctcagcccagactgacagccagatagatcttggccctgagtttgccaattaaagatgccgtgattattaccta

SEQ ID NO: 203701 - DNA, 3504 bp, Homo sapiens
  Payload ID: 20172
  Gene Name: zinc finger protein 747
  Uniprot ID: Q9BV97
  ENST ID: ENST00000395094
  CDS Start-End: 240-812
gggggcgtcgtcgtgggtacaattgcgcaggggcaaaggtcgagaggtcgcgctgccgccgttttatttgaagacatcgtccagttctgaccatggactcgcagccatcggcccttagtttccatcccctctagtgggccttcgggggctctactgacgtccctccttcccttggtaccgggccggggaagtgttctcgggcgcgggaggttccgcatgcccaggcctggccaggggagatgaccgatccgtcgctggggctgacagtccccatggcgccgcctctggccccgctccctccccgggacccaaacggggcgggatccgagtggagaaagcccggggccgtgagcttcgccgacgtggccgtgtacttctcccgggaggagtggggctgcctgcggcccgcgcagagggccctgtaccgggacgtgatgcgggagacctacggccacctgggcgcgctcggtgagagccccacctgcttgcctgggccctgcgcctccacaggccctgccgcgcctctgggagctgcgtgtggagttgggggccccggggccgggcaggcggcctcctcgcagcgtggggtttgcgttcttctcccccaggagtcggaggcagcaagccggcgctcatctcctgggtggaggagaaggccgaactgtgggatccggctgcccaggatccggaggtggcgaagtgtccgacagaagcggacccagattccagaaacaaggaagaggaaagacaaagggaagggacgggagccctggagaagcccgaccctgtggccgccgggtctcctgggctgaaggctccccaagccccctttgccgggttggagcagctgtccaaggcccggcgccggagtcgcccccgcttttttgcccacccccctgtcccccgagctgaccagcgtcacggctgctacgtgtgcgggaagagcttcgcctggcgctccacactggtggagcacatttacagccacaggggcgagaagcccttccactgcgcagactgcggcaagggcttcggccacgcttcctccctgagcaaacaccgggccatccatcgtggggagcggccccaccgctgtcccgagtgtggtcgggccttcatgcgccgcacggcgctgacttctcacctgcgcgttcacactggcgagaagccctaccgctgcccgcagtgtggccgctgcttcggcctgaagaccggcatggccaagcaccaatgggtccatcggcccgggggcgaggggcgtaggggccggcgccctggggggctgtctgtgaccctgactcctgtccgcggggacctggacccgcctgtgggcttccagctgtatccagagatattccaggaatgtgggtgacggcctaaaaagtgaccatctagacattgtgggcggcccgagatgggctcaggggcccgaacctctgcagcggcctgcagggaggtcccagaatccaccgcaagagctggcctggggtgcggacagtctgatcttgggctctcagcagcctcttctgccagcaccttgctccccgctgccctgggctctccaaggccccctttgctgaggcagggctgaggtgagaaccccccagacctccatacagggaagcaaaagctgtttctcctcccagagatgctaagaggattgaggtagagaagaaccttgttttctctgttgtctttttctttttacttttttaattttttgagacggagttttgctcttgttgcccaggctggagtgcaatggtgcgatctcgactcactgcaacttccacctcctggagtcaagcgattctcctgcctcagccacccaagtagctggaattacaggcacctgccactatgcccggctaactttttgtatttttagtagagatggggtttcaccatgttggctaggctggtctcgaactcctgccctcaggtgatccacccacctctgcctcccaaagtgctgggattacaggcgtgagccacctcacctggccttttcttttttattctttgaccttcccacaagacaatacccattgtctgttttttttgtttatttatttacttattaagacagcatcttgctcctcacccaggctggaatgcagtggtgtgaactgggctcactgcagcctagacctgctgggctcaaggaatcctcctgccccagcctctcagatggctgtgactacaggtgggcaacactatgcctggctaatttttaaatttttttgcagagatggggttcccactatgttgatcaggctggtctcaaactcctcggttcaagcaattcgcccaccttggcctcccaaagtgctgggattacaggggagccactgcactggccttcattgtctttttgctgcacaacctaaaaaaccagtgaccctgtattggatctcgcctgcagttgctgtattgatttgggcccaggcagtgtttttaagtgataagaattagtgatgaagatctaaagggatattttgcaccaaaatccaggtttctggcatctcttgaaaaatccaaagatttcgcaagttcacctaggctctcagaaagtcgcagttgttgggagttgggccggagccagaactcccaacttactgtggtccggccactcatcccatcagctcctgaccaagcatgagtagccattcatcatggcttgcttttagtgtttttggtgtttatcttaaagtacagcaaagaagaaagggaagtatttcttgaacccatgtctgtgtcaaaacagtccttgcatctttcctgtctttaggtacgcaccatctttgctgtctttaagtatgtgccatcatgggcagagggggctaggccaggaacacctggtgttagatttgtagccagtggcaaccgtacccatctgtatccccaagttctacacggaatccctccagcacttcacgactccattatccagctaccactaattcctttgtgggcagagtccagccacgggcagcccctgccctgcctctggtcaggacaacacctgcccaaggagagcaagggcctgtgacctctgctggcctgtgcgccctcacctgtcacccagctcagccctgtgtctggcctacccagggaggaaggaaccagatttatcagcctgaaaggaggtagaagttttggagaaaagacactgttcgggtgtcaagtaatgaactgactttattcgaacctcatctccaatccaatcccaccgtggtctctctctccctcagcttttctggggcgggttgactcgtgtgtcactttatcacaggggcacatggggtgagaagaggaaccttggcagtaggagatacctttgtaccaggttttaatttccagtgtacatctcagtcccctcccctaaccctcaacacagcctggggaaagcccagcttgcaacaccagttctcagcccagactgacagccagatagatcttggccctgagtttgccaattaaagatgccgtgattattaccta

SEQ ID NO: 203702 - DNA, 1511 bp, Homo sapiens
  Payload ID: 20172
  Gene Name: zinc finger protein 747
  ENST ID: ENST00000568028
  CDS Start-End: 326-1318
gttttcaaggccggcgcctgtagccgcaacggccattttggattagggcaaggagagaactgggcctggagcgggggcgcggggaggggggcgtcgtcgtgggtacaattgcgcaggggcaaaggtcgagaggtcgcgctgccgccgttttatttgaagacatcgtccagttctgaccatggactcgcagccatcggcccttagtttccatcccctctagtgggccttcgggggctctactgacgtccctccttcccttggtaccgggccggggaagtgttctcgggcgcgggaggttccgcatgcccaggcctggccaggggagatgaccgatccgtcgctggggctgacagtccccatggcgccgcctctggccccgctccctccccgggacccaaacggggcgggatccgagtggagaaagcccggggccgtgagcttcgccgacgtggccgtgtacttctcccgggaggagtggggctgcctgcggcccgcgcagagggccctgtaccgggacgtgatgcgggagacctacggccacctgggcgcgctcggagtcggaggcagcaagccggcgctcatctcctgggtggaggagaaggccgaactgtgggatccggctgcccaggatccggaggtggcgaagtgtccgacagaagcggacccagattccagaaacaaggaagaggaaagacaaagggaagggacgggagccctggagaagcccgaccctgtggccgccgggtctcctgggctgaaggctccccaagccccctttgccgggttggagcagctgtccaaggcccggcgccggagtcgcccccgcttttttgcccacccccctgtcccccgagctgaccagcgtcacggctgctacgtgtgcgggaagagcttcgcctggcgctccacactggtggagcacatttacagccacaggggcgagaagcccttccactgcgcagactgcggcaagggcttcggccacgcttcctccctgagcaaacaccgggccatccatcgtggggagcggccccaccgctgtcccgagtgtggtcgggccttcatgcgccgcacggcgctgacttctcacctgcgcgttcacactggcgagaagccctaccgctgcccgcagtgtggccgctgcttcggcctgaagaccggcatggccaagcaccaatgggtccatcggcccgggggcgaggggcgtaggggccggcgccctggggggctgtctgtgaccctgactcctgtccgcggggacctggacccgcctgtgggcttccagctgtatccagagatattccaggaatgtgggtgacggcctaaaaagtgaccatctagacattgtgggcggcccgagatgggctcaggggcccgaacctctgcagcggcctgcagggaggtcccagaatccaccgcaagagctggcctggggtgcggacagtctgatcttgggctctcagcagcctcttctgccagcaccttgctccccgctgccctgggctctccaa

SEQ ID NO: 203703 - DNA, 2587 bp, Homo sapiens
  Payload ID: 20173
  Gene Name: zinc finger protein 749
  Uniprot ID: O43361
  ENST ID: ENST00000334181
  CDS Start-End: 251-2587
ctggcggcgccctcatggttgcgttagcatggctacctagggatctgttcactgatttagagggtcccagagctctgggtcgggactgaggtgaaagagcggaaaaacgcgagaagcggtgttccttctacacagaggctagagtgcggatcggctgagtcggctgcaggcgcccctgcctccgtcagcgtccaggtgaccgccgttcccgccccgctcttccctgggtggactggaggaggccgcgccgatgaacctgaccgaggattgtatggtctttgaggatgtggccatatatttctcccaagaggaatgggggatccttaatgatgctcagagacacctgcacagcaatgtgatgttggagaactttgcgcttttgtcatcagtaggttgttggcatggagccaaggatgaggaggtaccttccaagcagtgtgtttctgtaagagtgttacaggtcacaattccaaagccagctttgtccaccctgaaggcccagccctgcaagatgtgtagctcaattctgaaggacattctgcacctggctgagcacgatggaacacaccctgagcaagggctgtacacatgtgcagcagagcatgacctgcaccaaaaggagcagattagagagaagctcaccagaagtgatgagtggaggccttcatttgtgaaccacagtgctcacgtgggagagaggaacttcacatgcacgcagggtggcaaggattttactgccagctcagaccttctccagcaacaggtcttaaacagtgggtggaagctgtacagggatacccaggatggggaagcctttcaaggtgaacagaatgatttcaactccagccaaggtgggaaagacttttgccaccaacatgggctgtttgagcaccaaaaaacccataatggggagaggccttatgagttcagtgaatgtggggaattgtttaggtacaactccaaccttattaaatatcagcaaaatcatgctggagaaaggccttatgagggcactgaatatggaaagacctttattagaaagtccaacctagttcagcaccagaaaattcacagtgaaggctttctttcaaaaaggtctgaccccattgaacatcaggagattctcagtagaccaacaccttatgaatgcacccagtgtgggaaggcctttcttacacaggctcatctggttggtcaccagaaaacccatactggagaacagccctatgaatgcaacaagtgtgggaagttttttatgtataactccaaactcatcagacatcagaaagttcacactggggagaggcgttacgagtgcagtgaatgtgggaaattgtttatggacagcttcacactcggtagacatcagagagttcatactggagaaaggccttttgaatgcagcatatgtggaaaattctttagtcaccgctccacactcaatatgcaccagagagttcatgctggcaaaaggctttataagtgtagcgaatgtgggaaagcctttagcctcaaacataatgttgttcagcatctgaaaattcatactggagaacggccttatgagtgcactgaatgtgagaaggcctttgttagaaagtcccacctagttcagcaccagaaaatccacactgatgcattttcaaaaaggtctgacctcattcaacacaagaggattgacattaggccaaggccttatacatgcagtgaatgtgggaaggccttccttacacaggctcatctggttggtcaccagaaaatccatactggagaacggccttatgaatgcactcaatgtgcgaaggcctttgttagaaagtcccacctagttcagcatgagaaaatccacactgatgcattttcaaaaaggtctgacctcattcaacacaagaggattgacctcaggccaaggccttatgtgtgtagtgaatgtgggaaggccttccttacacaggctcatctagatggtcaccagaaaatccagactggagaacggcgttatgaatgcaatgaatgtgggaaattctttttggacagctacaaacttgttattcatcagagaattcacactggagaaaagccttataaatgcagcaaatgtgggaaattctttagatatcgctgtacactgagtagacatcagaaagttcacactggagaaagaccttatgagtgtagtgaatgtgggaaattttttagagatagctacaaactcattattcatcagagagttcatactggagaaaagccttatgaatgcagcaactgtgggaagtttcttagataccgctctacattcattaaacatcataaagtttgcactggggagaagcctcatgagtgcagtaaatgtagggaattgtttaggactaaatcgagccttattatacatcagcagtctcacactggagaaagtccttttaagttaagggaatgtgggaaagacttcaacaaatgtaatactggtcagcgccaaaaaactcacactggagaaaggtcttatgagtgtggtgaatccagcaaagtgtttaaatacaactccagcctcattaaacatcagataattcatactggaaaaaggccttag

SEQ ID NO: 203704 - DNA, 568 bp, Homo sapiens
  Payload ID: 20173
  Gene Name: zinc finger protein 749
  ENST ID: ENST00000415248
  CDS Start-End: 371-568
atggttgcgttagcatggctacctagggatctgttcactgatttagagggtcccagagctctgggtcgggactgaggtgaaagagcggaaaaacgcgagaagcggtgttccttctacacagaggctagagtgcggatcggctgagtcggctgcaggcgcccctgcctccgtcagcgtccaggtgaccgccgttcccgccccgctcttccctgggtggactggaggaggccgcgccgatgaacctgaccgaggttgttggcatggagccaaggatgaggaggtaccttccaagcagtgtgtttctgtaagagtgttacaggtcacaattccaaagccagctttgtccaccctgaaggcccagccctgcaagatgtgtagctcaattctgaaggacattctgcacctggctgagcacgatggaacacaccctgagcaagggctgtacacatgtgcagcagagcatgacctgcaccaaaaggagcagattagagagaagctcaccagaagtgatgagtggaggccttcatttgtgaaccacagtgctcacgtgggagagaggaacttcaca

SEQ ID NO: 203705 - DNA, 3713 bp, Homo sapiens
  Payload ID: 20174
  Gene Name: zinc finger protein 750
  Uniprot ID: Q32MQ0
  ENST ID: ENST00000269394
  CDS Start-End: 835-3006
ataagctccctccctgccggctcagctcctgaggaggaccagggacagagactctcaggagcagggtagagggtggaaggtccacagatcctcaaaggcctcactggacctcatggcaaggacgccatgaatactgtgcctcccagggtatgcgcgcttgagaatcaatccaagtgtttgcctcctgcgtacacatgctcaagttctaaaggaaagtctcacatgtctttatcatgacgccaaatattcatcgggtgtgattctgatgaatatagtaatctctattctaactgcggacacatcgaaagccctctgacatatggccgtccaggcagcaccgacgccgcactcacagacagttgagtctggagacagcgctgggagtcggcgagataacttgcttgctgggtccagtgctggggaggctgcccgcagcagctcggtgggtgcaaacacatgaatcgtagctgcgggcaggaggaatatcaggtgcatctctacgccccgagggctcaactcctacacttaaatccctcccactggaacagcaggctccagtttcacccagcaagcgtgagaacaggtactgcttcctgagcaccgccagccaccggcaccaagaccggccacatcccagcactgcccacctctgctcccagccgccagatgacggaggctctcgccagaccctcagcacgcagagctggcttctgatagaagtgatcgggaaagaaagcaaagcgggaggtgcctctttagaaaccacgaagtgcacgcggcgtcgacagtgatcacgccacctggacagccagagtccaaggcataaggaggaaaatgagtctcctcaaagagcggaagccaaaaaagccacattacatccccaggcctccaggaaagcccttcaagtataaatgtttccaatgtccctttacttgcaatgagaagtcacatctttttaatcacatgaagtatggtctttgtaaaaactcgattactttagtatcagagcaggatcgagttcccaagtgccctaaatctaactcactagaccccaagcaaaccaaccagcccgatgccacggcgaagccagcctcttccaagtctgtcgcaaatggactctctgccttcgactcgaagcttcagcacagctctgccagggaagacatcaaggaaaacctggagctgcaagcccggggaacccacaggtgcctgggacagaagccagccctccacagggcatcaccctgcaagagcccagctccggaagccgccctcggtgcccagcctgctctggaaggcgcagctcggccttctgcatttgttccagtcggcgagcacagactcaaggggccagacaacgccgaggcgcccgagacactggctttacacaaccccactgccaaggccgtgtctttccacaccaagtcggccttccacactcctggctacccctggaaagccggctcacctttccttccaccagagtttccacataaaatctcatctacaaaggggcttggggccatttccccttacatgcaccccacaatcccagagtacccgcctcacttttacacagagcacgggctggccaccatctactcgccttacctgctggctgggagctcgcctgagtgtgacgcacccctgctgtcagtctacggaacccaagacccgagacacttcctgcctcacccggggccgatccctaagcacctggctccatctccagccacatacgatcactacaggtttttccagcaatatccctctaacctgccgattccttacggattttacaggccagagtctgcattttcctcctatggtctcagactcccacctgtcactggcctcacccgagatcagagctctcacctgcttgaagaagccaccctggtctatccagcctcgagtccttccaggttaaacccttcggaccccaacagaaaacacgtcgagttcgaaagtccaattcctgaggctaaagactcctccaaggctgggcagagagacacggaagggtccaaaatgagcccccgcgcagggagtgcagccacgggctccccagggaggccgagccccaccgacttcatgcagacgagccagacctgcgaaggcctgtacgacctctccaacaaggcagcctccagcgcactgggaagactctacccgccagagcaaagcctcacagccttcaggcctgttaagaaaagcacagaatgcctacctgcccaggctgctgagaccacagcagagtctccagtaagcctcaatgttgtgaacggagaccctcctgctccgaccggaagcgcctctctcgtctcggaggccgcgccttccagtccggacgacagctccgggatgggccccctcaacctctccaagaaatcagagataaacctggcagccacccacgaacccacgtaccaaggcagcccccaggcggaaaccgccagcttctcagagctgcaggaccttccactcaatctctcggtgaaggacccctgtaacacccaggctccgaggcctgccttccccggtcgaccacgagctgcagaacctgctgctgctgttccacagaagactgggacagaaggttctgaggatgggcccagccaccctgagaccaagccaggcagcctcgacggtgacggggccccacccacaggccccggcgaggaggctccagacgcatgcgcggtggacagcagcgaggagcagaagcagacggcagccgtggccctgtgccagctggcggcctacagccccaggaacatccgggtgggcgatggggatgctgcggccccggaacctgcctgccggcaagacacacccacactgagctccatggagagccaagaggcccagtgtgacctcagacccaaaggacaaaagaggacaagtctaagggatgctggaaaatcccagcaaggagctaagaaggcgaagctgcaggacacggccagagtgttcacactacgaaggagggcccgggtgtcctaacgccgggttcacacgtgtgttcacagagctacggccacacacacgccttccaaggtggcaagctacaacacctctgaactggcactttcacatttttacaaatgcagctgctgcttctcaaaaaaacaaacaaacaaacaaacaaaaaaccctccaattcagtttttataaatattaagcatgaatattaaaaggtgcttctacttttggttgtaaaaacacctgaatgactctaagactgatatgtattttcaagtctaagctgtcttacagaagatcttttataaatgtttccttataaatatctcaccattacaacaaattgttttaactgtttttctattagctctagctgcatatttgatgtaaatgacaattactgaaaaaatgtcagaaaaaacattttcagtactaacattaaagtgccatatgtaaaaaagaaaaatgtgatttgtataactaaataacacacaaacatcaagaggctatttatacaaataatttatttccactagggaaagtgcattactggtgaaggtattatcaatttattctacttgcttataatgttacagtgaatgttctggcttactctgcctcactttccattccccaaaatgatgtgtatgttgctaattttccaataaactcatatgaaccataaggaaacataaaatgcaaataaacataaatctatgttatccttt

SEQ ID NO: 203706 - DNA, 1513 bp, Homo sapiens
  Payload ID: 20174
  Gene Name: zinc finger protein 750
  ENST ID: ENST00000572562
  CDS Start-End: 326-1300
agtttcacccagcaagcgtgagaacaggtactgcttcctgagcaccgccagccaccggcaccaagaccggccacatcccagcactgcccacctctggccagagtctgcattttcctcctatggtctcagactcccacctgtcactggcctcacccgagatcagagctctcacctgcttgaagaagccaccctggtctatccagcctcgagtccttccaggttaaacccttcggaccccaacagaaaacacgtcgagttcgaaagtccaattcctgaggctaaagactcctccaaggctgggcagagagacacggaagggtccaaaatgagcccccgcgcagggagtgcagccacgggctccccagggaggccgagccccaccgacttcatgcagacgagccagacctgcgaaggcctgtacgacctctccaacaaggcagcctccagcgcactgggaagactctacccgccagagcaaagcctcacagccttcaggcctgttaagaaaagcacagaatgcctacctgcccaggctgctgagaccacagcagagtctccagtaagcctcaatgttgtgaacggagaccctcctgctccgaccggaagcgcctctctcgtctcggaggccgcgccttccagtccggacgacagctccgggatgggccccctcaacctctccaagaaatcagagataaacctggcagccacccacgaacccacgtaccaaggcagcccccaggcggaaaccgccagcttctcagagctgcaggaccttccactcaatctctcggtgaaggacccctgtaacacccaggctccgaggcctgccttccccggtcgaccacgagctgcagaacctgctgctgctgttccacagaagactgggacagaaggttctgaggatgggcccagccaccctgagaccaagccaggcagcctcgacggtgacggggccccacccacaggccccggcgaggaggctccagacgcatgcgcggtggacagcagcgaggagcagaagcagacggcagccgtggccctgtgccagctggcggcctacagccccaggaacatccgggtgggcgatggggatgctgcggccccggaacctgcctgccggcaagacacacccacactgagctccatggagagccaagaggcccagtgtgacctcagacccaaaggacaaaagaggacaagtctaagggatgctggaaaatcccagcaaggagctaagaaggcgaagctgcaggacacggccagagtgttcacactacgaaggagggcccgggtgtcctaacgccgggttcacacgtgtgttcacagagctacggccacacacacgccttccaaggtggcaagctacaacacctctgaactggcactttcacatttttacaaatgcagctgctgcttctcaaaaaaacaaacaaacaaacaaacaaaaaaccctccaattcagtttttataaatattaagcatgaatattaaaaggtgcttctacttttggttg

SEQ ID NO: 203707 - DNA, 2347 bp, Homo sapiens
  Payload ID: 20175
  Gene Name: zinc finger protein 75a
  Uniprot ID: Q96N20
  ENST ID: ENST00000574298
  CDS Start-End: 474-1364
ttccggccggcgctctggctctgtacctggacagggctgcggtaggccagcggtgggctggcggttgcgctcctcagatcggcggcctttcgggcggtggcttgcgtttgagcctcagaaagcgaggagcggcctccacggaagccaagctggccgaggttgcagtccatgagctgggaaaggaggcagtgctcttgggagaaacagcagaggcctcaagtttcgggctgaagccaacagagtcccaaccagtgggcgtatcccaagatgaagaattttggaatacatacgagggtctgcaagaacagctcagcaggaatactcataaagagactgagcctgtgtatgagagggctgtgcctactcaacagattctagcttttcctgagcaaacaaacaccaaagactggacagtgacacctgagcacgtcttgcctgagtcccagagcttgttgacatttgaagaagtggccatgtatttttcccaggaagaatgggagttattggatcccactcagaaggccctctacaatgatgtaatgcaggaaaactatgagactgtcatctctctagcattgtttgtgctccccaaacctaaagtgatctcctgtctagagcaaggggaagagccatgggttcaagtatccccggagtttaaggatagtgccggaaaatctcctacagggttaaagctcaaaaacgacactgaaaatcatcagcctgtgtctctttctgacttagaaatacaagcatcagcaggcgtcatatcaaaaaaggccaaagtaaaagttccccagaaaacagcaggcaaagaaaatcattttgatatgcacagagtgggaaaatggcaccaagattttccagtgaagaaaagaaagaaactttcaacctggaaacaagagctgctcaaacttatggatcgtcacaagaaagattgtgcaagagagaagccttttaaatgtcaggaatgtgggaaaaccttcagagttagctctgaccttattaagcaccaaagaattcacactgaagagaaaccctataaatgtcaacagtgtgataagaggtttagatggagttcagatcttaataagcacttaacaacacaccaaggaataaaaccatataaatgttcatggtgtgggaaaagcttcagtcaaaatacaaatttacatacacaccaaagaactcatacaggagaaaagcccttcacatgtcatgaatgtggaaaaaaattcagtcagaactcccaccttattaaacaccggagaacccacacaggtgagcagccatatacttgtagcatatgcaggagaaacttcagcaggcggtcaagccttcttagacaccagaaactccacctgtgaagagaagcttgtccagtgtcctcattctgaagacattcaccaaatggagcttggcactaaaatttatgtaaaagaaaaatcacaaaccttgaaaaattttacatcagaaaatgggataaacatacatttcacagaaaataatcaagacttgctctgcagccactcagtagtcttctgtggtcacagaagtaaacattgttggctttgtattgatctctccagtcatttttgaacacatccaatagaaacattggcagcatggtcttccaaaacaaaaagcagtaacatgcatgtttaattgcataccattctcttcacagtagcaggcttaccaatttccatagtctcatgaggccgaaatgaattacaatgtaaagtgttccaggaaccaaattggattttctttcttttgtcattggacacggtttgcaaagttggacatcacttgagttccttcttaaacttttcggcaacttctcttggatcctgttatcacagttttttactgtgatgaaatcttgttaaccaccactagggaatctccagatgaactattaatgcactgtcttatgcctctcattggtgatgtttggaaaatagaagacatctctaatggaatcatgggggaaacgggttggaatttgtagccatggaatatatattagatgtaaagaattttctgcaataaaagaaactagacttgttaatccctgccttgcaatgtcagtaggataaagcagctataaaaattagtacttgcccaaggcctgaaagagaattagtgggaattaagatcaacttctcagttttgtttgtttactttttaattggcttttctttgttgttaagaatgagagacttaatttccatgggagttggagtgtgtgtgctgcaggcaggatcctgtggctcatttggcatggagacctggacatgtagtcagcaggagacggttccctaaataaaagatttgggcactggtg

SEQ ID NO: 203708 - DNA, 561 bp, Homo sapiens
  Payload ID: 20175
  Gene Name: zinc finger protein 75a
  ENST ID: ENST00000572999
  CDS Start-End: 449-561
tttaagcctttttttgtcattttttttagtgtcttatactacccacaatgtgggctgtacacctgtcgctctgcctccacccccacaaaccaaaagtaagttctgtggtaacaaggatgggaattatttctaggttgcagtccatgagctgggaaaggaggcagtgctcttgggagaaacagcagaggcctcaagtttcgggctgaagccaacagagtcccaaccagtgggcgtatcccaagatgaagaattttggaatacatacgagggtctgcaagaacagctcagcaggaatactcataaagagactgagcctgtgtatgagagggctgtgcctactcaacagattctagcttttcctgagcaaacaaacaccaaagactggacagtgacacctgagcacgtcttgcctgagtcccagagcttgttgacatttgaagaagtggccatgtatttttcccaggaagaatgggagttattggatcccactcagaaggccctctacaatgatgtaatgcaggaaaactatgagactgtcatctctctagcattgtttgtgct

SEQ ID NO: 203709 - DNA, 1225 bp, Homo sapiens
  Payload ID: 20175
  Gene Name: zinc finger protein 75a
  Uniprot ID: Q96N20
  ENST ID: ENST00000617839
  CDS Start-End: 279-1169
tgggagaaacagcagaggcctcaagtttcgggctgaagccaacagagtcccaaccagtgggcgtatcccaagatgaagaattttggaatacatacgagggtctgcaagaacagctcagcaggaatactcataaagagactgagcctgtgtatgagagggctgtgcctactcaacagattctagcttttcctgagcaaacaaacaccaaagactggacagtgacacctgagcacgtcttgcctgagtcccagagcttgttgacatttgaagaagtggccatgtatttttcccaggaagaatgggagttattggatcccactcagaaggccctctacaatgatgtaatgcaggaaaactatgagactgtcatctctctagcattgtttgtgctccccaaacctaaagtgatctcctgtctagagcaaggggaagagccatgggttcaagtatccccggagtttaaggatagtgccggaaaatctcctacagggttaaagctcaaaaacgacactgaaaatcatcagcctgtgtctctttctgacttagaaatacaagcatcagcaggcgtcatatcaaaaaaggccaaagtaaaagttccccagaaaacagcaggcaaagaaaatcattttgatatgcacagagtgggaaaatggcaccaagattttccagtgaagaaaagaaagaaactttcaacctggaaacaagagctgctcaaacttatggatcgtcacaagaaagattgtgcaagagagaagccttttaaatgtcaggaatgtgggaaaaccttcagagttagctctgaccttattaagcaccaaagaattcacactgaagagaaaccctataaatgtcaacagtgtgataagaggtttagatggagttcagatcttaataagcacttaacaacacaccaaggaataaaaccatataaatgttcatggtgtgggaaaagcttcagtcaaaatacaaatttacatacacaccaaagaactcatacaggagaaaagcccttcacatgtcatgaatgtggaaaaaaattcagtcagaactcccaccttattaaacaccggagaacccacacaggtgagcagccatatacttgtagcatatgcaggagaaacttcagcaggcggtcaagccttcttagacaccagaaactccacctgtgaagagaagcttgtccagtgtcctcattctgaagacattcaccaaatggagcttggca

SEQ ID NO: 203710 - DNA, 1118 bp, Homo sapiens
  Payload ID: 20175
  Gene Name: zinc finger protein 75a
  ENST ID: ENST00000612186
  CDS Start-End: 98-559
cttttattgcttttgtacaagaccagacaggatctcatttgttaaacgtggtaccaattgggtgtcttaacacaggagcagaacttcctagagcagaatgatgatggtagatctgaaagtggctgcgtacttggaccctcagatcagggctttgtgggagaccaaggggcctgcaagagagagctccggtcagagtaaaaaatctcctcaaatggactgtctcgatcctaagagctcttgctggcacttccggaatttcacctatgatgaagcaggtggaccccgtgaggctgtcagcaaacttcaagaattatgtcatctatggctgaagccagagatccactcaaaagagcagatactggaactgctggtgctggagcagttcctgactattctgcccagggagacacagacccagatgcagaagcaccatccacagagcattgaggaggctgtggctctggtagaacacttgcagagggaatctggtcaaacatggaatggggtgagaagaaagattcctgacatgtacagtgaaataggatgcaggtggatatagtagagatggtggcagttagttgagaaattagatggattaggtaggtcattgtttggttttttttttaaggacagttaaggtgggacttgaaactacaggcccacagaaaagttcacaggtttcagagattgtggtagatacttccctggccttagagaaagagagttgcttttgccctctttggagccagggtgaattgagggtgttgggcctagtctggcttggccaaggagacaggacttaagtacttagaaacagaataaaaggtaataaagagtcagggaggctggatgcagtggctcacacctgtaatctcagcactttaggaggctgaggcgggtagatcacctgaggtcaggagttcaagaccagcctggacagcatggtggaaccctctctctacaaaaataaacaaattagctgggcatgatgaccggtgcctgtaatcccggctatcctcgaggctgaggagggagaatcatttgaacctgggaggttgcagtgagccgagatcgcaccattgcactccagcctgggcaacacagcaagactccatctc

SEQ ID NO: 203711 - DNA, 2977 bp, Homo sapiens
  Payload ID: 20176
  Gene Name: zinc finger protein 75D
  Uniprot ID: P51815
  ENST ID: ENST00000370764
  CDS Start-End: 385-1632
agaactcgaccctggaagagagagtcggggtcaggtcttcgggaggtggagggatcgaatgagggaactgatattccaagactccccacatcttggagcttcactcgccaggcatcccgcgctttcctgacgtcgcttcccctagtggtgcagcagcggagagctttgctacccagagcagcagggaggcgtggccacagaggcagaggcgtagtcgagccgaggaagaggaaagtggcctccggggaagccagagctgactgaagtgctcttgggaagaacaattcattgatttggtaccaacctgatgcaccctgatttgtcaaaggtggtaccaggtgggtgtcagtgtcacatacaagagtaaaactgttcctagagcaaatggcgatgagagagctgaacgcggattcatgctcaagcccccagatgggggctatgtgggagactagtgggtctgtgaaagagaactccagtcagagtaagaaatacagcacaaaaatagagaatcttggtcctgagagcgcttgcaggcacttctggagcttccgttatcatgaagcaaccggaccgcttgagactatcagccaacttcagaaattgtgccatcagtggctgaggccagagatccactcaaaagagcagatcttggaaatgctggtgttagagcagttcctgagcattctgcccaaggagacccagaactgggtgcagaagcatcatccacagaatgtcaaacaggctctggtcctggtggaattcttgcagagggagcctgatggaacaaagaatgagagtttgttgacatttgaagatgtggctgtgtatttttctgaggaagagtggcaattattgaatcctcttgagaagactctctacaatgatgtaatgcaggatatctatgagactgtcatctctctagggttaaagctaaaaaatgacactggaaatgatcatcctatatctgtttctacatcagaaatacaaacatcaggatgcgaagtatcaaaaaagaccagaatgaaaattgcccagaaaacaatgggcagggaaaatcctggtgatacacacagtgtacagaaatggcatcgagcttttccaaggaagaaaagaaagaaacctgcaacttgtaaacaagagcttccaaaacttatggatcttcatgggaaaggccccacaggggagaaaccttttaagtgtcaggaatgtgggaaaagcttcagagttagctctgatcttattaaacaccacagaattcacactggagagaaaccctataaatgtcaacaatgtgacaggaggtttagatggagttcagatcttaataagcacttcatgacccatcaaggaataaaaccatatagatgctcatggtgtgggaaaagctttagtcataacacaaatctacacacacaccaaagaattcacacaggagagaagccctttaaatgtgatgaatgtggaaaaagattcattcagaactcccaccttattaaacaccagagaactcacacaggtgagcagccttatacgtgtagcttatgcaagagaaactttagtaggcgatcgagccttcttagacaccagaaactccacagaagaagggaagcatgtctagtgtctccaaactgaggaaagttaccatgtagagcttgactttagaagtggtgaaagaatacaaaattatgaggcacccaatgataggaatctgtgattaataaaacatttgggaagggtacatgttacacttcacaaaaaggaatctaagctgtctgttttattcagcattgcatcttctgtgcctagcacaagagttgatacataaggagtactttataaataaaaaaatgaaagtgtagtgatgagattcctttagctatctatctatatgtatatatctggttattcaaagcttccccacccccagtcatctaaatttttcaggtatcaagtgctcaacagacatatgatagtcaaggctcttagtctcattttttactctttgtcaagagaaatggaaaataagagtacttgggccctcttaagggagctcagagagaattactaaattagggacagtttcaatagttatcattctgtctacatgaacaatcaagaccaggactcagggaactttactctgtaacagaaagagaggattcagtgtttgccctgggagaattgtcccattcttgttgcttctctcctgagtacccactaccacaatgtcttctgtcaaggaattacaagtagcaagggaaggtctgaatgtaaggacaggcctagggaccttgcaagcacttgatatctctcctcttgctgactttgtcaacatagacatatagtgaaatgatgagggaggcagtcttggccctcatccaggtatctggtttttttttgtagaaagcacagataagtggtaaatggtctttttctgactttcattatgtggactggatggaggctttcaaactggtgccatactgctgcaggacctaaagggagccccatctttatggctgatcaactacaaccctatatgcctgaatactctgcaagaaggcctggagattttgcaaaactgatttattgagaatggcaaggagagccttgtgaacttttagctttggtgcacagctgataccaggagggaacatcctgaagtgtcagagaaaagtaaggcatatggctcacagtgatgatgccagtcagagccaggccagatggaaattgttttctgatgttactggttttcttttccctattagccaaagtgactatctcttaagagaagataatgtgacgtcaagggaagttggaaggcatggatttatatctatgtcagatcctggtttataatgttggccaaggcttatttatatatgtttatttagtattccataaaattgtacttcgtaatgaaaatgacacattttatcttaaatttagacaataaacaaaactttgttaccaaatc

SEQ ID NO: 203712 - DNA, 5592 bp, Homo sapiens
  Payload ID: 20176
  Gene Name: zinc finger protein 75D
  Uniprot ID: P51815
  ENST ID: ENST00000370766
  CDS Start-End: 2711-4243
gatacaatggtgtcgttcgggaaacgcagccctaacgttggtcctaagctgacaaattggtctgtggacgccaaacttccgtgctaggactttctgcgtgtggaccgggggcctagtcctgcgtgggtccaacacagacaggagaaagctgcctgcttttgtgcctcccggaggtcctggtagaagcgaaacggggacaggagctgcagcgtcccaagcccagtgaggcgaagctactggagacagctctgccgggtccaaagttgggctcaccggctggaacttgaaaccggagcacgccggactcctgctgaagccatcatctctctctcctggccccgggcgccttggccggcgggcacaactggtttcggggccaaggtggtctggaagcctgactgtggcgtctggcctgggctcccgcgagcggaaaaggttcccctcctgtgagagggaaactatggaagttcctacgcccggagccagaactcctgctgctcccgcccgacccaaggtctagcttggcggcctcccacctgtgcttctgagggttctgcttccaagaggctgctggtgcccgggacaccagcagtttcgccatgggtgtttcgccatgggagtttcgccatgggtgactttggcctgagatgcgctccatggagcagattctggagttgctggtgttggaggagttcctgactatcctgtcccaggacatccacagcagggtgcagaagctgcaacgggcgagctgtgaagaagctgtaactcttttaaagtatatgtatgacttttaaaagagagagcttgtgaaactgagggaataggtgagtgagagagaggttttatctgccatcttcctcaaggaggcccagcctcccctttattcatagggttctgggtctggtgggtccagaggactgagacatctcgctgtcttaattccccattcagattttcttgattgccctgagtagaccttacacgggccagtgattttttgttgttgttgttgttgttgtcttctctggaaccttcatcctccagatttccccccagtgcagtgaagagtgtgctattgcttttggtttccacggggaggcagtgtcgctgtcatagtgtccgctctggaggtagatcaaagggggctttcaactcctggctctgctccctactagctgtgcgactttgggcaagtgacttttgcttggctgggcttcactttctgcactggtcaaatgcagaaagggtaatagacccttctggggttgtttggaggattaaagggagagcagtatgtccgtaataatcgcactgctggcacacagctagtgcttgaaactgtgagctgctgttaggttaggggcagcagtctggtctcctctgcagagatgggtctcagttaattgtgaacttaaacagtttggcactgaggctttggggtcattgccccagggccacccaagtaagcttgtctaattgagaggaacaggagcagctggagaatgtgggggaggaaccgaagacctatgggggacatgtgtgtactgaaatgggctttctccccacaccctccacacaagcacatacacacattcactctgggtcatggcatcataaaaaccttgagtttaaaccatccctttctcttgttgggtccaaatggacagactctggttttctattgaagatttacacgcagattcctgtcataatttttcttttctatcgagccctgtcatgatgataagtgatagcaggttggttcctagatcatacaccatggacctagcacagaagtgttttcagaagagccttttccttacaaaacagcatgaaagtcattgagccaatggatactgagatttcaaactggagccaatggatacttagaggagccctgaagtgtagagtagttgctacttcttgttcactaggtctaattagcatgtcatcagtgtaacagactagtgtgttgtcttgtgaaagagaaaggtgataagatccctgtgaactaaactatgatgtagggcttgaaaattgatatacaatacgcctgaggtaggatggcgaaggtgtattcctggtcttaccagctgaaagtaaattgcttctggtggtctttactaacagttattgagaaaaaaagcattttcaaggtcaagaggtacatactaggttccaggggatatgttaatttgctcaagaaatgaaaccacatctggaacagcagctgcaattggagtcatcacctggcttagtttacaatgacccactaccatcttccaagatccatctgccttctgcataggccaaacaggtccacagaactcgaccctggaagagagagtcggggtcaggtcttcgggaggtggagggatcgaatgagggaactgatattccaagactccccacatcttggagcttcactcgccaggcatcccgcgctttcctgacgtcgcttcccctagtggtgcagcagcggagagctttgctacccagagcagcagggaggcgtggccacagaggcagaggcgtagtcgagccgaggaagaggaaagtggcctccggggaagccagagctgactgaagtgctcttgggaagaacaattcattgatttggtaccaacctgatgcaccctgatttgtcaaaggtggtaccaggtgggtgtcagtgtcacatacaagagtaaaactgttcctagagcaaatggcgatgagagagctgaacgcggattcatgctcaagcccccagatgggggctatgtgggagactagtgggtctgtgaaagagaactccagtcagagtaagaaatacagcacaaaaatagagaatcttggtcctgagagcgcttgcaggcacttctggagcttccgttatcatgaagcaaccggaccgcttgagactatcagccaacttcagaaattgtgccatcagtggctgaggccagagatccactcaaaagagcagatcttggaaatgctggtgttagagcagttcctgagcattctgcccaaggagacccagaactgggtgcagaagcatcatccacagaatgtcaaacaggctctggtcctggtggaattcttgcagagggagcctgatggaacaaagaatgaggtcacagcccatgagctgggaaaggaggcagtgctcttgggaggaacagcagtggccccaggcttcaagtggaagccagcagagccccaaccaatgggtgtgttccagaaagaatattggaatacataccgggtactacaagaacagctgggctggaacactcacaaagaaacccagcctgtatatgaaagagctgtgcatgatcaacagatgttagccctttctgagcagaaaagaatcaaacactggaagatggcatctaaactcatcctgcctgagtccctgagtttgttgacatttgaagatgtggctgtgtatttttctgaggaagagtggcaattattgaatcctcttgagaagactctctacaatgatgtaatgcaggatatctatgagactgtcatctctctagggttaaagctaaaaaatgacactggaaatgatcatcctatatctgtttctacatcagaaatacaaacatcaggatgcgaagtatcaaaaaagaccagaatgaaaattgcccagaaaacaatgggcagggaaaatcctggtgatacacacagtgtacagaaatggcatcgagcttttccaaggaagaaaagaaagaaacctgcaacttgtaaacaagagcttccaaaacttatggatcttcatgggaaaggccccacaggggagaaaccttttaagtgtcaggaatgtgggaaaagcttcagagttagctctgatcttattaaacaccacagaattcacactggagagaaaccctataaatgtcaacaatgtgacaggaggtttagatggagttcagatcttaataagcacttcatgacccatcaaggaataaaaccatatagatgctcatggtgtgggaaaagctttagtcataacacaaatctacacacacaccaaagaattcacacaggagagaagccctttaaatgtgatgaatgtggaaaaagattcattcagaactcccaccttattaaacaccagagaactcacacaggtgagcagccttatacgtgtagcttatgcaagagaaactttagtaggcgatcgagccttcttagacaccagaaactccacagaagaagggaagcatgtctagtgtctccaaactgaggaaagttaccatgtagagcttgactttagaagtggtgaaagaatacaaaattatgaggcacccaatgataggaatctgtgattaataaaacatttgggaagggtacatgttacacttcacaaaaaggaatctaagctgtctgttttattcagcattgcatcttctgtgcctagcacaagagttgatacataaggagtactttataaataaaaaaatgaaagtgtagtgatgagattcctttagctatctatctatatgtatatatctggttattcaaagcttccccacccccagtcatctaaatttttcaggtatcaagtgctcaacagacatatgatagtcaaggctcttagtctcattttttactctttgtcaagagaaatggaaaataagagtacttgggccctcttaagggagctcagagagaattactaaattagggacagtttcaatagttatcattctgtctacatgaacaatcaagaccaggactcagggaactttactctgtaacagaaagagaggattcagtgtttgccctgggagaattgtcccattcttgttgcttctctcctgagtacccactaccacaatgtcttctgtcaaggaattacaagtagcaagggaaggtctgaatgtaaggacaggcctagggaccttgcaagcacttgatatctctcctcttgctgactttgtcaacatagacatatagtgaaatgatgagggaggcagtcttggccctcatccaggtatctggtttttttttgtagaaagcacagataagtggtaaatggtctttttctgactttcattatgtggactggatggaggctttcaaactggtgccatactgctgcaggacctaaagggagccccatctttatggctgatcaactacaaccctatatgcctgaatactctgcaagaaggcctggagattttgcaaaactgatttattgagaatggcaaggagagccttgtgaacttttagctttggtgcacagctgataccaggagggaacatcctgaagtgtcagagaaaagtaaggcatatggctcacagtgatgatgccagtcagagccaggccagatggaaattgttttctgatgttactggttttcttttccctattagccaaagtgactatctcttaagagaagataatgtgacgtcaagggaagttggaaggcatggatttatatctatgtcagatcctggtttataatgttggccaaggcttatttatatatgtttatttagtattccataaaattgtacttcgtaatgaaaatgacacattttatcttaaatttagacaataaacaaaactttgttaccaaatcactc

SEQ ID NO: 203713 - DNA, 4651 bp, Homo sapiens
  Payload ID: 20177
  Gene Name: zinc finger protein 76
  ENST ID: ENST00000229405
  CDS Start-End: 502-957
tgagaagaccgccagggcgccctccctgcggaggcgagtccctcaccgcccctctacatcgtccttttcaataaggagctcttaatacctgcaactgcttccttcaaggggtggctggaagatcagtaggcaaggcctgcggactgcgcaccttaaagcgcttcgggaccgtaagacagtgagtgctgagcgcgcggccgggaagaagcctggaggctctgagctcggaggacagagaccgaagccccagggcctgcgtccctcacaacctgcgcctcctgtcctcccgcgctactcccgaagcgcaccttctcgcccgcaggccgcagaagtgatgacgcaaagccctcggggcctccgccacctcctcacgcttctgctggaccgaatccttggaatggacagatttgtgacccagaaggaaatctctgacctcagctgtggctcttggtgctggccagaagccaacttcatgtctgagtgcacgagcagcagtttgccatggagagcttggggctgcacacggtgacccttagtgatgggacaacagcctacgtccagcaagctgtcaaaggagagaagcttcttgaagggcaggtgatccagctcgaggatgggaccaccgcatacattcaccaggtgacggtacagaaagaagctctctcctttgaggatggtcagcctgtgcagctggaagatggcagcatggcttacatacaccgcacacccagagaaggctatgaccccagcaccctggaagccgtccaactggaagatggctccactgcctacattcaccaccctgtggctgtgccatcggagagcaccatcctggccgtacagacagaggtgggcttggaggacctggcagcagaggatgatgagggcttcagtgcagacgcagtggtggccctggagcagtatgccagcaagacttttcccccaggttcttcatgacagccagattccccgtaatggaaaagggcagcaagttggagacagagcattccgctgtggctacaagggctgtgggcgtctctacaccaccgctcatcacttaaaggtgcatgaacgagctcatacaggtgaccgtccatacagatgtgacttccccagctgtggaaaggcctttgccacaggtaacctgcctggtgggctgcttccagttgagggtggagggttctcgttctgtttgggacctctctgaagggaacccaacaccaggctgctttcctggagaaactaccgtcagagtactctgacttgcagggtgctctctctggaggaaaccttgttacgggagtgcaaggcagcatggttcaggccagcagaaggagcctggagggttggtggagagacccagcctcttgtgtcagctctgatgccaaccagctgtggattattgggtgggccattgcatctctctgggcttattttcccctctgtgaaactagtacctttagccatgagttctctaagtttcttttcatgctcatgttctggtatggctccaactgctcctggagagggaagcagggcagagtgggcttttccagcccctgcccagggcaggggtgggatagaggcagacatgggcttcttgagccaaaggaggtggagagcctgtgcatgaggtggacggtggaggatgagaccccactgggtgctcatctcaccccctgcctgccacatatggacaggctatggactgaagagccacgttcgtacccacactggtgagaaaccatacaagtgcccagaggagctgtgcagcaaggccttcaagacctcaggagacctgcagaagcatgtccgtacccacactggtgaacgcccgttccagtgcccttttgagggctgtggccgctccttcaccacatctaacatccgcaaggtacatgtgcgcacccacacaggcgagaggccctacacctgcccggagccccactgtggccgcggcttcaccagcgccaccaactataagaatcacgtgcgcatccacacagcccagtgtccccaggggagaagccatacgtttgcacggtgccaggctgcgggaaacgcttcaccgagtactcgagcttgtataagcaccacgtggtgcacacacactgcaagccctacacctgcagcacctgcggcaagacctaccggcagacctccaccttggccatgcacaagcgcagtgcccacggcgagctggaggccacggaggagagcgagcaggccctctatgagcagcagcaacttgaggccgcctctgcagccgaggagagtccgccacccaaacgaccccggatagcttacctttcggaggtgaaggaagagagagatgacatcccagcccaggtggcgatggtgactgaagaagatggggccccccaggtggctctgatcactcaggatggtgcccagcaggtcagcctgtccccggaagacctgcaggccctggggagtgccatcagtatggtcacccagcacggcagcaccaccctcaccatccccagtcctgatgccgacctggccacatctggcacacatacagtcaccatggtcagcgccgatggcacccagacgcagcccgtatgaccaggcggtttgcttggggtttcttattttgtcattcctttccatggggcgggcattaaagtgcagcctaaactagtcaagtcttcttaccaggacaaagattccccacaaaagaaggggtcttccccacagttcctgggccatgagcagctcttacctttaaaagcagttgaatggaggtcaagagacactttctaaatctcaattcaaccctgatttgttgtgcaaccttaggcaaatcacttttccatggacttctgtccattttcaagtgaggggattaaaatatctctggaattttttacagctctgtccttctgtgattcaaaatccctaaattaaattgggctctaagttgggaggaaacccagccttacttagctctgagcctcaggctaattaatctgacccatacggttttatccattctcttctgggttgttcccagcaccttaattggagggatgtttatttggattgtggggagggagagtatactgcaggtggaatggaagacctccttttgtctttcaggtcacaatcattacctctggggctgtggtggctgaggactcaagtgtagcatctcttcgtcatcaacaggtggcactgttggccacagccaacggaacgcacattgcagtgcaggtgagtagagatctgggaggaaaggggatcccacggccagagaagtcaacaaggaataaaggggaattagatgaggatcttgaagagaagggcatctgactcaaaaagagcccatttcagaggacagatccctttcctcctgcatccatgcatctgtctcaggctcgctcttggctgaggcagaatgttgaagcctcttctggccttcaggataactccgatggcagtccacctgtggtccaagcccttcatcattttgtgtctctgtttcttcatctggaaatgaaggaggctgacgtagatgatcaccacggttctcttcagccagtccttcctccgtgagcaagtgggtctctctgaccctggctattccagggccccctggccatgcctagcctaataggactcttcatccgtgaacttcatgtttattggagccctactaagtgctcagcgtgtggcactgggtagatgggggagagtcaaaaaaaaaagtaggccacatattactaacactggaatctagcagggagggtctcactgtctccttccttctgcacccccttccccacagctggaggaacagcagaccttagaggaggccatcaatgtggccactgcggccatgcagcaaggggctgtgaccctggagacaacagtgtcggagagtggctgctgagtccaagagggctgggtcccacaccatgctggaggaagtgccatctgcatggccactcttgcccccaagggcccaggctgtggctgacacatagaaggtggccacataggtctctggggtgagaagacagcaagaaaactgcctaactgaagggaatgggggccctgctcaagaagggggccaggcagctggaatcaggggagtgcatcatcctcgggagctgacaacagccaggctacaccagggcacccgcctctcaaaatcagctgggcgcccactctcctcctaaagaacacccttctggccctcagtctgttccccttctcaggtagagattggggctgctatggggactggccctgtagggttgagccacagacagctcttcagcccagtagcagtggagcaggccctgtcctgccctcccagcaataaccacctccctggaggccagctgagatgcctggctacttggcaccagggacttcctgacaccacagtcaattaattcctcaggggcctgtggctgaagaaaaggtgcccagcccccaccactcctcagctgccccccaacctctctatggcagagaggcagggagtggccctgtacatagactgctggggattgggtttgatttgttttgttttttttaattccattttgataatttttttcctgctctgggtggtggtggcacatggatgaatgagtatttaataaaagttccaaatttc

SEQ ID NO: 203714 - DNA, 2447 bp, Homo sapiens
  Payload ID: 20177
  Gene Name: zinc finger protein 76
  Uniprot ID: P36508
  ENST ID: ENST00000339411
  CDS Start-End: 165-1712
ggccggcgctggtggcggggcccggtgcatggcggtctgtcggcggagtcgccctcgggggctgtcagatttgtgacccagaaggaaatctctgacctcagctgtggctcttggtgctggccagaagccaacttcatgtctgagtgcacgagcagcagtttgccatggagagcttggggctgcacacggtgacccttagtgatgggacaacagcctacgtccagcaagctgtcaaaggagagaagcttcttgaagggcaggtgatccagctcgaggatgggaccaccgcatacattcaccaggtgacggtacagaaagaagctctctcctttgaggatggtcagcctgtgcagctggaagatggcagcatggcttacatacaccgcacacccagagaaggctatgaccccagcaccctggaagccgtccaactggaagatggctccactgcctacattcaccaccctgtggctgtgccatcggagagcaccatcctggccgtacagacagaggtgggcttggaggacctggcagcagaggatgatgagggcttcagtgcagacgcagtggtggccctggagcagtatgccagcaaggttcttcatgacagccagattccccgtaatggaaaagggcagcaagttggagacagagcattccgctgtggctacaagggctgtgggcgtctctacaccaccgctcatcacttaaaggtgcatgaacgagctcatacaggtgaccgtccatacagatgtgacttccccagctgtggaaaggcctttgccacaggctatggactgaagagccacgttcgtacccacactggtgagaaaccatacaagtgcccagaggagctgtgcagcaaggccttcaagacctcaggagacctgcagaagcatgtccgtacccacactggtgaacgcccgttccagtgcccttttgagggctgtggccgctccttcaccacatctaacatccgcaaggtacatgtgcgcacccacacaggcgagaggccctacacctgcccggagccccactgtggccgcggcttcaccagcgccaccaactataagaatcacgtgcgcatccacacaggggagaagccatacgtttgcacggtgccaggctgcgggaaacgcttcaccgagtactcgagcttgtataagcaccacgtggtgcacacacactgcaagccctacacctgcagcacctgcggcaagacctaccggcagacctccaccttggccatgcacaagcgcagtgcccacggcgagctggaggccacggaggagagcgagcaggccctctatgagcagcagcaacttgaggccgcctctgcagccgaggagagtccgccacccaaacgaccccggatagcttacctttcggaggtgaaggaagagagagatgacatcccagcccaggtggcgatggtgactgaagaagatggggccccccaggtggctctgatcactcaggatggtgcccagcaggtcacaatcattacctctggggctgtggtggctgaggactcaagtgtagcatctcttcgtcatcaacaggtggcactgttggccacagccaacggaacgcacattgcagtgcagctggaggaacagcagaccttagaggaggccatcaatgtggccactgcggccatgcagcaaggggctgtgaccctggagacaacagtgtcggagagtggctgctgagtccaagagggctgggtcccacaccatgctggaggaagtgccatctgcatggccactcttgcccccaagggcccaggctgtggctgacacatagaaggtggccacataggtctctggggtgagaagacagcaagaaaactgcctaactgaagggaatgggggccctgctcaagaagggggccaggcagctggaatcaggggagtgcatcatcctcgggagctgacaacagccaggctacaccagggcacccgcctctcaaaatcagctgggcgcccactctcctcctaaagaacacccttctggccctcagtctgttccccttctcaggtagagattggggctgctatggggactggccctgtagggttgagccacagacagctcttcagcccagtagcagtggagcaggccctgtcctgccctcccagcaataaccacctccctggaggccagctgagatgcctggctacttggcaccagggacttcctgacaccacagtcaattaattcctcaggggcctgtggctgaagaaaaggtgcccagcccccaccactcctcagctgccccccaacctctctatggcagagaggcagggagtggccctgtacatagactgctggggattgggtttgatttgttttgttttttttaattccattttgataatttttttcctgctctgggtggtggtggcacatggatgaatgagtatttaataaaagttccaaatttc

SEQ ID NO: 203715 - DNA, 2716 bp, Homo sapiens
  Payload ID: 20177
  Gene Name: zinc finger protein 76
  Uniprot ID: P36508
  ENST ID: ENST00000373953
  CDS Start-End: 267-1979
ggcgcgccaagaggaaaggaaagtgcggcggccctggaacctggatatcgcgcgaggcaagctgcgcgcgggcgggcgggctatggcgcaggcgggttgtggggccggcgctggtggcggggcccggtgcatggcggtctgtcggcggagtcgccctcgggggctgtcagatttgtgacccagaaggaaatctctgacctcagctgtggctcttggtgctggccagaagccaacttcatgtctgagtgcacgagcagcagtttgccatggagagcttggggctgcacacggtgacccttagtgatgggacaacagcctacgtccagcaagctgtcaaaggagagaagcttcttgaagggcaggtgatccagctcgaggatgggaccaccgcatacattcaccaggtgacggtacagaaagaagctctctcctttgaggatggtcagcctgtgcagctggaagatggcagcatggcttacatacaccgcacacccagagaaggctatgaccccagcaccctggaagccgtccaactggaagatggctccactgcctacattcaccaccctgtggctgtgccatcggagagcaccatcctggccgtacagacagaggtgggcttggaggacctggcagcagaggatgatgagggcttcagtgcagacgcagtggtggccctggagcagtatgccagcaaggttcttcatgacagccagattccccgtaatggaaaagggcagcaagttggagacagagcattccgctgtggctacaagggctgtgggcgtctctacaccaccgctcatcacttaaaggtgcatgaacgagctcatacaggtgaccgtccatacagatgtgacttccccagctgtggaaaggcctttgccacaggctatggactgaagagccacgttcgtacccacactggtgagaaaccatacaagtgcccagaggagctgtgcagcaaggccttcaagacctcaggagacctgcagaagcatgtccgtacccacactggtgaacgcccgttccagtgcccttttgagggctgtggccgctccttcaccacatctaacatccgcaaggtacatgtgcgcacccacacaggcgagaggccctacacctgcccggagccccactgtggccgcggcttcaccagcgccaccaactataagaatcacgtgcgcatccacacaggggagaagccatacgtttgcacggtgccaggctgcgggaaacgcttcaccgagtactcgagcttgtataagcaccacgtggtgcacacacactgcaagccctacacctgcagcacctgcggcaagacctaccggcagacctccaccttggccatgcacaagcgcagtgcccacggcgagctggaggccacggaggagagcgagcaggccctctatgagcagcagcaacttgaggccgcctctgcagccgaggagagtccgccacccaaacgaccccggatagcttacctttcggaggtgaaggaagagagagatgacatcccagcccaggtggcgatggtgactgaagaagatggggccccccaggtggctctgatcactcaggatggtgcccagcaggtcagcctgtccccggaagacctgcaggccctggggagtgccatcagtatggtcacccagcacggcagcaccaccctcaccatccccagtcctgatgccgacctggccacatctggcacacatacagtcaccatggtcagcgccgatggcacccagacgcagcccgtcacaatcattacctctggggctgtggtggctgaggactcaagtgtagcatctcttcgtcatcaacaggtggcactgttggccacagccaacggaacgcacattgcagtgcagctggaggaacagcagaccttagaggaggccatcaatgtggccactgcggccatgcagcaaggggctgtgaccctggagacaacagtgtcggagagtggctgctgagtccaagagggctgggtcccacaccatgctggaggaagtgccatctgcatggccactcttgcccccaagggcccaggctgtggctgacacatagaaggtggccacataggtctctggggtgagaagacagcaagaaaactgcctaactgaagggaatgggggccctgctcaagaagggggccaggcagctggaatcaggggagtgcatcatcctcgggagctgacaacagccaggctacaccagggcacccgcctctcaaaatcagctgggcgcccactctcctcctaaagaacacccttctggccctcagtctgttccccttctcaggtagagattggggctgctatggggactggccctgtagggttgagccacagacagctcttcagcccagtagcagtggagcaggccctgtcctgccctcccagcaataaccacctccctggaggccagctgagatgcctggctacttggcaccagggacttcctgacaccacagtcaattaattcctcaggggcctgtggctgaagaaaaggtgcccagcccccaccactcctcagctgccccccaacctctctatggcagagaggcagggagtggccctgtacatagactgctggggattgggtttgatttgttttgttttttttaattccattttgataatttttttcctgctctgggtggtggtggcacatggatgaatgagtatttaataaaagttccaaatttcca

SEQ ID NO: 203716 - DNA, 613 bp, Homo sapiens
  Payload ID: 20177
  Gene Name: zinc finger protein 76
  ENST ID: ENST00000498555
  CDS Start-End: 1-305
ccctcaccatccccagtcctgatgccgacctggccacatctggcacacatacagtcaccatggtcagcgccgatggcacccagacgcagcccgtcacaatcattacctctggggctgtggtggctgaggactcaagtgtagcatctcttcgtcatcaacaggtggcactgttggccacagccaacggaacgcacattgcagtgcaggtgagtagagatctgggaggaaaggggatcccacggccagagaagtcaacaaggaataaaggggaattagatgaggatcttgaagagaagggcatctgactcaaaaagagcccatttcagaggacagatccctttcctcctgcatccatgcatctgtctcaggctcgctcttggctgaggcagaatgttgaagcctcttctggccttcaggataactccgatggcagtccacctgtggtccaagcccttcatcattttgtgtctctgtttcttcatctggaaatgaaggaggctgacgtagatgatcaccacggttctcttcagccagtccttcctccgtgagcaagtgggtctctctgaccctggctattccagggccccctggccatgcctagcctaataggact

SEQ ID NO: 203717 - DNA, 1373 bp, Homo sapiens
  Payload ID: 20177
  Gene Name: zinc finger protein 76
  ENST ID: ENST00000469195
  CDS Start-End: 354-1373
ttccctgggcgctcagcctcgctggccatgcgtcaccccggccttggtgggggcggggctccgaagagctcggttcagatcccggccgcctgggctccaggagccccggaaccaggataagttggatggctgccgcggcgaagcggggggcggggtggaccgtgcccggtattttctatacgggttccggggcccggtagaggcgcgccaagaggaaaggaaagtgcggcggccctggaacctggatatcgcgcgagatttgtgacccagaaggaaatctctgacctcagctgtggctcttggtgctggccagaagccaacttcatgtctgagtgcacgagcagcagtttgccatggagagcttggggctgcacacggtgacccttagtgatgggacaacagcctacgtccagcaagctgtcaaaggagagaagcttcttgaagggcaggtgatccagctcgaggatgggaccaccgcatacattcaccaggtgacggtacagaaagaagctctctcctttgaggatggtcagcctgtgcagctggaagatggcagcatggcttacatacaccgcacacccagagaaggctatgaccccagcaccctggaagccgtccaactggaagatggctccactgcctacattcaccaccctgtggctgtgccatcggagagcaccatcctggccgtacagacagaggtgggcttggaggacctggcagcagaggatgatgagggcttcagtgcagacgcagtggtggccctggagcagtatgccagcaaggttcttcatgacagccagattccccgtaatggaaaagggcagcaagttggagacagagcattccgctgtggctacaagggctgtgggcgtctctacaccaccgctcatcacttaaaggtgcatgaacgagctcatacaggtgaccgtccatacagatgtgacttccccagctgtggaaaggcctttgccacaggctatggactgaagagccacgttcgtacccacactggtgagaaaccatacaagtgcccagaggagctgtgcagcaaggccttcaagacctcaggagacctgcagaagcatgtccgtacccacactggtgaacgcccgttccagtgcccttttgagggctgtggccgctccttcaccacatctaacatccgcaaggtacatgtgcgcacccacacaggcgagaggccctacacctgcccggagccccactgtggccgcggcttcaccagcgccaccaactataagaatcacgtgcgcatccacacaggggagaagccatacgtttgcacggtgccaggctgcgggaaacgcttcaccgagtactcgagcttgtataagcaccacgtggtgcacaca

SEQ ID NO: 203718 - DNA, 4061 bp, Homo sapiens
  Payload ID: 20178
  Gene Name: zinc finger protein 761
  ENST ID: ENST00000432094
  CDS Start-End: 308-2548
atggagtttcgctcttgttgctcaggctggagtgcaatggtgtgatctcggctcactgcaacctccgcctcccgggttcaagcgattctcctgcctcagcctctcgagtagctgagattacagagtattgcccgggctgtgagtgcagtctcatgatcttgggtcactgcaacctctgtttcctgggttcaagtgattcttgtgcctcagcatcccacgtagctgagattacaggattgacttctaaagactcttggtacgtgaggaagaaacccggaagaggaagaggagagcaaaggagtcagggatggctttttctcagggtctattgacattcagggatgtggccatagaattctctcaggaggagtggaaatgcctggaccctgctcagaggactctatacagggacgtgatgctggagaattataggaacctggtctccctggatatctcttccaaatgcacgatgaaggagttcttgtcaacagcgcaaggcaacagagaagtgttccatgcagggacattgcaaatacatgaaagtcatcacaatggagatttttgctaccaggatgttgataaagatattcatgactatgaatttcaatggcaagaagatgaaagaaatggccatgaagcacccatgacaaaaatcaaaaagttgacaggtattacagaacgatatgatcaaagtcatgctagaaacaagcctattaaagatcagcttggatcaagctttcattcgcatctgcctgaaatgcacatatttcagaccgaagagaaaattgataatcaagttgtgaagtctgtccacgatgcttccttggtttcaacagcccaaagaatttcttgtaggcccaaaacccatatatctaataaccatgggaataatttctggaattcttcattactcacacaaaaacaggaagtacacatgagagaaaaatctttccaatgtaatgagagtggcaaagcctttaattacagctcactcttaaggaaacatcagataatccatttagcagacaaatataaatgtgatgtatgtggcaagctctttaatcagaagcgaaacctagcatgccatcgtagatgtcacactggtgagaatccttacaagtgtaatgagtgtggcaagaccttcagtcagacgtcatcccttacatgccatcgtagacttcatactggagagaaaccttacaaatgtgaagaatgtgacaaagctttccatttcaaatcaatacttgaaagacataggataattcatactgaagagaaaccatataagtgtaatgagtgtggcaagacctttaggcagaagtcaatccttacacgccatcatcgacttcatactggagagaaaccttacaagtgtaatgagtgtggcaagacctttagtcacaagtcatcccttacatgccatcatagacttcatactggagagaaaccctacaaatgtaatgagtgtggcaagacctttagtcacaagtcatcccttacatgccatcgtagacttcatactggagagaaaccttacaaatgtgaagaatgtgacaaagcttacagtttcagatcaaattttgaaatacatcggaaaattcatactgaagacaatgcttacaagtgtaatgagtgtggaaagacctttagccggacatcatcccttacatgccatcgtagacgtcatactggagagcaaccttacaaatgtgaagaatgtgacaaagctttccgtttcaaatcaaaccttgaaagacataggagaattcatactggagagaaaccatacaagtgtaatgagtgtggcaagacctttagtcggaagtcatacctcacatgccatcatagacttcatactggagagaaagcttacaagtgtaatgagtgcggcaagacctttagttggaagtcatcccttacctgccatcgtagacttcattctggagagaaaccttacaagtgtaaggagtgtggcaagaccttcaatcagcagttaacccttaaacgccatcgtagacttcatagtggagagaacccttacaaatgtgaagatagtgacaaagcttacagtttcaaatcaaaccttgaaatacatcagaaaattcatactgaagagaatccttacaagtgtaatgagtgtggcaagaccttcagtcggacgtcatcccttacatgccatcgtagacttcataccggagagaaaccttacaaatgtgaagaatgtgacaaagctttccgtgtgaaatcaaaccttgaaggacataggagaattcatactggagagaaaccttacaagtgtaatgagtgtggcaagacctttagtcggaagtcatattttatatgccatcatagacttcatactggagagaaaccttataagtgtaatgagtgtggcaagaactttagtcagaagtcatcccttatatgccaccatagacttcatactggagagaaaccttacaagtgtaatgagtgtggcaagacctttagtcagaagtcaaaccttacatgccatcgtagacttcatactggagaaaaacaagtgtaatgaatgtggtgaggtttttaatcaacaagcacaccttgcaggtcatcatagaattcatactggggagaaaccttagaaatgtgaagcatgtgataaagtttacagtggcaaatcaagcctcagaagacaggagaattcatactggagagaaagcttataaatgtgaagaatgtcacaaagtttacagtcgcacatcaaaccgtgaaagacaggagaattcatactggagagaaaccataaaaatgtaagagtttgtgacaaggcttttgggcatgattcgcacctggcacaacatgctagaattcacactggagagaaaccttaccagtgtaatgagtgtggcaaagcctttagtaggcagtcaacacttgtttaccgtcaggcaatccatggtgtagggaaactttactaaggtaatgattgtcacaaagtcttcagtaatgctacaaccattgtgaatcactggagaatccataaggaagagagatcatactagggtaataaatgtggcagatttttcagacattgttcataccttgcagttcatcggtgaactcaacgctggagagaaaccttacaaatgtcatgactgtggcaaggtcttcagtcaagcttcatcctatgcaaaacataggagaattcatacaggagagaaacctcacatgtgtgatgatagtggcaaagccttcacttcacacctcatgagacatcagagaatgcatactggacagaaatcttacaaatgtcatcaatgtgccaaggtcttcagtctgagttcactccttgcagaatatgagaaaattcattttggaggtagttggtccatatgcaatgagtagagcaaaccatcaagcattaattgacattagggtcaattcagcattgacttgagtttgtattgacttaacattgagttcaagcattaattgacattagtgtttatgttaagaggattgggccaggcacatcagcttacacctgtaatctgagcgctttgggaggccaaggtgggtagatcacttgaggtcaggagtttgagatcagcctggccaacagacgtgagccattttcccagcctgttttttgtttctttaaaaaaactgatagggatttttatggatatcatgttgaatctaaatcacattgggttattatataatcatttcacaatattaatttttccaagctatcaatatgggttgtagctcaatgtttttaatcattttgatcaatgtttgtagatttcaaggtacaaacttctgacctttgtacgtttatttctaagtatttctttaagttctccagcaaatggaagtgttttaaaattttcttttaaaattgtttattgttaaagtatggaaattcaactaatttttggtgctgatactgtattgtgcaaatccactgactatgttacttagttccagtagtattttggttggctctttgtgattttctacacagaagattatgtcatctacaaacaaatataattttacttcttactttctga

SEQ ID NO: 203719 - DNA, 646 bp, Homo sapiens
  Payload ID: 20178
  Gene Name: zinc finger protein 761
  ENST ID: ENST00000613950
  CDS Start-End: 33-245
ggaagaggaagaggagagcaaaggagtcagggatggctttttctcagggtctattgacattcagggatgtggccatagaattctctcaggaggagtggaaatgcctggaccctgctcagaggactctatacagggacgtgatgctggagaattataggaacctggtctccctggggtcttgctgtgttgttgaaattcatcttgatctcctgagctcaagagatcctcctcagtctcccaagtagctgagattacaggtgccaaccaccatacctaattattggcttttatttttaagatttttgcatatgtgtggccgggcttggtggctcacgcctgtaatcccagcactttgggaggccaaggtgggtggatcacgaggtcaggcgatcgagaccagcccggccaacatggtgaaaccccgtctctactaaaaatagaaaaattagccgggtgtggtggcatgggcctgtaatcccagctacttgggaggctgaagcaggaggatcacatgaacctgggaatcggaggttgcagtgagccaagatcaccactgcacatctgcctggtgacagagtgagactccatctcaaaaaaataaataaaataaaatgaaatatttgcatatgtgtgtccttaaggctaa

SEQ ID NO: 203720 - DNA, 3967 bp, Homo sapiens
  Payload ID: 20178
  Gene Name: zinc finger protein 761
  ENST ID: ENST00000454407
  CDS Start-End: 215-2455
agttctacagctgaccctctttcgctattttcaaggtcaatagctgtgtgttcacacttctgcattttataaatgttactgtgattttcttgaggtggcgtgttgattctgagcaataaacaacatatttctaacattcaggattgacttctaaagactcttggtacgtgaggaagaaacccggaagaggaagaggagagcaaaggagtcagggatggctttttctcagggtctattgacattcagggatgtggccatagaattctctcaggaggagtggaaatgcctggaccctgctcagaggactctatacagggacgtgatgctggagaattataggaacctggtctccctggatatctcttccaaatgcacgatgaaggagttcttgtcaacagcgcaaggcaacagagaagtgttccatgcagggacattgcaaatacatgaaagtcatcacaatggagatttttgctaccaggatgttgataaagatattcatgactatgaatttcaatggcaagaagatgaaagaaatggccatgaagcacccatgacaaaaatcaaaaagttgacaggtattacagaacgatatgatcaaagtcatgctagaaacaagcctattaaagatcagcttggatcaagctttcattcgcatctgcctgaaatgcacatatttcagaccgaagagaaaattgataatcaagttgtgaagtctgtccacgatgcttccttggtttcaacagcccaaagaatttcttgtaggcccaaaacccatatatctaataaccatgggaataatttctggaattcttcattactcacacaaaaacaggaagtacacatgagagaaaaatctttccaatgtaatgagagtggcaaagcctttaattacagctcactcttaaggaaacatcagataatccatttagcagacaaatataaatgtgatgtatgtggcaagctctttaatcagaagcgaaacctagcatgccatcgtagatgtcacactggtgagaatccttacaagtgtaatgagtgtggcaagaccttcagtcagacgtcatcccttacatgccatcgtagacttcatactggagagaaaccttacaaatgtgaagaatgtgacaaagctttccatttcaaatcaatacttgaaagacataggataattcatactgaagagaaaccatataagtgtaatgagtgtggcaagacctttaggcagaagtcaatccttacacgccatcatcgacttcatactggagagaaaccttacaagtgtaatgagtgtggcaagacctttagtcacaagtcatcccttacatgccatcatagacttcatactggagagaaaccctacaaatgtaatgagtgtggcaagacctttagtcacaagtcatcccttacatgccatcgtagacttcatactggagagaaaccttacaaatgtgaagaatgtgacaaagcttacagtttcagatcaaattttgaaatacatcggaaaattcatactgaagacaatgcttacaagtgtaatgagtgtggaaagacctttagccggacatcatcccttacatgccatcgtagacgtcatactggagagcaaccttacaaatgtgaagaatgtgacaaagctttccgtttcaaatcaaaccttgaaagacataggagaattcatactggagagaaaccatacaagtgtaatgagtgtggcaagacctttagtcggaagtcatacctcacatgccatcatagacttcatactggagagaaagcttacaagtgtaatgagtgcggcaagacctttagttggaagtcatcccttacctgccatcgtagacttcattctggagagaaaccttacaagtgtaaggagtgtggcaagaccttcaatcagcagttaacccttaaacgccatcgtagacttcatagtggagagaacccttacaaatgtgaagatagtgacaaagcttacagtttcaaatcaaaccttgaaatacatcagaaaattcatactgaagagaatccttacaagtgtaatgagtgtggcaagaccttcagtcggacgtcatcccttacatgccatcgtagacttcataccggagagaaaccttacaaatgtgaagaatgtgacaaagctttccgtgtgaaatcaaaccttgaaggacataggagaattcatactggagagaaaccttacaagtgtaatgagtgtggcaagacctttagtcggaagtcatattttatatgccatcatagacttcatactggagagaaaccttataagtgtaatgagtgtggcaagaactttagtcagaagtcatcccttatatgccaccatagacttcatactggagagaaaccttacaagtgtaatgagtgtggcaagacctttagtcagaagtcaaaccttacatgccatcgtagacttcatactggagaaaaacaagtgtaatgaatgtggtgaggtttttaatcaacaagcacaccttgcaggtcatcatagaattcatactggggagaaaccttagaaatgtgaagcatgtgataaagtttacagtggcaaatcaagcctcagaagacaggagaattcatactggagagaaagcttataaatgtgaagaatgtcacaaagtttacagtcgcacatcaaaccgtgaaagacaggagaattcatactggagagaaaccataaaaatgtaagagtttgtgacaaggcttttgggcatgattcgcacctggcacaacatgctagaattcacactggagagaaaccttaccagtgtaatgagtgtggcaaagcctttagtaggcagtcaacacttgtttaccgtcaggcaatccatggtgtagggaaactttactaaggtaatgattgtcacaaagtcttcagtaatgctacaaccattgtgaatcactggagaatccataaggaagagagatcatactagggtaataaatgtggcagatttttcagacattgttcataccttgcagttcatcggtgaactcaacgctggagagaaaccttacaaatgtcatgactgtggcaaggtcttcagtcaagcttcatcctatgcaaaacataggagaattcatacaggagagaaacctcacatgtgtgatgatagtggcaaagccttcacttcacacctcatgagacatcagagaatgcatactggacagaaatcttacaaatgtcatcaatgtgccaaggtcttcagtctgagttcactccttgcagaatatgagaaaattcattttggaggtagttggtccatatgcaatgagtagagcaaaccatcaagcattaattgacattagggtcaattcagcattgacttgagtttgtattgacttaacattgagttcaagcattaattgacattagtgtttatgttaagaggattgggccaggcacatcagcttacacctgtaatctgagcgctttgggaggccaaggtgggtagatcacttgaggtcaggagtttgagatcagcctggccaacagacgtgagccattttcccagcctgttttttgtttctttaaaaaaactgatagggatttttatggatatcatgttgaatctaaatcacattgggttattatataatcatttcacaatattaatttttccaagctatcaatatgggttgtagctcaatgtttttaatcattttgatcaatgtttgtagatttcaaggtacaaacttctgacctttgtacgtttatttctaagtatttctttaagttctccagcaaatggaagtgttttaaaattttcttttaaaattgtttattgttaaagtatggaaattcaactaatttttggtgctgatactgtattgtgcaaatccactgactatgttacttagttccagtagtattttggttggctctttgtgattttctacacagaagattatgtcatctacaaacaaatataattttacttcttactttctg

SEQ ID NO: 203721 - DNA, 938 bp, Homo sapiens
  Payload ID: 20178
  Gene Name: zinc finger protein 761
  ENST ID: ENST00000610928
  CDS Start-End: 344-508
agcggatagcgtggagtgacggtgccaccgcggcgcatggagtttcgctcttgttgctcaggctggagtgcaatggtgtgatctcggctcactgcaacctccgcctcccgggttcaagcgattctcctgcctcagcctctcgagtagctgagattacagagtattgcccgggctgtgagtgcagtctcatgatcttgggtcactgcaacctctgtttcctgggttcaagtgattcttgtgcctcagcatcccacgtagctgagattacaggattgacttctaaagactcttggtacgtgaggaagaaacccggaagaggaagaggagagcaaaggagtcagggatggctttttctcagggtctattgacattcagggatgtggccatagaattctctcaggaggagtggaaatgcctggaccctgctcagaggactctatacagggacgtgatgctggagaattataggaacctggtctccctggacagggtcttgctgtgttgttgaaattcatcttgatctcctgagctcaagagatcctcctcagtctcccaagtagctgagattacaggtgccaaccaccatacctaattattggcttttatttttaagatttttgcatatgtgtggccgggcttggtggctcacgcctgtaatcccagcactttgggaggccaaggtgggtggatcacgaggtcaggcgatcgagaccagcccggccaacatggtgaaaccccgtctctactaaaaatagaaaaattagccgggtgtggtggcatgggcctgtaatcccagctacttgggaggctgaagcaggaggatcacatgaacctgggaatcggaggttgcagtgagccaagatcaccactgcacatctgcctggtgacagagtgagactccatctcaaaaaaataaataaaataaaatgaaatatttg

SEQ ID NO: 203722 - DNA, 3681 bp, Homo sapiens
  Payload ID: 20178
  Gene Name: zinc finger protein 761
  ENST ID: ENST00000334095
  CDS Start-End: 1-58
tgttgaaattcatcttgatctcctgagctcaagagatcctcctcagtctcccaagtagctgagattacagatatctcttccaaatgcacgatgaaggagttcttgtcaacagcgcaaggcaacagagaagtgttccatgcagggacattgcaaatacatgaaagtcatcacaatggagatttttgctaccaggatgttgataaagatattcatgactatgaatttcaatggcaagaagatgaaagaaatggccatgaagcacccatgacaaaaatcaaaaagttgacaggtattacagaacgatatgatcaaagtcatgctagaaacaagcctattaaagatcagcttggatcaagctttcattcgcatctgcctgaaatgcacatatttcagaccgaagagaaaattgataatcaagttgtgaagtctgtccacgatgcttccttggtttcaacagcccaaagaatttcttgtaggcccaaaacccatatatctaataaccatgggaataatttctggaattcttcattactcacacaaaaacaggaagtacacatgagagaaaaatctttccaatgtaatgagagtggcaaagcctttaattacagctcactcttaaggaaacatcagataatccatttagcagacaaatataaatgtgatgtatgtggcaagctctttaatcagaagcgaaacctagcatgccatcgtagatgtcacactggtgagaatccttacaagtgtaatgagtgtggcaagaccttcagtcagacgtcatcccttacatgccatcgtagacttcatactggagagaaaccttacaaatgtgaagaatgtgacaaagctttccatttcaaatcaatacttgaaagacataggataattcatactgaagagaaaccatataagtgtaatgagtgtggcaagacctttaggcagaagtcaatccttacacgccatcatcgacttcatactggagagaaaccttacaagtgtaatgagtgtggcaagacctttagtcacaagtcatcccttacatgccatcatagacttcatactggagagaaaccctacaaatgtaatgagtgtggcaagacctttagtcacaagtcatcccttacatgccatcgtagacttcatactggagagaaaccttacaaatgtgaagaatgtgacaaagcttacagtttcagatcaaattttgaaatacatcggaaaattcatactgaagacaatgcttacaagtgtaatgagtgtggaaagacctttagccggacatcatcccttacatgccatcgtagacgtcatactggagagcaaccttacaaatgtgaagaatgtgacaaagctttccgtttcaaatcaaaccttgaaagacataggagaattcatactggagagaaaccatacaagtgtaatgagtgtggcaagacctttagtcggaagtcatacctcacatgccatcatagacttcatactggagagaaagcttacaagtgtaatgagtgcggcaagacctttagttggaagtcatcccttacctgccatcgtagacttcattctggagagaaaccttacaagtgtaaggagtgtggcaagaccttcaatcagcagttaacccttaaacgccatcgtagacttcatagtggagagaacccttacaaatgtgaagatagtgacaaagcttacagtttcaaatcaaaccttgaaatacatcagaaaattcatactgaagagaatccttacaagtgtaatgagtgtggcaagaccttcagtcggacgtcatcccttacatgccatcgtagacttcataccggagagaaaccttacaaatgtgaagaatgtgacaaagctttccgtgtgaaatcaaaccttgaaggacataggagaattcatactggagagaaaccttacaagtgtaatgagtgtggcaagacctttagtcggaagtcatattttatatgccatcatagacttcatactggagagaaaccttataagtgtaatgagtgtggcaagaactttagtcagaagtcatcccttatatgccaccatagacttcatactggagagaaaccttacaagtgtaatgagtgtggcaagacctttagtcagaagtcaaaccttacatgccatcgtagacttcatactggagaaaaacaagtgtaatgaatgtggtgaggtttttaatcaacaagcacaccttgcaggtcatcatagaattcatactggggagaaaccttagaaatgtgaagcatgtgataaagtttacagtggcaaatcaagcctcagaagacaggagaattcatactggagagaaagcttataaatgtgaagaatgtcacaaagtttacagtcgcacatcaaaccgtgaaagacaggagaattcatactggagagaaaccataaaaatgtaagagtttgtgacaaggcttttgggcatgattcgcacctggcacaacatgctagaattcacactggagagaaaccttaccagtgtaatgagtgtggcaaagcctttagtaggcagtcaacacttgtttaccgtcaggcaatccatggtgtagggaaactttactaaggtaatgattgtcacaaagtcttcagtaatgctacaaccattgtgaatcactggagaatccataaggaagagagatcatactagggtaataaatgtggcagatttttcagacattgttcataccttgcagttcatcggtgaactcaacgctggagagaaaccttacaaatgtcatgactgtggcaaggtcttcagtcaagcttcatcctatgcaaaacataggagaattcatacaggagagaaacctcacatgtgtgatgatagtggcaaagccttcacttcacacctcatgagacatcagagaatgcatactggacagaaatcttacaaatgtcatcaatgtgccaaggtcttcagtctgagttcactccttgcagaatatgagaaaattcattttggaggtagttggtccatatgcaatgagtagagcaaaccatcaagcattaattgacattagggtcaattcagcattgacttgagtttgtattgacttaacattgagttcaagcattaattgacattagtgtttatgttaagaggattgggccaggcacatcagcttacacctgtaatctgagcgctttgggaggccaaggtgggtagatcacttgaggtcaggagtttgagatcagcctggccaacagacgtgagccattttcccagcctgttttttgtttctttaaaaaaactgatagggatttttatggatatcatgttgaatctaaatcacattgggttattatataatcatttcacaatattaatttttccaagctatcaatatgggttgtagctcaatgtttttaatcattttgatcaatgtttgtagatttcaaggtacaaacttctgacctttgtacgtttatttctaagtatttctttaagttctccagcaaatggaagtgttttaaaattttcttttaaaattgtttattgttaaagtatggaaattcaactaatttttggtgctgatactgtattgtgcaaatccactgactatgttacttagttccagtagtattttggttggctctttgtgattttctacacagaagattatgtcatctacaaacaaatataattttacttcttactttctg

SEQ ID NO: 203723 - DNA, 2621 bp, Homo sapiens
  Payload ID: 20179
  Gene Name: zinc finger protein 763
  Uniprot ID: Q0D2J5
  ENST ID: ENST00000343949
  CDS Start-End: 156-1349
gtccttgcgcagccggtggttgatatccgctgtatccatccccgagagggacctggtacctctacccaggtttctatcgctctgtctcctgcgctgtgcccttctgtagtcacaggagctgtagagaggaccccaggacatctgaaagccaggaaatgatgtttcaggaccctgtggcctgtgaggatgttgctgtgaacttcacccaggaggagtgggctttgctggatatttcgcagaggaaactctacagggaagtgatgctggaaactttcaggaacctgacctctatagggaaaaagtggaaagaccagaacattgaatatgagtaccaaaaccccaggagaaacttcaggagtctcatagaagggaatgtcaatgaaattaaagaagacagtcattgtggagaaacttttacccaggttccagatgacaggctgaacttccaggagaagaaagcttctcctgaagcaaaatcatgtgataactttgtatgtggagaagttggcataggtaactcatcttttaatatgaacatcagaggtgacattgggcacaaggcatacgagtatcaggactatgcaccaaagccatataagtgtcaacaacctaagaaagccttcagatatcacccctcctttagaacacaagaaaggaatcacaccggagagaaaccctatgcttgtaaagaatgtggaaaaacctttatttcccattcaggcattcgaagacgcatggtaatgcacagtggggatggaccttataaatgtaagttttgtgggaaagctgtccattgtctcagattatatcttatccatgaaagaactcacactggagagaaaccgtatgaatgtaaacaatgtgttaaatcctttagttattctgctacccatcgaatacatgaaagaactcacactggagaaaagccttatgaatgtcagcaatgtgggaaagcattccatagttccagttcttttcaagcacataaaagaacccacactgggggaaagccatatgaatgtaaacaatgtggcaaatccttcagttggtgtcattcctttcaaatacatgaaagaactcacactggggagaagccctgtgaatgtagcaaatgtaataaagcattccgtagttacagatcctatcttagacataaaaggagtcacacgggagagaagccttatcaatgtaaggaatgtagaaaagcattcacgtatcccagttcccttcgtagacatgaaaggacccactctgcgaaaaaaccttatgaatgtaagcagtgtgggaaagcattatcttataagttttcaaacacacctaagaatgcgctctggagaaagaccttataaatgttagatatgtgggaaaggcctttattctgccaagtcatttcgaagacatgaaaaaactcacactggagagaaaccctataaatgcatgccatgtggtaaagccttcaatctttccagttcctttcagtatcatgaaaggactcacactggagagaaaccctatgagtgtaagcaatgtgggaaagccttcagatgtgccccacaccttcgaaggcatggtaggactcactggagagaaaccctatgagtgtaaggaatgtgggaaagccttcagatctgcctcacaccttcaaattcatgaaaggacacaaacacacataagaatacactctggagaaagaccttataaatgtaagacatgtgggaaaggcttttattctcccacgtcatttcaaagacatgaaaaaactcacactgcagagaaaccctatgaatgcaagcaatgtggtaaagccttcagtagttccagttccttttggtaccatgaaaggactcacactggagagaaaccctatgagtgtaagcaatgtgggaaagccttcagatctgcctcaatccttcaaatgcatgctgggactcaccctgaagagaagccctacgagtgtaagcaatgtgggaaagccttcagatctgccccacaccttcgaatccatggtagaactcacactggagagaaaccctatgagtgtaaggaatgtgggaaagccttcagatctgccaagaaccttcgaattcatgaaaggacacaaacacacgtaagaatgcactctgtagaaagaccttataaatgtaagatatgtgggaaaggcttttattctgccaagtcatttcaaatacctgaaaaatcttacactggagagaaaccctatgagtgtaagcaatgtgggaaagcctttatttctttcacttcttttcgataacatgaaaggactcacactggagagaaaccctatgagtgtaagcaatgtggaaaaaccttcagatctacctcacaccttcgaaaacatggtaggactcacactggatagaaaccaaagcaggtgaatcacctgaggtcaggagttcaagactggcctgatcaatatgatgaaacccctgtctctactaaaactacaaaaattggccaggcgtggtggcctgcttctgtaatcctagctagttgggaggctggcacaggagaatcgcttgaatctggggggcagaggttgcagtgagccaagattgtgccattgcactctagcctgggcaacaggagcaaaactccgtctc

SEQ ID NO: 203724 - DNA, 1518 bp, Homo sapiens
  Payload ID: 20179
  Gene Name: zinc finger protein 763
  Uniprot ID: Q0D2J5
  ENST ID: ENST00000358987
  CDS Start-End: 128-1312
gctgtatccatccccgagagggacctggtacctctacccaggtttctatcgctctgtctcctgcgctgtgcccttctgtagtcacaggagctgtagagaggaccccaggacatctgaaagccaggaaatggaccctgtggcctgtgaggatgttgctgtgaacttcacccaggaggagtgggctttgctggatatttcgcagaggaaactctacagggaagtgatgctggaaactttcaggaacctgacctctatagggaaaaagtggaaagaccagaacattgaatatgagtaccaaaaccccaggagaaacttcaggagtctcatagaagggaatgtcaatgaaattaaagaagacagtcattgtggagaaacttttacccaggttccagatgacaggctgaacttccaggagaagaaagcttctcctgaagcaaaatcatgtgataactttgtatgtggagaagttggcataggtaactcatcttttaatatgaacatcagaggtgacattgggcacaaggcatacgagtatcaggactatgcaccaaagccatataagtgtcaacaacctaagaaagccttcagatatcacccctcctttagaacacaagaaaggaatcacaccggagagaaaccctatgcttgtaaagaatgtggaaaaacctttatttcccattcaggcattcgaagacgcatggtaatgcacagtggggatggaccttataaatgtaagttttgtgggaaagctgtccattgtctcagattatatcttatccatgaaagaactcacactggagagaaaccgtatgaatgtaaacaatgtgttaaatcctttagttattctgctacccatcgaatacatgaaagaactcacactggagaaaagccttatgaatgtcagcaatgtgggaaagcattccatagttccagttcttttcaagcacataaaagaacccacactgggggaaagccatatgaatgtaaacaatgtggcaaatccttcagttggtgtcattcctttcaaatacatgaaagaactcacactggggagaagccctgtgaatgtagcaaatgtaataaagcattccgtagttacagatcctatcttagacataaaaggagtcacacgggagagaagccttatcaatgtaaggaatgtagaaaagcattcacgtatcccagttcccttcgtagacatgaaaggacccactctgcgaaaaaaccttatgaatgtaagcagtgtgggaaagcattatcttataagttttcaaacacacctaagaatgcgctctggagaaagaccttataaatgttagatatgtgggaaaggcctttattctgccaagtcatttcgaagacatgaaaaaactcacactggagagaaaccctataaatgcatgccatgtggtaaagccttcaatctttccagttcctttcagtatcatgaaaggactcacactggagagaaaccctatgagtgtaagcaatgtgggaaagccttcagatgtgccccac

SEQ ID NO: 203725 - DNA, 582 bp, Homo sapiens
  Payload ID: 20179
  Gene Name: zinc finger protein 763
  ENST ID: ENST00000592625
  CDS Start-End: 173-313
ttcctgtcctcacctttgtccttgcgcagccggtggttgatatccgctgtatccatccccgagagggacctggtacctctacccaggtttctatcgctctgtctcctgcgctgtgcccttctgtagtcacaggagctgtagagaggaccccaggacatctgaaagccaggaaatggaccctgtggcctgtgaggatgttgctgtgaacttcacccaggaggagtgggctttgctggatatttcgcagaggaaactctacagggaagtgatgctggaaactttcaggaacctgacctctataggagtctcatagaagggaatgtcaatgaaattaaagaagacagtcattgtggagaaacttttacccaggttccagatgacaggctgaacttccaggagaagaaagcttctcctgaagcaaaatcatgtgataactttgtatgtggagaagttggcataggtaactcatcttttaatatgaacatcagaggtgacattgggcacaaggcatacgagtatcaggactatgcaccaaagccatataagtgtcaacaacctaagaaagccttcagatatcacccc

SEQ ID NO: 203726 - DNA, 573 bp, Homo sapiens
  Payload ID: 20179
  Gene Name: zinc finger protein 763
  ENST ID: ENST00000586494
  CDS Start-End: 334-573
gtccttgcgcagccggtggttgatatccgctgtatccatccccgagagggacctggtacctctacccaggtttctatcgctctgtctcctgcgctgtgcccttctgtagtcacaggagctgtagagaggaccccaggacatctgaaagccaggaaatggagtctcatagaagggaatgtcaatgaaattaaagaagacagtcattgtggagaaacttttacccaggttccagatgacaggctgaacttccaggagaagaaagcttctcctgaagcaaaatcatgtgataactttgtatgtggagaagttggcataggtaactcatcttttaatatgaacatcagaggtgacattgggcacaaggcatacgagtatcaggactatgcaccaaagccatataagtgtcaacaacctaagaaagccttcagatatcacccctcctttagaacacaagaaaggaatcacaccggagagaaaccctatgcttgtaaagaatgtggaaaaacctttatttcccattcaggcattcgaagacgcatggtaatgcacagtggggatggaccttataaatgt

SEQ ID NO: 203727 - DNA, 564 bp, Homo sapiens
  Payload ID: 20179
  Gene Name: zinc finger protein 763
  ENST ID: ENST00000481745
  CDS Start-End: 121-564
ccagcctgggcaacaagttgttgttttgaaaatccatctcaaaacaacaacaacaaaaatgctttatggaagaaagtacagaaagcgagaaagggatgtgatgaccaaagcagggaataaatgtttggagtccacggcaacttcttgggaatagagtctaggcccccactgctgtcactctcacccagcctcctctacacatgtgagatgtttcaggaccctgtggcctgtgaggatgttgctgtgaacttcacccaggaggagtgggctttgctggatatttcgcagaggaaactctacagggaagtgatgctggaaactttcaggaacctgacctctatagggaaaaagtggaaagaccagaacattgaatatgagtaccaaaaccccaggagaaacttcaggagtctcatagaagggaatgtcaatgaaattaaagaagacagtcattgtggagaaacttttacccaggttccagatgacaggctgaacttccaggagaagaaagcttctcctgaagcaaaatcatgtgataactttgtatgtggagaagttggcataggt

SEQ ID NO: 203728 - DNA, 2738 bp, Homo sapiens
  Payload ID: 20180
  Gene Name: zinc finger protein 764
  Uniprot ID: Q96H86
  ENST ID: ENST00000252797
  CDS Start-End: 82-1308
ctttctcgggcgcaggaggttccgcaggcccaggccaggccaggggaggcagccgatccgtcgtcggggttgacagttaccatggcgccgcctctggccccgctccctccccgggacccaaacggggccggacccgagtggagggagccgggggctgtgagcttcgcggacgtggccgtgtacttctgccgggaggagtggggctgcttgcggccagcgcagagggccctgtaccgggacgtgatgcgggagacctacggccacctgagcgctctcggaatcggaggcaacaagccagctctcatctcctgggtggaggaggaggccgaactgtggggtccggctgcccaggatccggaggtggcgaaatgtcagacacaaacggacccagcagattccagaaacaagaaaaaggaaagacaaagggaagggacgggagccctggagaagcccgaccctgtggccgccgggtctcctgggctgaagtctccccaagccccctcggccgggcccccttatggttgggagcagctgtccaaggcaccgcaccggggacgcccctccctctgtgcccacccccctgtcccccgagctgaccagcgtcatggctgctacgtgtgcgggaagagctttgcctggcgctccacactggtggagcacgtctacagtcacactggcgagaagcccttccactgcactgactgcggcaagggcttcggccacgcttcctccctgagcaaacaccgggccatccatcgtggggagcggccccaccgctgtctggagtgtggccgggccttcacgcagcgctcggcgctgacttcgcacctgcgcgtccacaccggcgagaaaccctatggctgcgccgactgtggccgccgcttcagccagagctctgccctctaccagcaccggcgcgtgcacagcggcgagacccccttcccctgcccggactgtggccgcgccttcgcctacccctcggacctgcggcgccacgtgcgcacccacaccggcgagaagccctacccgtgcccggactgcgggcgctgcttccgccagagctcggagatggcagcccacaggcgcacccacagcggcgagaagccctacccctgcccgcagtgcggccgccgctttggccagaagtcagccgtggccaaacaccagtgggttcatcggcccggggccgggggccacaggggccgggtcgccgggcgtctgtctgtgaccctgacccctggccacggagacctggacccgcccgtgggcttccagctgtacccggagatattccaggagtgtgggtgacggccttaaaagtgactatctagacattacgggaggcccgagatgggctcaggggcccgaacctctgcggcggcctgcagggaggtcccagaatctagggcaagagctggccctggggtgcggacagtctgatcttgggcccttagcagcctcctctgccagcaccttgctccccactgcccagggctctccaaggccccctctactgaggcagggctgagttgagaacccccagacctacataaggggaaccaaaagctgtttctcagcccagaggtgctaagaggactgaggtagaggagaaccttgttttacccattgtctttttaaattttttatcattatttttattcttgtgaccctcccagaacacaatactcattgtctttttatttatttatttatttatttctgagacagcttcctgctctgtcacccaggctggagtgcagtggtgtgaacagggctaactgcagcctcaacctgcagtgctcaaggaatcctctcccatcagccttccaaatatctgagactacaggcgggcaacactacggccagctaatttttaaattttacatagagatgaggttctcactgttgtccaggctggtctcaaactccttggctgaagtgatcctgtcgtctcggcttccgcaagtgctgggattacaggcgtgagctaccaccatgcctggcttccattgtctttgtgtgtgtgtgtgtgtgatggggttttgctcttgttgcccaggctggagtgcaatagcgcaatctcagctcactgcaacctctgcctccagagttcaagcaattctccttcctcagcctcccaagtagctgggactacaggcacccaccacctccattgtctttttactgcccaagttaaaatcctgtgactgtgtactggatctggcctgcggttgtcatatttattgatctgagtccaggcagtgtttttaagtgatatgagttagtagtgaaaattgaaaaggatattttacaaccaaatacaggttttctggtgtcttttgaaaaatccaaagatttggcaactcgacctaggctccgacaaaaccacagttgttgggagctgagccggagccagaactcacaattcaccgtggcccggccacccatccccaccactcccgtgggctcctgaccaagcaccacgtgccattcatcatggcttgcttttagtgtttttggtgtttatcttaaagtacagcgaagaagaaagggaagtatttcttagacccatgtctctgtccaaataggcctttccatctggcatttcccgctcatttatatgacttgctgagttcctatggtcatttgagtttgcaaacagtggtctgtagcactcaggttttctggagttggagagaaagggtggcaagagagaagtaaaagttggttttatttta

SEQ ID NO: 203729 - DNA, 2970 bp, Homo sapiens
  Payload ID: 20180
  Gene Name: zinc finger protein 764
  Uniprot ID: Q96H86
  ENST ID: ENST00000395091
  CDS Start-End: 317-1540
attttggatgagggtacggagagaacgcggactggagataccgggggcgttgtcttgggcacgactgcgtaggggcaaaggtcgagtacccgcgccgccgccattttttatgagggcatattccatttctgattatacacccgctgccatcggcaccgttagtttccacgccctctagtgcgccctcgggggccctagtaacctccctccttcccttgggcccgggccggggaggctttctcgggcgcaggaggttccgcaggcccaggccaggccaggggaggcagccgatccgtcgtcggggttgacagttaccatggcgccgcctctggccccgctccctccccgggacccaaacggggccggacccgagtggagggagccgggggctgtgagcttcgcggacgtggccgtgtacttctgccgggaggagtggggctgcttgcggccagcgcagagggccctgtaccgggacgtgatgcgggagacctacggccacctgagcgctctcggaatcggaggcaacaagccagctctcatctcctgggtggaggaggaggccgaactgtggggtccggctgcccaggatccggaggtggcgaaatgtcagacacaaacggacccagattccagaaacaagaaaaaggaaagacaaagggaagggacgggagccctggagaagcccgaccctgtggccgccgggtctcctgggctgaagtctccccaagccccctcggccgggcccccttatggttgggagcagctgtccaaggcaccgcaccggggacgcccctccctctgtgcccacccccctgtcccccgagctgaccagcgtcatggctgctacgtgtgcgggaagagctttgcctggcgctccacactggtggagcacgtctacagtcacactggcgagaagcccttccactgcactgactgcggcaagggcttcggccacgcttcctccctgagcaaacaccgggccatccatcgtggggagcggccccaccgctgtctggagtgtggccgggccttcacgcagcgctcggcgctgacttcgcacctgcgcgtccacaccggcgagaaaccctatggctgcgccgactgtggccgccgcttcagccagagctctgccctctaccagcaccggcgcgtgcacagcggcgagacccccttcccctgcccggactgtggccgcgccttcgcctacccctcggacctgcggcgccacgtgcgcacccacaccggcgagaagccctacccgtgcccggactgcgggcgctgcttccgccagagctcggagatggcagcccacaggcgcacccacagcggcgagaagccctacccctgcccgcagtgcggccgccgctttggccagaagtcagccgtggccaaacaccagtgggttcatcggcccggggccgggggccacaggggccgggtcgccgggcgtctgtctgtgaccctgacccctggccacggagacctggacccgcccgtgggcttccagctgtacccggagatattccaggagtgtgggtgacggccttaaaagtgactatctagacattacgggaggcccgagatgggctcaggggcccgaacctctgcggcggcctgcagggaggtcccagaatctagggcaagagctggccctggggtgcggacagtctgatcttgggcccttagcagcctcctctgccagcaccttgctccccactgcccagggctctccaaggccccctctactgaggcagggctgagttgagaacccccagacctacataaggggaaccaaaagctgtttctcagcccagaggtgctaagaggactgaggtagaggagaaccttgttttacccattgtctttttaaattttttatcattatttttattcttgtgaccctcccagaacacaatactcattgtctttttatttatttatttatttatttctgagacagcttcctgctctgtcacccaggctggagtgcagtggtgtgaacagggctaactgcagcctcaacctgcagtgctcaaggaatcctctcccatcagccttccaaatatctgagactacaggcgggcaacactacggccagctaatttttaaattttacatagagatgaggttctcactgttgtccaggctggtctcaaactccttggctgaagtgatcctgtcgtctcggcttccgcaagtgctgggattacaggcgtgagctaccaccatgcctggcttccattgtctttgtgtgtgtgtgtgtgtgatggggttttgctcttgttgcccaggctggagtgcaatagcgcaatctcagctcactgcaacctctgcctccagagttcaagcaattctccttcctcagcctcccaagtagctgggactacaggcacccaccacctccattgtctttttactgcccaagttaaaatcctgtgactgtgtactggatctggcctgcggttgtcatatttattgatctgagtccaggcagtgtttttaagtgatatgagttagtagtgaaaattgaaaaggatattttacaaccaaatacaggttttctggtgtcttttgaaaaatccaaagatttggcaactcgacctaggctccgacaaaaccacagttgttgggagctgagccggagccagaactcacaattcaccgtggcccggccacccatccccaccactcccgtgggctcctgaccaagcaccacgtgccattcatcatggcttgcttttagtgtttttggtgtttatcttaaagtacagcgaagaagaaagggaagtatttcttagacccatgtctctgtccaaataggcctttccatctggcatttcccgctcatttatatgacttgctgagttcctatggtcatttgagtttgcaaacagtggtctgtagcactcaggttttctggagttggagagaaagggtggcaagagagaagtaaaagttggttttatttta

SEQ ID NO: 203730 - DNA, 4569 bp, Homo sapiens
  Payload ID: 20181
  Gene Name: zinc finger protein 765
  Uniprot ID: Q7L2R6
  ENST ID: ENST00000396408
  CDS Start-End: 118-1689
gacccggaagcggacggcgtggagtgactatcccaccgccgcgggattgacttctaaagactcttggtatgtgaggaagaaacctggaagaggaagaggaaagcaaaggagtcagggatggctcttcctcagggtctattgacattcagggatgtggccatagaattctctcaggaggagtggaaatgcctggaccctgctcagaggactctatacagggacgtgatgctggagaattataggaacctggtctccctggatatctcttccaaatgcatgatgaaggagttctcgtcaacagcacaaggcaatagagaagtgttccatgcagggacatctcaaagacatgaaagtcatcacaatggagatttttgtttccaggatattgataaagatattcatgacattgagtttcagtggcaagaagatgaaagaaatggccatgaagcactcatgacaaaaatcaaaaagttgacaggtagtacagagcgatatgatcaaaattatgctggaaacaagcctgttaaatatcagcttggattcagctttcattcgcatctgcctgaactgcacatatttcacactgaagagaaaattgataatcaagttgtgaagtctatccacgatgcttccttggtttcaacagcccaaagaatttcttgtaggcctgaaacccatatttctaatgactatgggaataatttcctgaattcttcattattcacacaaaaacaggaagtacatatgagggaaaaatctttccaatgcaatgacagtggcaaagcctataattgtagctcactcttaaggaaacatcagttaatccatttaggagagaaacaatataaatgcgatatatgtggcaaggtctttaattcgaagcgatacgttgcacgccatcgtagatgtcacactggtgagaaaccttacaagtgtaatgagtgtggcaagaccttcagtcagacatattacctaacatgccatcgtagacttcatactggagagaaaccttacaaatgtgaagaatgtgacaaagctttccatttcaaatcaaagcttcaaatacataggagaattcatactggagagaaaccgtacaagtgtaatgagtgtggcaagacctttagtcagaagtcgtaccttacatgccatcgtaggcttcatactggagagaaaccttacaagtgtaatgagtgtggcaagacctttagtcggaagtcacattttacatgccatcatagagttcatactggagagaaaccttacaagtgtaatgagtgtagcaagacctttagtcacaagtcatctcttacataccatcgtagacttcatactgaagagaaaccttacaagtgtaatgagtgtggcaagaccttcaatcagcagttaacccttaacatttgtagacttcatagtggagagaaaccttacaaatgtgaagaatgtgacaaagcctacagtttcaaatcaaaccttgaaatacatcagaaaattcatactgaagagaatccttacaagtgtaatgagtgtggcaagaccttcagccggacgtcatcccttacataccatcatagacttcatactggacagaaaccttacaaatgtgaagattgtgatgaagctttcagtttcaaatcaaaccttgaaagacataggagaatttatactggagagaaactacacgtgtaatgagtgtggtaagaccttcaatcaggagttaacccttacatgccatcgtaggcttcatagtggagagaaaccttacaaatatgaagaacttgacaaagcttacaatttcaaatcaaaccttgaaatacatcagaaaattcgtactgaagagaatcttacaagtgtaatgagtgtggcaagaccttgagtcatacgtcatcttttgtgtaccatcataaacttcatagtggagagaccttacaaatgtgaagaatgtgaagaagctttctgtttcaaatccaaccttgaaagacataggagaattcacactggtgagaaaccttacaggtgtaatgagtgtggcaagaccttcagccagacctcatcccttacatgccattgtagacttcgtactggagagaaaccttacaaatgtgaagaatttgagttttccatttcaaatcaaaccttgaaagacaaaggagaattcatactggagagaaaccatacaagtgtaatgagtgtggcaagacctttagtcagaactcataccttacacgccatcgtagacttcatactggaggataccttacaaatgtaatgagtgtggcaagacctttagtcagaactcataccttacatgccatcatagacttcatactggagagataccttaaaagtgtagtgagtgtggcaagacctttagtctgaagtcataccttacgcaccatcgtagacttcatactggagaggtaccttacaaggataatgagtgtagaaaaacctttcatgggcagtcagcattttacaaatgtaatgattgtcaccaagtcttgagtaatgctacaactattgcaaatcattggagaatccataatgaagagagatcctacaagtgtgataaatgcagaataaatgcagaaaatttttcagacatccttcatacctttgcagttcatgggtgaagtcgtattagaaaccttacaaatgtgaagaatgtgatgaagctttcagattcaaatcaaaccttgatagtcatagaattcatactagagagaaaccttagcagtgtaatgaacgtggcaaggttttaaatcaaaaagcaaagcttgcacatcatcatagaattcatactggagataaacgttacaaatgtgaagcatgtgacaaagtttacagtcgcaaatcaagcctccaaagacaggagaattcatactggagagaaagcttacatatgtgaagaatgtcaccaagttttcagtcacactcaaaccttgaaagacacaggagaattcctactggagagatagcataaaaatgtaagagtttgtgacaaggctttcaggcataattcgcacctggcacaacatcctagaattcacattggagagaaagcttacaagtataatgaatgtgacaggtctttagtgggcagtcaacacttgtttaccatcaggcaatccatggtgtagggaaactttacttatgtaatgattgtcacaaagtcttcagttacactacaaccattgcgaatcattggagaatccataatgaagagagatcatactagtttaataaatttggcaaatttttcagacattgttcataacttgcagttcatcggcgaactcgtactggagagaaaccttacaaatgtcatgattgtgacaaggtctcagtcaagcttcattctatgcaaaacataggagaattcatacaggagagaaacctcacaagtgtgatgattgcggcaaagcctttaattcacattcacacctcactagacatcagagaatgcatactggacagaaatcttataaatgtcatcagtgtgccaaagtcttcagtctgagctcactccttgcaggatatcagaaaattcattttggagatagttgttccaaatacaatgtgtatagcaaaccatcaagcattaattgacactagagtcagttcagcattgacttgagtttgacttaacattgagttgaagccttaattgacattaaagtgtttatgttaagaggactgggccaggcacagtggctcacacctgtaatctgagcgctttgggaggccagcaccggtagatcacttgagttcaggagtttgaggtcagcctggccaacagacgtgagccattttcccagcctgttttttgtttctttaacaaaaactgatagggatttttttttttttttttgagatggagtttcactcttgttgcccaggctggactgcaatggagcgatcccagctcactacaacctccgcctcccaggttcaagcaattctcctgcctcagcctccagagtagctaggattacaggcatgagccaccacgcccagctaattttgtatttttagtagagatggggtttctccatgttggttaggctggtcttgaactcccagcctcagatgatccacccacctcggcctcccaaagtgctgggattacaggcgtgagccactgcgcccagccccagtgataaggatttttatgggtaccgtgttgaatctaaatcacattgggttatataatcatttaacaatattaatttttccaaaccataagtatgggttgtagctctatgtttctaatcattttgatcaatgtttgtagatttcaaggtaaaaacctctgacctttttacgtttatttctaagtatttcttactttaagttctccagccaatggaagtgttttaaaattttcttttaaagttgtttgttgttaaaagtatggaaattcaactaatttttggtgctgatactgtattgtgcaaatccactgaatatgttacttagttccagtagtattttggttgactctttgtgattttctgcacagaagatcatgtcgtctacaaacaaatataattttacttctttctttct

SEQ ID NO: 203731 - DNA, 522 bp, Homo sapiens
  Payload ID: 20181
  Gene Name: zinc finger protein 765
  ENST ID: ENST00000505866
  CDS Start-End: 139-522
ggacggcgtggagtgactatcccaccgccgcgggattgacttctaaagactcttggtatgtgaggaagaaacctggaagaggaagaggaaagcaaaggagtcagggatggctcttcctcagatatctcttccaaatgcatgatgaaggagttctcgtcaacagcacaaggcaatagagaagtgttccatgcagggacatctcaaagacatgaaagtcatcacaatggagatttttgtttccaggatattgataaagatattcatgacattgagtttcagtggcaagaagatgaaagaaatggccatgaagcactcatgacaaaaatcaaaaagttgacaggtagtacagagcgatatgatcaaaattatgctggaaacaagcctgttaaatatcagcttggattcagctttcattcgcatctgcctgaactgcacatatttcacactgaagagaaaattgataatcaagttgtgaagtctatccacgatgcttccttggtttcaacagcccaaagaatttct

SEQ ID NO: 203732 - DNA, 2059 bp, Homo sapiens
  Payload ID: 20181
  Gene Name: zinc finger protein 765
  Uniprot ID: Q7L2R6
  ENST ID: ENST00000504235
  CDS Start-End: 124-306
cgcgcagacccggaagcggacggcgtggagtgactatcccaccgccgcgggattgacttctaaagactcttggtatgtgaggaagaaacctggaagaggaagaggaaagcaaaggagtcagggatggctcttcctcagggtctattgacattcagggatgtggccatagaattctctcaggaggagtggaaatgcctggaccctgctcagaggactctatacagggacgtgatgctggagaattataggaacctggtctccctggagttgtcaggggagtgtccattggcagcacctgcctcctgagtgtctcccaggccatcaccatcagccccaggagctcaggtgggcagagcttaaagggaacgcccccaagcacgctggctcctgtgtgttcctcagctggctcctccctggtcaatatcattgttctcatgcacgtgaccggcaagtggagcaacaaaaataccacgaagacaaaagatctgggatactgttctgctgctgatcacgagggcaccagagagtcgctgacgcggcactgctgtccttccctgatgtgatctgcctggggctcatgctctggggcagcagctccatcgtttgcatcctgcacaggcacaagcggcgggtccagcacattcataggaccagcgtgtcccccacatcctcccctgagtccggagctaccaaaaccatcctcctggagcaggaaaggacaaggagtccccgaagctgacactgagttcatggggttgagctgacagcggccaacaggctgtgatgggatctcactctgtcggccaggctggaatgcaatggtgccaacttggctcagtgcaacctccccaccccgggctccaacaatcctcccatctcagcctctgaagtagctgggactacaggcgttatctcctgtccggggaagaggtgggcctctctccgtcgtgggaggagctctgaacttctccttcatccagggatgggccccagggacccaccagtggggctgggagaagcccccctcagcaggaagacagaggtgcctgggtggccgaggcctggaaggtctgcaccatggtgcacagaggccccggagctgggtgaggccagaaagctgctctggggtcagcggggaatgtgcctgctgaatctgtacctgagctacgtcttcacaaatggcctcagacctagagtgcagggagatcccctggcttttctgaagtggtggcaggtggtctcctgggtagcaggatctgggctgcttacttcccttacccagtgagggcccgcggggagctcttaagttgggcatcatggggctgcgtgatgtggctgctgtgcccacatcagagggtttttgtttcttttccaaagtcaagctgcactaatctagaccagggatccccacccctgggctgcagaccggtccccatgggtggcctgttaggaactggaccgcacagcaggaggtgagcagtgggtgagtgcgcgtgaccacctgagctctgccttctgtgagatcagcagcgccactgcatctcagaggaatgccaaccctactgtgaactgtgcatgcgagggatctgggttgcatgctctttatgagatcaaactaatgcctgatgatctcaggtggaacagtttaatcctgaaaccatccccccatctgtggaaaaactgccttccactaaaccagtccctggtgccaaaaacactgggaaccgctaatctagacagttctctgctaaggaagcacgtggttgagaagcatcagaatcgttcccacggaccatgctccggagtctcagcaggctcctgcagtgtgtttatccgtgcatcatgaaggaccctcatacggctgacgtgccttggctgatgcgaataacactgcagcaagcgtggcagtgcagatagctcttggaaatacccatttccttcagacgcatactcagaggtaggattgctggattgtttggtcattttgatttttaaaattaaaaagaattttaattctcatattgttttgagtaaaattaaattataacttgtaaggcaa

SEQ ID NO: 203733 - DNA, 884 bp, Homo sapiens
  Payload ID: 20181
  Gene Name: zinc finger protein 765
  ENST ID: ENST00000507045
  CDS Start-End: 113-370
ggaagcggacggcgtggagtgactatcccaccgccgcgggattgacttctaaagactcttggtatgtgaggaagaaacctggaagaggaagaggaaagcaaaggagtcagggatggctcttcctcagagttgtcaggggagtgtccattggcagcacctgcctcctgagtgtctcccaggccatcaccatcagccccaggagctcaggtgggcagagcttaaagggaacgcccccaagcacgctggctcctgtgtgttcctcagctggctcctccctggtcaatatcattgttctcatgcacgtgaccggcaagtggagcaacaaaaataccacgaagacaaaagatctgggatactgttctgctgctgatcacgagggcaccagagagtcgctgacgcggcactgctgtccttccctgatgtgatctgcctggggctcatgctctggggcagcagctccatcgtttgcatcctgcacaggcacaagcggcgggtccagcacattcataggaccagcgtgtcccccacatcctcccctgagtccggagctaccaaaaccatcctcctggagcaggaaaggacaaggagtccccgaagctgacactgagttcatggggttgagctgacagcggccaacaggctgtgatgggatctcactctgtcggccaggctggaatgcaatggtgccaacttggctcagtgcaacctccccaccccgggctccaacaatcctcccatctcagcctctgaagtagctgggactacaggtgtgcctcatcaccatgggctatttttatttttgtattttgtagaggcaaggtcttgccatgtttctcaggctggtctcaaactcctgggctcaagtgatctgcccacttgggcct

SEQ ID NO: 203734 - DNA, 7588 bp, Homo sapiens
  Payload ID: 20181
  Gene Name: zinc finger protein 765
  Uniprot ID: Q7L2R6
  ENST ID: ENST00000594030
  CDS Start-End: 95-277
gtgactatcccaccgccgcgggattgacttctaaagactcttggtatgtgaggaagaaacctggaagaggaagaggaaagcaaaggagtcagggatggctcttcctcagggtctattgacattcagggatgtggccatagaattctctcaggaggagtggaaatgcctggaccctgctcagaggactctatacagggacgtgatgctggagaattataggaacctggtctccctggagttgtcaggggagtgtccattggcagcacctgcctcctgagtgtctcccaggccatcaccatcagccccaggagctcaggtgggcagagcttaaagggaacgcccccaagcacgctggctcctgtgtgttcctcagctggctcctccctggtcaatatcattgttctcatgcacgtgaccggcaagtggagcaacaaaaataccacgaagacaaaagatctgggatactgttctgctgctgatcacgagggcaccagagagtcgctgacgcggcactgctgtccttccctgatgtgatctgcctggggctcatgctctggggcagcagctccatcgtttgcatcctgcacaggcacaagcggcgggtccagcacattcataggaccagcgtgtcccccacatcctcccctgagtccggagctaccaaaaccatcctcctggtgagcacgtttgtgtccttttacactctctcttcacctttcaagtttgtttggctcttttgaataatcccagtcagctggtggtgaacatctctgcaatgatcagtgcaggtttcccaactgtcagccgctttcttctcatgagtggagactcctgtgtatccaagctttgctttgcttagataagtaacacaaaaccccctaatcttatcagaaatatgtgaattggacatgtttgtacaatgtttatgtttcttcattgatctctagagacccataaacacggttatgaaacgaggcttgttagtgctgtgcttgccagcaggggccactgttttattctgtacctcctgatcccccctccaaccacaccgccctggagcagctctgtggaaaaagtggaatcagcttagaggttttggagaggaagatactgaaacgtaaacgatataagaaagtcacggtgcacaaatatacatacctcatttctgtgtcccttggagcagatgggggaatgtgcgcagatgcgaagctcttgctgtaatttatgtgacaaataataaaatatatgttttgtcggatccagaaatctcatgccttcagccaacatccataaactgacagtctaacttgttggcttgtaagtaaggtaaaaatctaaaactggccaggcgcggtggctcacgcctgtaatcccagcactttggagggccgaagcagacggattaactgaggtcgagaatttgagaccagcctgacaaacatggagaaacctcatctctactaaaaaaaaaaaaaaaagaaaagaaaaaagaaaaaacattagccaggcatggtggcacttgcctgtaatccgagctacttgggaggctgaggcagcagaatcacttgaatccaggaggcggtggttgcggtgaaccgagatcgcgccacagcactccattctgtgtgacaagagtgatactctgtctcaaaaaaaaatctaaaacattttgcaatttctgatagttttggtgatgctgagacagatatgactttgtgtaagaggaaggtagaaagattcttcactggcgtggttagtaggcagaaaatggctctctggaacaagcagcgaattctcacccaaactgaggtgaaatgacagtaagacttctccattcttttttttttttttttttgagacggagtttcattcttgttgcctaggctggagtgcaatggtacgatctcggctcactgcaacctctgcctcccaggttcaagtgattctcctgcctcagcctcccaaatagctgggattacaggcatgcgccaccaagcctggctaattttgtattttttagtagagacggggtttcaccatgttgttcaggctggtctcaaactcttgacctcaggtgatccgcccacctcagcctcccaaagtgctgggataacaggcttgagccacagtgcccgaccaagattcctccattctataacccttgaatgggactgttgtgtgagagggaggattgaaatgaactgtccgaatgtgatttatctgttgctcattctcttcctggcaggagcaggaaaggacaaggagtccccgaagctgacactgagttcatggggttgagctgacagcggccaacaggctgtggtaaacgctaatgaaacgagccttgttagtgctgtgcttgccagcaggggtcactgtttccttctgtacctcctgatccctccctccacccacaccgcactgcagcagctctggggaaaaagtggaatcagcttagaagtttttgggaggaagacactgaaagtcctacttttttttttcagatgggatctcactctgtcggccaggctggaatgcaatggtgccaacttggctcagtgcaacctccccaccccgggctccaacaatcctcccatctcagcctctgaagtagctgggactacaggtgtgcctcatcaccatgggctatttttatttttgtattttgtagaggcaaggtcttgccatgtttctcaggctggtctcaaactcctgggctcaagtgatctgcccacttgggcctcccaaagtgctgggattacagacgtgagccaccgtacctggcctaaaactcttttactcctgttgcatgcaaggatttaagtcaccaacgtacgtggattccagcaagaagggtcagtagacgcaggggtgggtaaaggtgctaaggatggtggggtgaagtgtggctgcaaacaggcagaaagagacaagcttctgaccctgaatagtcaccaaatgctggatggtgcaatgctaagaatgcagcacaggccgggcgtggtggctcacacctgtaatcccagcgctttggaaagccaaggtgggtggatcatgaggtcaagagatcgaaaccatcctggccaacatggtgaaaccccgtctctactaaaaatacaaaaattagctgggcgtggtggcatctctttgtctgtgtctttatttattacaatctctcatctccgcatacaggcgttatctcctgtccggggaagaggtgggcctctctccgtcgtgggaggagctctgaacttctccttcatccagggatgggccccagggacccaccagtggggctgggagaagcccccctcagcaggaagacagaggtgcctgggtggccgaggcctggaaggtctgcaccatggtgcacagaggccccggagctgggtgaggccagaaagctgctctggggtcagcggggaatgtgcctgctgaatctgtacctgagctacgtcttcacaaatggcctcagacctagagtgcagggagatcccctggcttttctgaagtggtggcaggtggtctcctgggtagcaggatctgggctgcttacttcccttacccagtgagggcccgcggggagctcttaagttgggcatcatggggctgcgtgatgtggctgctgtgcccacatcagagggtttttgtttcttttccaaagtcaagctgcactaatctagaccagggatccccacccctgggctgcagaccggtccccatgggtggcctgttaggaactggaccgcacagcaggaggtgagcagtgggtgagtgcgcgtgaccacctgagctctgccttctgtgagatcagcagcgccactgcatctcagaggaatgccaaccctactgtgaactgtgcatgcgagggatctgggttgcatgctctttatgagatcaaactaatgcctgatgatctcaggtggaacagtttaatcctgaaaccatccccccatctgtggaaaaactgccttccactaaaccagtccctggtgccaaaaacactgggaaccgctaatctagacagttctctgctaaggaagcacgtggttgagaagcatcagaatcgttcccacggaccatgctccggagtctcagcaggctcctgcaggtgagccccactggcctctcctcttccttccggacctcctcagctttggtaatggaaagctgcatcctcttctgtccccagttcctctctgggtgtcaggatctctaaaaccctctcagccgctgagaagtctgtctgtctgtctcacagtgtgtttatccgtgcatcatgaaggaccctcatacggctgacgtgccttggctgatgcgaataacactgcagcaagcgtggcagtgcagatagctcttggaaatacccatttccttcagacgcatactcagaggtaggattgctggattgtttggtcattttgatttttaaaattaaaaagaattttaattctcatattgttttgagtaaaattaaattataacttgtaaggcaactccatgttttttagaatttttaagaaaaataattgctctaccaattgactgtcccaacaacaacgtacaggggtattttttttcctccgcatcctcaccacttgttaccttttgtctttttaataatagcaatcctaagacatgtgaagtgatacctcactgtgattttgattggcattttccagatgattagtctattcaggccctttacttttttttgttgttgttgttgtttttgagatggattctcactctgttgcccaggctggagtgcgatggcacgatctcggctcactgcaacctccgccttccggggaggcgtgattagccaccacgcccggctaacttttgtattttagtagagatgaggtttcaccatcttggccaggctggtctcgaccccctgatctcaggtgatccactttgcccagcctcccaaattgttgggattacaggtgtgagccaccacgcccagcccctttgctcttttttaatagggttattactattaccatatttgcttttgagttgtgagtgttccttatatattttggatataaactccttatcacaggtatggtatatatggtttgaaatattttctcccattatcatgccccaatatcactaagttacatttcactgctccctcttgaacacctgaaaaaatttcctatttccatgtgtctgtatccaggttattgtcacttttacctgaagacacatttatatatgctgatattccccaataactaatatatttttactcttttttttttttttgagatggagtcctgctctgtcacccaggctggagtgcagtggcatgatctcagctcactgcaacctctgcctcccaggttcaagtgattctccttcctcagcctcccaggttgctgggattacaggcacatgccaccaccactagctaatttttttgtatttttattagagatgcggtttcaccacatgggtcaggctggtcttgaactccggacgtcatatgatccacccgcccttggtctcccaaggtgctgggattataggcatgagccgctgcacccggccctaactaatatattttaaataactttttgctcttggcacatggactaaaaccacatcaccaggccttcaatgacgtccaatgtctgccatcttatttccactccagctccgccccaggcatagttgcctttctttttattgaagccttctccttgccaagttaattaaagagaatgttttcttcatcaaattagaaattacatcctcagagctttccagtatttgtagttcttacaggccacatttattacaagtttatagactccaaacttctccactgaacagttaataaaaaggacacaggcttattgtaaaataattcatttagtgcctgccattctgattacactagaaatttagttctcctgctcagcgttctgttatgtgactgttcaatgcattacttaaaactgcaagattgaatagagagatcagcttctgacactgatgaatgcaaaccacaagaaaccaagtctcctctgcaaaatgatgaaaacactcgcaaagtcactaaaatcaatcatttcagacttctgaaatttaccaaagccacagaacaaagtgaaaagtatctatcccacagaaagtaccaaacttcagtaagacagcagcatttgtgtcattttaatgtggaggcattaccattaccctccatccttcgttcagtgtagagcactgacctcttttgaagctccttttaaacacctcctatcaggccagtcgcggtggctcaagcctgtaatcccagcactttggacgacagagcgagactccatctgaaaaaaagaaagaaaaaaaaaagagaaagtgacttttcaagactgtgatttatggtctcccctgggaaccaacagtatctgtgctgagagcagatatttgggtggaaggggctctggtgtgcagggcatgccttctgtagctcagtgcttctgacaatgggtccgaggggagaaacattggcattaacagggaacttgttaaagatgccaatttataaatgctacctcaaacctgcagaatcaaacattattacagtgggttgtggagtgccagatgacttatattcaccttaaagcttgagagtcagtgcttagctaagaggctctcagcccaggcttccagttggatcaaatggtcatattcagttactaccatcacctgtgccctccccatagcgtctgtctattggtgtcgggggaaacatccatgctgtttcaattaactaccctgcccccaggtgattctagggtgaggagaagtccagcatgagggcttccatatgcatttgtgaaggttgatggcagactgttccaaatgagaataatggtttccgtgatatgataaaagcaatgctattgaatatgatgatgactgatgagaagttttgcatagcattcgctgtaaaaaagccacttataggctgggcacggtggctcacgcctgtaattccagcattttcggaggctgaggtgagcagatcaccggaggtcaagagttcaagaccagcctggctaacatggtgaaaccctgtctcaactaaaaatgcaaacattagccagatgtggtggtggatgcctgtaatcccagctacttgggaggctgaggcaggagaactgcttgaatctgagaggtgtaggttgcagtgagctgacatcatgcctctgcactccagcctgggtgagagagcaagactacgtccaaaaaaaaaaaaaaagagagagagaattttcctgtaaataattaaaaagactaagcagccccagagataagacctcctgggatcattgtccctttatattgagtgataaagtaaccttccttgaagtatatcaatccataaccaatcaccttgctgcaccctatgtactggtcttgaatggaaaatgtggtgattcttctaaagcttctctgtctttccgtgtgtgtgaaacctaagggaacgctgatcccattcatttggagttgatgtttccaggtggctatcctcatgctttgtgttcaaataaactctgtgcttaatcat

SEQ ID NO: 203735 - DNA, 6298 bp, Homo sapiens
  Payload ID: 20182
  Gene Name: zinc finger protein 766
  Uniprot ID: Q5HY98
  ENST ID: ENST00000439461
  CDS Start-End: 44-1450
gcgcgcagccgcctgcagacccggaagtggatggcgtggagatatggcgcaactgcggcgcggacacttgacattcagggacgtggccatagaattctctcaggaggagtggaaatgcctggaccctgtgcagaaggctttatacagggatgtgatgttggagaactacaggaacctggtctccctgggaatctgtcttcctgacctgagtattatctccatgatgaagcaaaggacagagccctggactgtggagaatgaaatgaaagtagcaaaaaatccagataggtgggaaggtatcaaagatatcaacacagggaggagctgtgcagtgagaagcaaagcaggaaacaagcctattacaaatcaacttggattaacctttcagttacctctgccagaactggagatatttcaaggtgaagggaagatttatgaatgtaatcaagttcaaaagttcatcagccacagttcttcagtttcgccacttcaaagaatttactctggggtcaaaacccacatatttaataaacataggaatgattttgttgattttccattgctgtcacaagaacagaaagcacacattaggagaaaaccttacgaatgtaatgagcagggcaaagtcttcagagtgtcttcaagccttcctaatcatcaagtaatccacactgcagataaacctaacagatgtcatgaatgtggtaaaaccgtcagggacaagtcaggcctcgcagaacattggagaattcgtacaggagagaaaccttacaaatgtaaagagtgtggcaagctcttcaatcgaattgcataccttgcacgacacgagaaagtgcatactggagagagtccttacaaatgtaatgagtgtggcaaggtcttcagtcgaattacataccttgtacgacatcagaaaattcatactagagagaaacctcataaatgtaacaaatgtggcaaggtttatagtagcagttcatacctagcacaacattggagaattcatacaggagagaaactttacaaatgtaataaatgtggcaaagaatttagtgggcattcaagcctcaccacccatctgttaatccacactggagagaaaccttacaaatgtaaagaatgtgacaaagcttttaggcacaagttctccctgacagttcatcagagaaatcataatggagagaaaccttataaatgtcatgaatgtggcaaagtcttcactcaagtttcacatcttgcacgacatcagaaaattcacactggagagaaaccttacaaatgtaatgagtgtggcaaagtcttcactcagaattcacaccttgcaaatcatcagagaatccacactggagagaaaccttacaaatgccatgtgtgtggtaaggtctttaggcacagttcatggtttgtacagcatcagagaagtgttcatgagagagtccttacaaactgagtttggcaaactctatcataagttctagcagtaatcaacatccgagagtctatactagaaagaaatcatttaaatgtactatatgtggcacaggctgtatcgagacctaccaaatcactagacatcgaaacattcatctttggtgaaaccacacaaatggattgtgtgtgccaaggccaacaagtcaaaatatgttgaacctaatgatatgatgtgtataaagggtgcaaggacacgtggaaatgatctgtaatattcgggttattaaaaatgtaattggctgggcgcagtggctcacacctgtaatcctagcactttgggaggttgaggcaggtggatcacaaggtcaggagtttgagaccagcctggccaatatggtgaaacaccatatctactataaatacaaaaaaattagccaggcgtggtggcacatgcctgcaatcccagctactcgggaggctgaggcaggagaattgcttgaatccaggaggcagaggttgttgcagtgagctgagatcgcgccactgcactccaacctgggtgacagagcgagactccgtctcaaaaaaaaaaaaaaattatttgggtttgaaaggccaggggcagtggttcatgcctataatctcagcacaatagaaagccaagacaggagggtcacttgatgcctggagatcaagataagtatgggcaacgtagcaaggcccatccctacaaaataaaaaaaataagccaggcccttggcatgtgtctgtagttccagctactcaagaggccgaggcaagaggattgctcaagcccaggagtttgagagtttgagcagtgagctctgatcttgccatttgtactccagcttgggtgacagagcgagaccctgtctcaaaagaaaaaaaaggctagtttttatgacttcaacctgaactttgaaatttcttcatgtgccttccctacaggcctttcactgtggtctgggaaagaatcagtaagatgacagggctgacttcattagatgaggagcgtttctatccagtttcctggaggaataaggacactgccttttcagattaaagattgtctgatttagagaccatggaggtggacagagaataacaaaaccgtgatggcagtcatcatgcttattgcagttagcacacacttttcctgacaggcacagtgctgctgtgctctacaaatgaccatgaaatagagcacgccatgactttaggacacagggatttttatgggaagagagttcatcagggactgattacgtaggagagacgatgcaggggaaatggtggccaccgtctccattgaatagcaatagctgctgtttagcaaagactgattaaaaagtactctgatttttcaaatggaagagagaacagttaaatcagagtagagagtttaatcaaaactaccagtggaacatgttcttgagtaggattcacatttaactgctggcataatttgcaactgttggattttctcatgtttggaacaataaagttgaaattttccaaagtgtgaatgatttaccttctttctaccaatattgttttatctcgtctcaggaggatactttatagcagacaataataaggcaccattaggatttttaaattaatttatttttaaaattaaagttctagtgtacatgtccacaacatgcaggtttgttacataggtatacatgtgccatattcgtttgctgcacccatcaacttgtcatttacgttagatatttctcctaatgttatccctctgccagccccccaccccccgacaggccccggtgtgtgatgttacccgccttgtgtccaggtgttctcattgatcaattcccacctatgagtgagaacatggggtgtttggtcttctgtcactgtgatagtttgctgagaatgatggtttccagcttcatcaatgtccctgcaaaggacatgaactcatcctttttatggctgcatagtattccttttttttttttttttttgagatgaagttttgctctgtcactcaggctgaagtgcaatggcacgatcttggctcactgcatcctctgcctcccgggttcaagtgattctcctgtctacacctcccaagtagctggattacaggcatgcaccaccatacccggctaatttttttgtatttttagtagagatggggtttcaccatgttggccaggccggtctcgaagtcctgacctcgggtgatccagccacctcgggttcccgaagtgctaagattacaggcatgagccacggcgcctggccaggatttttaaggttgaagcatccacaacaattttgtgtgtgaaatgaaatgacatgcacttttgggtatatacacttgggtaagtatgattttgggtaataatacttagtacttaagttattctctctactctttgtttttgttttttgtttgttttgttttgttttgagatggagtttcgctcttgtttcccaggctggagtgcaatggtgtgatctcggctcaccgcaacctccgccttccaggttcaagtgattctcctgcctcagcctcccgagtagctgggattacatgcatgtgccaccatgcccagctaattttgtttttttagtagagacagggtttctccatattggtgaggctggtctcgaactcctgacctcaggtgatctgcccacctcggcctcccaaagtgctgggattataggcatgagccaccacacttggcctacctctctactctgccctaagatgcttttgtgggtaaagtgaaaatcacataacagtgcagcttcatcatcatatgccctcaatgttcatcactgttgataaacatgcactgtattatgtttctgtgtgcctttttcttgtgtgccaagtaagacccatggcaggcaccttcattttcaggaagcgaaaatacagatacagtaatatggaaaataggacaaagtgtggacttcaggatgaaaatattgtaacaatcttgctgttgacctcgtagcgctcagtgacataatttgaaaaaatattaatgttcagaaatgttctcttgaggatgaacacacagattgggaatttcgttttgctttggtagattaactagaaacttcacattttcacccttataacctttttggtaatttgaacttttgatcattcttctggaactgctttgacatccacctgaagtttggtttgggtattgagaatgatgatgccattcactaatgtgatctcaaaatgtttactccataatgaggctttctggggagagcagggtagacttccccggttggtccaaatatgactagggaatcggcataggtgactggcttggggtatgatgattgttaagggatagggcttgggcaggggtgcccacttgtggtttgaactttcagctggtgccaaaggagtgggcactgaggatttttcagttgaccagatgggcagaataggaagagggagtgcagaggtgtaaaaggcgttggtgttcagacatcacaaaatgcagtcaactctaggacaactctagcttcctctggaagctcctgccatcttggttaggaaagactctgattttcttcatgataatatcttacgttccttttatagttacagatacaggtctcattgcacaatatgattgttgaaaacacttgtgaaatttttttagtaaaattgcctaagatactttttatagtagacaatgaaaattagtgtgtgggtttataataaatataatgtattatataatatgattaaaatatatttgttataaatatgatattactagaagagcatttttccaaaagctatggaaatgtcattttcccgttacagcatcaagcaatatattccatggttcattttcaactctaataaaattatattttgtgtttatatatgcacgtatagacacatatataatattttttttttacttttttctttttctgtacattgcatccagatgctatgcttgtttgtttttttttttgagacagagtcttgctctgtcacccaggctggagtgcagcggtgtgatcttggctcattgcagcctccgcctcccaggctcaagtgattctcctgcctcggcctcccgaatagctgggattacagacatgcaccatcaccacacctggctaatttttgtatttgtaatagagatggggtttcaccatgttggccaggcatggtcttgaactcctgacttcaggtgatccacccgcttcggcctcccaaagtgttgggattacaggcatgagccaccatgcccggccagatgctatgcttaatacattttttccgaatgtcactctagtgaaaattttaggggacacaaaaatgagactgttgtttggagacaatattttttgacaagagtatgcacaagacaatggcaggtataaacgttttattgtaaatatgaaaaaggaaaaaatgctttcactatattagaggacttgaagtaacgtgaagtgattccaaccctttatctttattttatttatttattttattatttatttttttgagatggagtttcactcttgttgcctaagctggagtgcaatggagtgatctcagctcactgcaaccttcacctcccgggagcatgctgctctatcttttttttcagatgtttgagctattccaggttttttgggatttctgttggtttgttttgttttttgcttttctacataattgtttggataatcttgtcagtatctacgaagtgccttgatagtaaatatattaaccctgtgtatcaatttggggtaatttcacatttttttctatgttgagtttatcaataaattgatattgtatatgtctcta

SEQ ID NO: 203736 - DNA, 2331 bp, Homo sapiens
  Payload ID: 20182
  Gene Name: zinc finger protein 766
  ENST ID: ENST00000593612
  CDS Start-End: 378-1793
aaacagctttaacctggatgtggaggaggatgacattgagaatctcttagaggattgacttctaaagagtcatgttggccgggcgcgggggctcatacctgtaatcccggcactttgggaggccgagacgggcagatcacgaggtcaggagatcaagaccatcctggctaacacggtgaaaccccgtctctactacgaatacaaaaaattacctgggcgtgttggcgggcacctgtagtcccagctactcaggaggctgaggcaggagaatggtgtgaacccgggaggcggagcttgcagtgagctgagatcgggccacggcactccagcctgggtgacagagtgagactccgtctcaaaaaaaaacaaaaaaagtcatgttatgtgaaggagaagcccagaagaggaaagcagaggagtcaggcatgccacttactcagggacacttgacattcagggacgtggccatagaattctctcaggaggagtggaaatgcctggaccctgtgcagaaggctttatacagggatgtgatgttggagaactacaggaacctggtctccctgggaatctgtcttcctgacctgagtattatctccatgatgaagcaaaggacagagccctggactgtggagaatgaaatgaaagtagcaaaaaatccagataggtgggaaggtatcaaagatatcaacacagggaggagctgtgcagtgagaagcaaagcaggaaacaagcctattacaaatcaacttggattaacctttcagttacctctgccagaactggagatatttcaaggtgaagggaagatttatgaatgtaatcaagttcaaaagttcatcagccacagttcttcagtttcgccacttcaaagaatttactctggggtcaaaacccacatatttaataaacataggaatgattttgttgattttccattgctgtcacaagaacagaaagcacacattaggagaaaaccttacgaatgtaatgagcagggcaaagtcttcagagtgtcttcaagccttcctaatcatcaagtaatccacactgcagataaacctaacagatgtcatgaatgtggtaaaaccgtcagggacaagtcaggcctcgcagaacattggagaattcgtacaggagagaaaccttacaaatgtaaagagtgtggcaagctcttcaatcgaattgcataccttgcacgacacgagaaagtgcatactggagagagtccttacaaatgtaatgagtgtggcaaggtcttcagtcgaattacataccttgtacgacatcagaaaattcatactagagagaaacctcataaatgtaacaaatgtggcaaggtttatagtagcagttcatacctagcacaacattggagaattcatacaggagagaaactttacaaatgtaataaatgtggcaaagaatttagtgggcattcaagcctcaccacccatctgttaatccacactggagagaaaccttacaaatgtaaagaatgtgacaaagcttttaggcacaagttctccctgacagttcatcagagaaatcataatggagagaaaccttataaatgtcatgaatgtggcaaagtcttcactcaagtttcacatcttgcacgacatcagaaaattcacactggagagaaaccttacaaatgtaatgagtgtggcaaagtcttcactcagaattcacaccttgcaaatcatcagagaatccacactggagagaaaccttacaaatgccatgtgtgtggcctttcactgtggtctgggaaagaatcagtaagatgacagggctgacttcattagatgaggagcgtttctatccagtttcctggaggaataaggacactgccttttcagattaaagattgtctgatttagagaccatggaggtggacagagaataacaaaaccgtgatggcagtcatcatgcttattgcagttagcacacacttttcctgacaggcacagtgctgctgtgctctacaaatgaccatgaaatagagcacgccatgactttaggacacagggatttttatgggaagagagttcatcagggactgattacgtaggagagacgatgcaggggaaatggtggccaccgtctccattgaatagcaatagctgctgtttagcaaagactgattaaaaagtactctgatttttcaaatggaagagagaacagttaaatcagagtagagagtttaatcaaaactaccagtggaacatgttcttgagtaggattcacatttaactgctggcataatttgcaactgttggattttctcatgtttggaacaataaagttgaaattttccaaagtgtg

SEQ ID NO: 203737 - DNA, 554 bp, Homo sapiens
  Payload ID: 20182
  Gene Name: zinc finger protein 766
  ENST ID: ENST00000593703
  CDS Start-End: 78-554
agacccggaagtggatggcgtggagatatggcgcaactgcggcgcgaatctgtcttcctgacctgagtattatctccatgatgaagcaaaggacagagccctggactgtggagaatgaaatgaaagtagcaaaaaatccagataggtgggaaggtatcaaagatatcaacacagggaggagctgtgcagtgagaagcaaagcaggaaacaagcctattacaaatcaacttggattaacctttcagttacctctgccagaactggagatatttcaaggtgaagggaagatttatgaatgtaatcaagttcaaaagttcatcagccacagttcttcagtttcgccacttcaaagaatttactctggggtcaaaacccacatatttaataaacataggaatgattttgttgattttccattgctgtcacaagaacagaaagcacacattaggagaaaaccttacgaatgtaatgagcagggcaaagtcttcagagtgtcttcaagccttcctaatcatcaagtaatccacactgcagataaacctaacagatgtcat

SEQ ID NO: 203738 - DNA, 552 bp, Homo sapiens
  Payload ID: 20182
  Gene Name: zinc finger protein 766
  ENST ID: ENST00000595149
  CDS Start-End: 302-552
aaacagctttaacctggatgtggaggaggatgacattgagaatctcttagaggtggttcatgaggaatgggttaatgaggagtcattggaactgatacaggaacatgtagctgaagaagaggcaagagaatagggaactggctgggcacggtggctcacatctataatccctgcactttgggaggccgaggcaggtggatcacttgagggacacttgacattcagggacgtggccatagaattctctcaggaggagtggaaatgcctggaccctgtgcagaaggctttatacagggatgtgatgttggagaactacaggaacctggtctccctgggaatctgtcttcctgacctgagtattatctccatgatgaagcaaaggacagagccctggactgtggagaatgaaatgaaagtagcaaaaaatccagataggtgggaaggtatcaaagatatcaacacagggaggagctgtgcagtgagaagcaaagcaggaaacaagcctattacaaatcaacttggattaacctttcagttacctctgccagaact

SEQ ID NO: 203739 - DNA, 2065 bp, Homo sapiens
  Payload ID: 20182
  Gene Name: zinc finger protein 766
  ENST ID: ENST00000599581
  CDS Start-End: 22-339
ggaagtggatggcgtggagatatggcgcaactgcggcgcggacacttgacattcagggacgtggccatagaattctctcaggaggagtggaaatgcctggaccctgtgcagaaggctttatacagggatgtgatgttggagaactacaggaacctggtctccctgggaatctgtcttcctgacctgagtattatctccatgatgaagcaaaggacagagccctggactgtggagaatgaaatgaaagtagcaaaaaatccagataggtgggaaggtatcaaagatatcaacacagatggagtcctgttctgtcgcccaggctggagtacagtggtgtgatctcggctcactgcaacttccgcctcccagggaggagctgtgcagtgagaagcaaagcaggaaacaagcctattacaaatcaacttggattaacctttcagttacctctgccagaactggagatatttcaaggtgaagggaagatttatgaatgtaatcaagttcaaaagttcatcagccacagttcttcagtttcgccacttcaaagaatttactctggggtcaaaacccacatatttaataaacataggaatgattttgttgattttccattgctgtcacaagaacagaaagcacacattaggagaaaaccttacgaatgtaatgagcagggcaaagtcttcagagtgtcttcaagccttcctaatcatcaagtaatccacactgcagataaacctaacagatgtcatgaatgtggtaaaaccgtcagggacaagtcaggcctcgcagaacattggagaattcgtacaggagagaaaccttacaaatgtaaagagtgtggcaagctcttcaatcgaattgcataccttgcacgacacgagaaagtgcatactggagagagtccttacaaatgtaatgagtgtggcaaggtcttcagtcgaattacataccttgtacgacatcagaaaattcatactagagagaaacctcataaatgtaacaaatgtggcaaggtttatagtagcagttcatacctagcacaacattggagaattcatacaggagagaaactttacaaatgtaataaatgtggcaaagaatttagtgggcattcaagcctcaccacccatctgttaatccacactggagagaaaccttacaaatgtaaagaatgtgacaaagcttttaggcacaagttctccctgacagttcatcagagaaatcataatggagagaaaccttataaatgtcatgaatgtggcaaagtcttcactcaagtttcacatcttgcacgacatcagaaaattcacactggagagaaaccttacaaatgtaatgagtgtggcaaagtcttcactcagaattcacaccttgcaaatcatcagagaatccacactggagagaaaccttacaaatgccatgtgtgtggtaaggtctttaggcacagttcatggtttgtacagcatcagagaagtgttcatgagagagtccttacaaactgagtttggcaaactctatcataagttctagcagtaatcaacatccgagagtctatactagaaagaaatcatttaaatgtactatatgtggcacaggctgtatcgagacctaccaaatcactagacatcgaaacattcatctttggtgaaaccacacaaatggattgtgtgtgccaaggccaacaagtcaaaatatgttgaacctaatgatatgatgtgtataaagggtgcaaggacacgtggaaatgatctgtaatattcgggttattaaaaatgtaattggctgggcgcagtggctcacacctgtaatcctagcactttgggaggttgaggcaggtggatcacaaggtcaggagtttgagaccagcctggccaatatggtgaaacaccatatctactataaatacaaaaaaattagccaggcgtggtggcacatgcctgcaatcccagctactcgggaggctgaggcaggagaattgcttgaatccaggaggcagaggttgttgcagtgagctgagatcgcgccactgcactccaacctgggtgacagagcgagactccgtctc

SEQ ID NO: 203740 - DNA, 559 bp, Homo sapiens
  Payload ID: 20182
  Gene Name: zinc finger protein 766
  ENST ID: ENST00000595000
  CDS Start-End: 215-559
aaacagctttaacctggatgtggaggaggatgacattgagaatctcttagaggtggttcatgaggaatgggttaatgaggagtcattggaactgatacaggaacatgtagctgaagaagagggacacttgacattcagggacgtggccatagaattctctcaggaggagtggaaatgcctggaccctgtgcagaaggctttatacagggatgtgatgttggagaactacaggaacctggtctccctgggaatctgtcttcctgacctgagtattatctccatgatgaagcaaaggacagagccctggactgtggagaatgaaatgaaagtagcaaaaaatccagataggtgggaaggtatcaaagatatcaacacagggaggagctgtgcagtgagaagcaaagcaggaaacaagcctattacaaatcaacttggattaacctttcagttacctctgccagaactggagatatttcaaggtgaagggaagatttatgaatgtaatcaagttcaaaagttcatcagccacagttcttcagtttcgccacttcaaagaatt

SEQ ID NO: 203741 - DNA, 568 bp, Homo sapiens
  Payload ID: 20182
  Gene Name: zinc finger protein 766
  ENST ID: ENST00000600821
  CDS Start-End: 236-538
aaacagctttaacctggatgtggaggaggatgacattgagaatctcttagaggtggttcatgaggaatgggttaatgaggagtcattggaactgatacaggaacatgtagctgaagaagaggcaagagaatagggaactggctgggcacggtggctcacatctataatccctgcactttgggaggccgaggcaggtggatcacttgagcaatttccagtcctccaagctccattcatgggacacttgacattcagggacgtggccatagaattctctcaggaggagtggaaatgcctggaccctgtgcagaaggctttatacagggatgtgatgttggagaactacaggaacctggtctccctgggaatctgtcttcctgacctgagtattatctccatgatgaagcaaaggacagagccctggactgtggagaatgaaatgaaagtagcaaaaaatccagataggtgggaaggtatcaaagatatcaacacagatggagtcctgttctgtcgcccaggctggagtacagtggtgtgatctcggctcactgcaacttccgcctcccag

SEQ ID NO: 203742 - DNA, 588 bp, Homo sapiens
  Payload ID: 20182
  Gene Name: zinc finger protein 766
  ENST ID: ENST00000601711
  CDS Start-End: 365-588
ggaagtggatggcgtggagatatggcgcaactgcggcgcgattgacttctaaagagtcatgttggccgggcgcgggggctcatacctgtaatcccggcactttgggaggccgagacgggcagatcacgaggtcaggagatcaagaccatcctggctaacacggtgaaaccccgtctctactacgaatacaaaaaattacctgggcgtgttggcgggcacctgtagtcccagctactcaggaggctgaggcaggagaatggtgtgaacccgggaggcggagcttgcagtgagctgagatcgggccacggcactccagcctgggtgacagagtgagactccgtctcaaaaaaaaacaaaaaaagtcatgttatgtgaaggagaagcccagaagaggaaagcagaggagtcaggcatgccacttactcagggacacttgacattcagggacgtggccatagaattctctcaggaggagtggaaatgcctggaccctgtgcagaaggctttatacagggatgtgatgttggagaactacaggaacctggtctccctgggaatctgtcttcctgacctgagtattatctccat

SEQ ID NO: 203743 - DNA, 2315 bp, Homo sapiens
  Payload ID: 20183
  Gene Name: zinc finger protein 768
  Uniprot ID: Q9H5H4
  ENST ID: ENST00000380412
  CDS Start-End: 177-1799
cgcgctggagaggcgcggggtcaagacgtccggcctcgggggcccgggctgggccgccgagtcccctgggcggcgctgagcgggcgggaggcgggggcccgcggctcggggcaaccgaggccgggtcgcgggatcggccgccatcgccgccgccgctgcactgggagcccgcggggatggagcgggaggcgttgccgtggggcctcgagccccaggatgtgcagagttctgacgaaatgaggagccccgaagggtacctcagaggcaacatgagtgagaatgaggaagaggaaatttctcagcaagaaggcagtggggactatgaagtcgaagagataccatttgggcttgaaccccagagccctgggtttgagccacaaagcccagagtttgaaccccaaagccccagatttgagcctgaaagcccggggtttgagtcccgaagccctgggcttgtgcccccaagccctgagtttgcacccagaagccctgaatcagattctcagagccctgagtttgaatcccagagccctaggtatgaaccccaaagccctggctatgaacctcggagccccgggtatgaaccccggagccctggctatgaatctgagagctctagatatgaatcccagaacactgagctcaaaacccaaagcccagaatttgaagctcaaagttccaaattccaggaaggtgcggagatgcttctgaaccccgaggaaaagagtcctttgaatatctccgtaggagttcaccccctggactccttcactcaggggtttggggagcagcccacaggggacctgcccatagggccaccttttgagatgcccacaggggccctgctgtctacaccgcagtttgagatgcttcagaatcccctgggtctcacaggagcccttcgaggtccaggtcggcggggtggccgggccaggggtgggcagggccctcggcctaacatctgtggcatctgcgggaagagcttcgggcggggctccaccctgatccagcaccagcgcatccacaccggtgagaagccctacaaatgtgaggtctgcagcaaggccttctcccagagctctgacctcatcaaacaccagcgcacccacactggcgagcggccctacaaatgtccccgttgcggcaaggccttcgccgacagctcttacctgcttcgccaccagcgcactcactctggccagaagccctacaagtgcccacattgtggcaaggccttcggcgacagctcctacctcctgcgacaccagcgcacccacagccacgagcggccctacagctgcaccgagtgcggcaagtgctatagccagaactcgtccctgcgcagccatcagagggtgcacaccggtcagaggcccttcagctgtggcatctgcggcaagagcttctcccagcggtcggcccttatcccccatgcccgcagccacgcccgggagaagcccttcaagtgccctgagtgcggcaagcgctttggccagagctcggtgctggccatccacgcccgcacccacctgccaggccgcacctacagctgccccgactgcggcaagaccttcaatcgctcctccactctcatccagcaccagcgctcccacacgggcgagcggccctacaggtgcgccgtgtgcggcaagggcttctgccgctcctccacgcttctgcagcatcaccgggtccacagtggcgagcggccttacaagtgcgatgactgcggaaaggccttctcccagagctccgacctcatccgccaccagcggacccacgcggcgggccggcgctgacctggggccccagcaggggtgggaggtgtgggcagaagataaggggccagggagctagaggaacctttagggaggatagtggagaagccgcaggagaatggaggagctgaggatgctggaagaagagaaccagggtggaggaagtgacatgccctggagacttgtgggaagtgggttggagggaggccaggccggcagcgggaggccctgggagaaatggagagaggtcagcggagggctggcctcagccgcggctccttggtgggtgcctggcttggcaactgctagagcagggaggggggagggcaggggattacctaattagagtgggttagcttagattggtagctgctgaaactctcgttgagtcaggagcgggtaaaaggtaggtggggtggggagtggggccccggggtggggcctgggcctctgcgtgcaaaccccagcctccctcttcttcctcaggctttggagcccctgagtttgagttcaataaaaactttatgtggtaaacga

SEQ ID NO: 203744 - DNA, 1999 bp, Homo sapiens
  Payload ID: 20183
  Gene Name: zinc finger protein 768
  ENST ID: ENST00000562803
  CDS Start-End: 86-1615
acttcctgtgcgggggagggtgggggggtgctgggcggccgttggacagtgcagcccagcccggggccggggtccagaaggcaacatgagtgagaatgaggaagaggaaatttctcagcaagaaggcagtggggactatgaagtcgaagagataccatttgggcttgaaccccagagccctgggtttgagccacaaagcccagagtttgaaccccaaagccccagatttgagcctgaaagcccggggtttgagtcccgaagccctgggcttgtgcccccaagccctgagtttgcacccagaagccctgaatcagattctcagagccctgagtttgaatcccagagccctaggtatgaaccccaaagccctggctatgaacctcggagccccgggtatgaaccccggagccctggctatgaatctgagagctctagatatgaatcccagaacactgagctcaaaacccaaagcccagaatttgaagctcaaagttccaaattccaggaaggtgcggagatgcttctgaaccccgaggaaaagagtcctttgaatatctccgtaggagttcaccccctggactccttcactcaggggtttggggagcagcccacaggggacctgcccatagggccaccttttgagatgcccacaggggccctgctgtctacaccgcagtttgagatgcttcagaatcccctgggtctcacaggagcccttcgaggtccaggtcggcggggtggccgggccaggggtgggcagggccctcggcctaacatctgtggcatctgcgggaagagcttcgggcggggctccaccctgatccagcaccagcgcatccacaccggtgagaagccctacaaatgtgaggtctgcagcaaggccttctcccagagctctgacctcatcaaacaccagcgcacccacactggcgagcggccctacaaatgtccccgttgcggcaaggccttcgccgacagctcttacctgcttcgccaccagcgcactcactctggccagaagccctacaagtgcccacattgtggcaaggccttcggcgacagctcctacctcctgcgacaccagcgcacccacagccacgagcggccctacagctgcaccgagtgcggcaagtgctatagccagaactcgtccctgcgcagccatcagagggtgcacaccggtcagaggcccttcagctgtggcatctgcggcaagagcttctcccagcggtcggcccttatcccccatgcccgcagccacgcccgggagaagcccttcaagtgccctgagtgcggcaagcgctttggccagagctcggtgctggccatccacgcccgcacccacctgccaggccgcacctacagctgccccgactgcggcaagaccttcaatcgctcctccactctcatccagcaccagcgctcccacacgggcgagcggccctacaggtgcgccgtgtgcggcaagggcttctgccgctcctccacgcttctgcagcatcaccgggtccacagtggcgagcggccttacaagtgcgatgactgcggaaaggccttctcccagagctccgacctcatccgccaccagcggacccacgcggcgggccggcgctgacctggggccccagcaggggtgggaggtgtgggcagaagataaggggccagggagctagaggaacctttagggaggatagtggagaagccgcaggagaatggaggagctgaggatgctggaagaagagaaccagggtggaggaagtgacatgccctggagacttgtgggaagtgggttggagggaggccaggccggcagcgggaggccctgggagaaatggagagaggtcagcggagggctggcctcagccgcggctccttggtgggtgcctggcttggcaactgctagagcagggaggggggagggcaggggattacctaattagagtgggttagcttagattggtagctgctgaaactctcgttgagtcaggagcgggtaaaa

SEQ ID NO: 203745 - DNA, 2002 bp, Homo sapiens
  Payload ID: 20184
  Gene Name: zinc finger protein 77
  Uniprot ID: Q15935
  ENST ID: ENST00000314531
  CDS Start-End: 94-1731
accccgagcggctcaggtgtcctgtcgtgctcacctgcgccggtcgctggaccgcggggcgctaaccctggagagcccaggagcgggcgggacatggactgcgtgatctttgaggaagtggctgtgaacttcaccccagaagagtgggcattgctggatcatgctcagaggagcctctacagagatgtgatgctggagacctgcaggaaccttgcctccttggattgttacatttatgttagaaccagtggatcaagttctcagagggacgtttttgggaatggaatatccaatgatgaagagattgtaaagttcacaggaagtgattcctggtctatttttggagaaaattggagatttgataacactggagatcagcaccaaatcccacagaggcatctgagaagtcagctggggagactctgtgaaagtaatgaaggtcatcaatgcggagagaccttgagccagactgcgaaccttcttgtgcacaagagttaccctaccgaagctaaaccctctgagtgcactaagtgtggcaaagccttcgagaatcggcagagatctcacactggacagagaccgtgtaaggaatgtgggcaagcctgcagctgcctctcctgccaaagccctcctatgaaaacgcagactgtagagaaaccctgtaattgccaggactcaaggacagcatctgtgacatacgtgaaaagtctcagcagtaaaaagtcttatgaatgtcagaaatgtggaaaagctttcatttgtccctcatctttcaggggacatgtgaatagtcatcatgggcagaaaacccatgcatgtaaagtatgtgggaagacctttatgtattactcctaccttacacggcacgtaagaactcacacaggagagaaaccctatgagtgtaaggagtgtgggaaagccttcagctgtccctcatactttcgagaacatgtcagaacacacactggagagaaaccgtatgaatgtaagcattgtggaaaatcattcagctgttactcctcctttagagatcacgtgaggacgcacactggagagaaaccctgtcagtgtaaacattgcggaaaagcgttcacttgttactcgtctcttcgagaacatgggagaacgcacagtggagagaaaccctatgaatgtaaggaatgcggcaaagccttcaggtacccctcctctctgcgagcacacatgagaatgcacaccggagagaagccctatgtgtgcaagcagtgtgggaaggccttcggatgtcccacttactttagaagacatgtgaaaacacacagcggggtgaagccctatcaatgtaaagagtgtgggaaagcctacagtttttcctcctcccttcgaatccacgtgaggacgcatactggagagaagccctttgagtgtaagcattgtgggaaagccttcagctgtcactcctcccttcgagagcatgtgcgaacccacagcggagagaaaccgtacgaatgtaatcaatgtgggaaagccttcagccacgctcagtactttcaaaagcatgtgagatcacacagtggggtcaaaccctacgaatgtactgaatgtgggaaagcctacagttgttcctcgtcccttcgtgtgcacgtgagaacgcacactggagagagaccgtatgaatgcaagcagtgtgggaaaaccttcaggtatctcgcatcgcttcaagcacatgtgagaacacatgctggagcgtgaatctacgaatacagtggacctgggagagtgttcaaccgtaaaaccttgttgtaaatgtgagaaacgttatttatgtagagcatgtaggaaaacctggtatagcacttattttgtacctaaaaattcagagtaggagagaaatctcttaattatgattaatatggtattgcctttacatgcctcagccttaatagtgattccttttgtattaatttctagtgtatgtttgtgatataaacatttaataaatatcctgttttgtacgctttca

SEQ ID NO: 203746 - DNA, 5439 bp, Homo sapiens
  Payload ID: 20185
  Gene Name: zinc finger protein 770
  Uniprot ID: Q6IQ21
  ENST ID: ENST00000356321
  CDS Start-End: 346-2421
gttgccgcgccggccctgcggacgtgcgcgcgctgccttcgcggcacctgggcctgaggtgcgtgcctcccgggccctcgccagctccagatgcgtgaggaggacttcagaaacccgactgagaagtggagcgacccccagggagggtcggacctgcctcaataccgccaaggtctttcatttcttgttcgcttactttcgtgaaatcctcacatcgttttaatggtactagtcaagacaagaaaatcaacaggctttcagccttgaggcaacattggatattattgagacatctgtggaatttaagaacagtatggagctcatcagagtatatcattgaagaatatgatggctgaaaacaatttaaaaatgctaaagattcaacagtgtgtggtagccaacaaactacctagaaacaggccatatgtttgcaatatttgttttaagcactttgaaacaccatcaaaattagctaggcactatctcattcatactggtcaaaagccatttgaatgtgatgtgtgtcataaaacctttagacaactagttcatctggagaggcatcaactaactcatagtctgccttttaaatgtagtatttgtcagcgtcactttaaaaatctgaagacatttgtgaagcaccaacaacttcacaatgaaacctatcagaataatgttaaacaggtcagaagattgctggaggccaagcaagaaaagtcaatgtatggagtgtataatacttttaccacagaggaaagatgggcattacacccgtgctctaagtctgatcccatgtatagcatgaaaagaagaaagaatattcatgcatgtacaatctgtggcaagatgtttccatcacagtcaaaacttgataggcatgtacttattcatactggtcagaggccttttaaatgtgtcttgtgtactaaatcttttcgacagtcaactcacttaaaaatccaccaacttacacattcagaagaaagaccttttcaatgttgtttttgtcaaaaaggatttaagattcaaagcaaacttctgaagcataaacaaatccatactaggaataaggcttttcgggctcttttattaaagaagaggcgtacagaatctcgccccctgcctaataagttaaatgcaaatcagggtggttttgaaaatggtgagattggtgaatctgaggagaataatccacttgatgtccactcaatttatattgtcccttttcaatgtccaaagtgtgaaaagtgttttgaatcagagcagattctcaatgaacacagctgttttgctgctagaagtggcaaaattccaagcaggttcaaaagaagctacaactataaaaccattgttaaaaaaatcttggccaagcttaagcgtgctaggagtaaaaaattagataactttcaatctgagaaaaaagtatttaaaaagagtttcttgagaaattgtgatcttatttctggtgagcagagctctgaacaaacccagagaacatttgtgggttctcttggcaaacatggaacatataaaacaattggcaatagaaagaagaaaacattgactttgccattttcttggcaaaatatgggaaaaaatttgaaaggcatccttacgacagaaaacatattaagcattgataattcagtgaataagaaagacttgtcaatctgtggttcatcaggtgaggaattctttaataactgtgaggtacttcagtgtggtttttcagttccaagggaaaacatacgtactagacataagatatgtccttgtgacaaatgtgagaaggtatttccttctatatccaaactaaaaagacactatttaattcatactggacagaggccctttggctgtaatatttgtgggaaatcttttagacagtcagctcacttaaaaagacatgaacagactcataatgaaaagagtccttatgcatctctttgccaagtagaatttggaaacttcaacaatctttctaatcattcaggtaataatgttaactataatgcttcccaacaatgtcaggctcctggtgttcaaaaatacgaggtctcagagtcagatcaaatgtcaggagttaaggcagagtcacaggattttattcctggtagcaccgggcaaccctgtcttcctaatgtacttttggaatcagagcaaagcaatcctttttgcagttattcagagcatcaggagaaaaatgatgtcttcctgtaccgatgcagtgtttgtgctaaaagtttccgatctccatctaaactggaaagacactacctaattcatgcagggcagaaaccatttgaatgctcagtttgtggcaaaacattcagacaggctcctcactggaagagacatcagcttactcactttaaagaacgaccacaagggaaagtggttgccttagattcggttatgtaaattgtcgcaaccactaacaattgtggtctctggtgatcttatttttaaagcctgtattatttaaaatgcatttttattgaaaggcctgcattaaactgaatggtttcacaggcatttgcttgtcctgcatagtaaggaggtagaatacatagaaaattaatacaatgttttagaaacagccaagttaattttagaggcaagaacatgatttgatgctataaagtaggcattttaatattgtaaacatatactttggctgtattgaaaaatataaatccatgatggctgtacaaataatttagcctcattcattttttaaaggaattattccttaagacatgccatctctttttagatatactcaaaagactgagaggcaaaacttggcttttagctgcagcacatagccctgttatatttgatttattttacatttcatatgaaagcataattttgtccacatgtgactcaaattgcattggtaattttttttttttttttgtaagttaaaaaaactacagagacactaaaggtgaaaatggatgagacaattatagtattattttcattggtctttttttttgagatggagtctcactctttcgccaggctagagtgcagtggcgccatctaggctcactgcaacctccgcatcccagattccagcgattctcctgcctcagcctcctgagtagctgggattacaggtgcctgccatcacgcctggctaatttttgtatttttagtagagacgggggttcaccaagttggccaggatggtctcgatctcttgaccttgtgactcacccgcatcggcctcccaaagtgctgggattacaggcatgagccaccgcacccgacggtcttttcaaagctatttatttttaggactatgtggtaatttcaccttcaggtgataaggattttttttttctcccagctagtgctatctttctcaaaataatttaaaagtaggcgagaggctaggatgtacctatatttaccatgtttacttaccaggaatattttctaagtgccatagtctttttcataatacgtatgagttttaccttttcagaggaataatttcaagtcatttatttgctcattaatgatagcagtagtcatagacttaagactattctagagatcttcatctccataagacttttacatttattttagtaaacttttctttctatgcctctttaatggagtggttctgttatttaagcctgttctaagtttgatcaaatggcaatgactaggtctagttttagtttttatttttgcaggagtctattgctaaagaattttattttgatgcttgttaaatttttattttaattaataaggtagtcattcctgtagagggataagatgcttgtagagttgtgggtatcattccaaatagaactgttatgatttgggaaatattctttactacaaaggacttatttcataattacaaattttccttcatatttgcctttgtttataaaatcttcaggaatgacattctctagcaataaaaggaatgaaccgttatgtttctaagctgaaaagaggaacaggtgggtaattatcctgccatacttaaatatagtggaaaatcctctattgagaatgtggataaatgaacaattgtaagttttgcatcataaactgagaactttcttttgacaggggggaggcgggagggatagtaggtgggggtgatctgcttgcttcttttaccacaggtgatttttaagtaacttgggtttaatttacagagatgaaacatgacagtctgagtaaaatacccagtgatgtagaagtgtgcctgtttattatgtagatacagacatccagcaaaaacaggagaatcacatgctttaaagaacactttctcttaggtttccttgagatatgttcctccagtgcaagcaagataatggtttacagaatttgctttacacaaaacttgtcaagaactcatctgttaaaagcaaggaataactagtttatattttccaataatgttcaaggttttctccttaatatgtttgaaattattgattttggcatttttctaagcaatttatgtaattttatttgaagaaaatgttttgtataatgtttttcccagcctaaacagggagagtcctaacagtgttgtgcttgtatgattctgagactttatttgcgtaagtgatactactatactttatttttgacccatgcctttttaagctgtttcatattgaaaggtggaatattgtaaaaattttgtcaaagatgtactgtagtgctatttgaagtacctgtaacaaaacagttggccctctgtatccatgtactctgcatctgtggattaaaccaattgcagatcaaaaatattagaaaaaataaaaataatacaaataaaaatacagtataacagttatttaaatagcatttacattgcattaggtattagtctagggataaagtatacaggcggatgtgcgttggttatatacaaatatgtcattttatgtaagggacttgagtatacttggatttttggtatctgtgggttggggggacggtccaggaaccaataccccatggataccaagggacaactgtacttatttacctttattgtcattgcaagcttcttatggaaactttataggaatgaaaatatacatgttaagaagattaaacattagatagtagatggtttgttgcatgctagaactgttagtattgttgaatcaattactttggtttcatgaaaaaataaacgataaatatctttaaagagaactagaagaattttttgtttgagtgattccaggctgtagtatgatcatttactgaagtagtttgattggctggctaacttagaattattgtttcttgttttgtactgcaataggggttataattgtaagataaaaatgtgtgtgtgtttaagggaagtaggtggtggttaaaattcttggaaaattttcagaatactttaaaaataaagttccaagttacaca

SEQ ID NO: 203747 - DNA, 563 bp, Homo sapiens
  Payload ID: 20185
  Gene Name: zinc finger protein 770
  ENST ID: ENST00000559564
  CDS Start-End: 167-563
gtgcctcccgggccctcgccagctccagatgcgtgaggaggacttcagaaacccgactgagaagtggagcgacccccagggagggtcggacctgcctcaataccgccaagacatctgtggaatttaagaacagtatggagctcatcagagtatatcattgaagaatatgatggctgaaaacaatttaaaaatgctaaagattcaacagtgtgtggtagccaacaaactacctagaaacaggccatatgtttgcaatatttgttttaagcactttgaaacaccatcaaaattagctaggcactatctcattcatactggtcaaaagccatttgaatgtgatgtgtgtcataaaacctttagacaactagttcatctggagaggcatcaactaactcatagtctgccttttaaatgtagtatttgtcagcgtcactttaaaaatctgaagacatttgtgaagcaccaacaacttcacaatgaaacctatcagaataatgttaaacaggtcagaagattgctggaggccaagcaagaaaagtcaatgtatggagtgtataatactt

SEQ ID NO: 203748 - DNA, 2371 bp, Homo sapiens
  Payload ID: 20186
  Gene Name: zinc finger protein 771
  Uniprot ID: Q7L3S4
  ENST ID: ENST00000319296
  CDS Start-End: 378-1331
tttcgggcggagcagaggcactgggcgcagcggagacctccaagccggccccaggagacgggccgcgaggttaggttggaactcggcggcaaggaccttgaacgccgggctggggcggctccaggtgcttgggagtcgggggactgcggaggacgccaagtctgagctcgccgccctctccgagccgtttgggccggacgcctgggtccttcgggctccgccccagggggtggggctatatgttcggaccaatgaccggccgtccctgcggtcccgccccctccccgcccccggagccgcggcctcgctgagtgcccagccgcccggcgcccaggcctggggcaccgcgagtgccgaaccttcggctggacaccaagatgcctggcgaacagcaggcagaggaagaggaggaggaagagatgcaggaggagatggtgctgctggtgaagggtgaggaggatgagggtgaggagaagtatgaggtggtgaaactcaagatccccatggacaacaaggaggtcccgggcgaggcgcccgcgccgtccgccgacccggcgcgtccccacgcgtgccccgactgcggccgcgccttcgcgcgccgctccacgctggcgaagcacgcgcgcacgcacacgggcgaacggcccttcgggtgcaccgagtgcgggcggcgcttctcacagaagtcggcgctgaccaaacacggccgcacgcacacgggcgagcggccctacgagtgccccgagtgcgacaaacgcttctcggccgcctcgaacctgcggcagcaccggcggcggcacacgggcgagaagccgtacgcatgcgcgcactgcggccgccgcttcgcgcagagctccaactacgcacagcacctgcgcgtgcacacgggcgagaagccgtacgcgtgcccggactgcggacgcgcctttggcggcagctcgtgcctggcgcgccaccgacgcacgcacacgggcgagcggccctacgcttgcgccgactgcggcacgcgcttcgctcagagctcggcgctggccaagcaccggcgcgtgcacacgggcgagaagccgcaccgctgcgctgtgtgtggccgtcgcttcggccaccgctccaacctggcggagcacgcgcgcacgcacacaggcgagcggccctacccctgcgccgagtgcggccgccgcttccgcctaagctcgcacttcattcgccaccgacgcgcgcacatgcggcgccgcctgtatatttgcgccggctgcggcagggacttcaagctgccccctggcgccacggccgccactgccaccgagcgttgcccggagtgtgagggcagctgagtcccgcagggctgcggaggggcgcgctggggcttcgacctggctgcactaacccaggctcctcctcgccccggcctccgggtctgggaaattgaggggacggcaggcccggctgccctggaactgggagacagggagaatcccctgccggggtccctggaaacagtgcccaccccacatcactacattccctcggcccgtgttagtgaataaagtattatatcctcaccccacccgtgcctgtgagtgaggtgggtgggagaggaagaaagttggggttctccaggctcaggtgccaagtgagttgtcaaggaaccaaatggggatgtaaacctaaaaggggttcccggcacctcggtttgtgttggttggaggtgatcgcacacttggcccttggttacgtcctcataaccttagacctgaaagggcccataaatatactatgttcacgatcagacacgcactgcattcggcagagctccagtgagcaaggcacgaccctcagatctcagtctagtgaaggagagaaaactgtaataacactacgttaaaggttttaactgctttgttatgtaagcttacccagcccggcgcacagtgactcacgcctgtaatcccagcactttgggagggcgaggctagcagatcacttgaggttaggagttcgataccagcctggccaacatggtgaaacccggtctctactaaaaatacaaaaattaactgggtgtggtggcgggcgcctgtaatcccagctactgagggggctgaggcatgagaatcacttgaacctgggagacagaggttgcaatgaaccgagatagtgccattgcactccggcctgggcaacagaggaagactgcctcaaacaaacaaaaaacaacaaaccaaaccaaaccaaaccaaaaaaatctcaaagcgattggacctagcagctcatgcctgtaatctccagcactttgggaggcggaggcaggaggatctcttgaagtcaagagtttgagatcagcctggagaacaaagtgagacccccatctatt

SEQ ID NO: 203749 - DNA, 1454 bp, Homo sapiens
  Payload ID: 20186
  Gene Name: zinc finger protein 771
  Uniprot ID: Q7L3S4
  ENST ID: ENST00000434417
  CDS Start-End: 274-1227
gctccaggtgcttgggagtcgggggactgcggaggacgccaagtctgagctcgccgccctctccgagccgtttgggccggacgcctgggtccttcgggctccgccccagggggtggggctatatgttcggaccaatgaccggccgtccctgcggtcccgccccctccccgcccccggagccgcggcctcgctgagtgcccagccgcccggcgcccaggcctggggcaccgcgagtgccgaaccttcggctgctccccgcctcaggacaccaagatgcctggcgaacagcaggcagaggaagaggaggaggaagagatgcaggaggagatggtgctgctggtgaagggtgaggaggatgagggtgaggagaagtatgaggtggtgaaactcaagatccccatggacaacaaggaggtcccgggcgaggcgcccgcgccgtccgccgacccggcgcgtccccacgcgtgccccgactgcggccgcgccttcgcgcgccgctccacgctggcgaagcacgcgcgcacgcacacgggcgaacggcccttcgggtgcaccgagtgcgggcggcgcttctcacagaagtcggcgctgaccaaacacggccgcacgcacacgggcgagcggccctacgagtgccccgagtgcgacaaacgcttctcggccgcctcgaacctgcggcagcaccggcggcggcacacgggcgagaagccgtacgcatgcgcgcactgcggccgccgcttcgcgcagagctccaactacgcacagcacctgcgcgtgcacacgggcgagaagccgtacgcgtgcccggactgcggacgcgcctttggcggcagctcgtgcctggcgcgccaccgacgcacgcacacgggcgagcggccctacgcttgcgccgactgcggcacgcgcttcgctcagagctcggcgctggccaagcaccggcgcgtgcacacgggcgagaagccgcaccgctgcgctgtgtgtggccgtcgcttcggccaccgctccaacctggcggagcacgcgcgcacgcacacaggcgagcggccctacccctgcgccgagtgcggccgccgcttccgcctaagctcgcacttcattcgccaccgacgcgcgcacatgcggcgccgcctgtatatttgcgccggctgcggcagggacttcaagctgccccctggcgccacggccgccactgccaccgagcgttgcccggagtgtgagggcagctgagtcccgcagggctgcggaggggcgcgctggggcttcgacctggctgcactaacccaggctcctcctcgccccggcctccgggtctgggaaattgaggggacggcaggcccggctgccctggaactgggagacagggagaatcccctgccggggtccctggaaacagtgcccaccccacatcactacattccctcggcccgtgttagtgaataaagtattatatcctc

SEQ ID NO: 203750 - DNA, 1187 bp, Homo sapiens
  Payload ID: 20186
  Gene Name: zinc finger protein 771
  ENST ID: ENST00000564550
  CDS Start-End: 24-212
gctccccgcctcaggacaccaagatgcctggcgaacagcaggcagaggaagaggaggaggaagagatgcaggaggagatggtgctgctggtgaagggtgaggaggatgagggtgaggagaagtatgaggtggtgaaactcaagatccccatggacaacaaggagagacacgatctcgctttgtcacccaggctggagtgcagtggcacgtgattgtagctcactgcagccttgaactcttgggctcaagtgatcctccttcctcggcctaccaagttgttgggactacaagtgcaccccaccacacctggctaatttttcactttttgtagagacgaggtctaactgtgttgcccaggctggtgtccaactcctggcctcaagtaatcctccttccttggcctcccgaagtgctaagattacaggtgtgagtcactgcacctggcctcatactgggaatttgatctcacttagcctacctggcctttctcgggacactggggcagaggaggatcttaatgagctggattcagctcctcttaccaagatttttcctcgggcatccaaggccccttctcctgggctggagacatcaacagtgcttgtatggagaatttctttttcagaagtcagtgaactcagcatgaggaagccctcaggctgtccaaagtcacctgaaagagggtgccaaggaaaaacgggccagaaaaatgtagatctgatgagacaagttctctccacagtggctgatgtattgaaataaaccaatagatttcaaaaccagggcaagactggaaaatgtgaccttgaattcagatggtaccaaacatactgtggggagtttctccatttaaagtatcaagttgtattttaaccttgaatccctcttggagtgtgccagggacgtggaatccagcctctgtcacatcttggtcacgtgagttcagaacagtgtagcctgaatgacggcatggtctcatgggcaccctgagtccatcctggctcccactggccatgtgaatttcatcgccctcagcctcagctttctcagctatcaaaagagagaacacccagctcaaggcgggtgacaggaggatttaatacaataacatacatagtgttgtcaaagcttaatactttgttattgattgttgctattgttatcagtatagatactatttaaaccag

SEQ ID NO: 203751 - DNA, 2415 bp, Homo sapiens
  Payload ID: 20186
  Gene Name: zinc finger protein 771
  ENST ID: ENST00000566625
  CDS Start-End: 46-204
aggcctggggcaccgcgagtgccgaaccttcggctggacaccaagatgcctggcgaacagcaggcagaggaagaggaggaggaagagatgcaggaggagatggtgctgctggtgaagggtgaggaggatgagggtgaggagaagtatgaggtggtgaaactcaagatccccatggacaacaaggaggaggctgagtgcccctagagggcagggacccgtgagtcctctctgcatcccaacaacagcaaagagcctagcaatcaggaggggaaactgaacccatgaatgtttgaagaccaaataaatgctcccctcccctcccccacaactcagactctaccaggaagctttccatctactcacaagagttctgccagctcccccacttccccaaccaaggccaggaggagattccgaggctgatggaactgttcccagtctcgttccgcagcaaactcagcatggaggcggcggctgaaataggacaaaggagtgtaagtccaagtctccgggttagagggtgatgcaggggccagaggcagctacccccgtagtatgtaatggggcctgggaccaggagattctgcaactaattcattggatggtattgtgcaggtcatttcctctttccggaacttggttccctcatctataaaatgggcgtgcccctgaactgcccttaacatctcgccaaaactaacaaaaccctcttcattattccatctcctgctgctacttctgcagtttcctccacctggaatcgccgcacatcaaaatgcaatttctcttacagaaggtagttccacagacccttcctctaagaagcctttcttgacctcctccagcaaaaaataacgtctcccacctctcagcacttcgtttgcccctctcgtacccccggcgcctggagagcagaggcggtatctggtgccggtatcttcccagggctaggctgaagggcgttcctagttaccactcggaggcaccacccaatttcccttgcctcaggtgtgcaccgctgcgcccattttgcagatgaggtaagaaggctcacccagggacagcccacagagccaggacccgagccccgctgccagcccgcttcccgaccacgtggaggaaccctccccaaaacgcgggagaaaggggcgacttccccaccccgagctgggccaggcctgcttacatgtcctcgagcgtgggctccgggctgaagctgaaccggccgggagcagcagtgtcctctccccccgtgtccccacgaatctccccaccggccacagacatgccgcccaccgctgcaccgcgacttcacggaaaacccacgagccacgctcgaagccccgcctccagagctccgaccaattacgggagttctctattgcctcacggggcggagcctgaggaaagagaccaatgacttttgtggagtttgctacagccctccccttccctcactggaccaatctgagggagcttcaagcgcgcgtttctagtcttaggccctggaattcttccgctaggccctgtgtctaaaggtagaggtaccaattcgacctggggaagagacgaagggcagagggtgggggaagcgcaggcgcgtcacttcgtttatgggcgccagagggcgccaaagcgaaacggcagcggaagagggcccgtcaggtggaaaaccctataaatgaaaggccctatgcataggtattaaatcagggcttaaggacgttgagaaacctcgaggccaacccccacactatttggatgggattgaaggggaagagcggagtaagatcagacggcagtaggacttcagctccccgccatcgctgtgtcctgtggttgaaacgatggaggtcgccccatccctgtcctaagggaggcagtaggccccagcgcaacgtacattgccctgaaacacgtggccccttatggtctggcctgtgccggcctctccagcctcatgggtccccagcacggctcctccaccccacacacgagaactccaggctccactcacaccagggaatacgcgaggtggcgagtcacagggttgctgctttcaaatcagaaccactgagttattggccatgggaggagcagagatctttatgaaaccctagaacaggtgtagtcttgcaaagaatgatttattattgtacccttattagggctactatctctgatttccacgtttaaagaggcttccagcttgctggaagtgaaagcgtaagaaagcgcaggaagaggcagagtcagattttggaaattaaaatcccaaggctgtgacaattgcaattctaggtatatgccctagagaaattaatgaatatgtgcagagagacacatgcaagaagttcattacagttttgtttctaagagtgaaaaaaattgaaaataaaatgactatcaacggaa

SEQ ID NO: 203752 - DNA, 5419 bp, Homo sapiens
  Payload ID: 20187
  Gene Name: zinc finger protein 772
  Uniprot ID: Q68DY9
  ENST ID: ENST00000343280
  CDS Start-End: 262-1731
gggcgggacttcctctaccatcctcgggtggacattttgtttgcttttccattaatccactggtttagtttccagaacgcaatgtcagacctgaggtgacagaaaagggaaaacgtgagagagtgtcttcttccctgaagagaggtgggcctgaggcttgacagtggcgctgcctgagtgacctagccgctgggctgggccctggacagctgatcccaggttcctgcacttgtcgccacccttccgtagtccacaggcctgatggcggcggctgagccgatgggcccggcacaggttcccatgaactcagaagtaattgtggaccctatacaggggcaggtgaactttgaggacgtgttcgtgtacttctcccaggaggagtgggtgctccttgatgaggctcagaggctcctgtaccgtgatgtgatgctggagaactttgcacttatggcctctctgggacatacatctttcatgtcccacatagttgcctcactggtgatgggtagtgagccctgggtacctgactgggtggacatgaccctagctgttgccacagagactccaggtgggagtgaccctggttgttggcatggaatggaggatgaagagataccttttgagcagagcttttctataggaatgtcacagatcaggattcccaagggaggtccttctactcagaaggcttacccctgtgggacatgtggcctggtcttaaaagacattttgcacttggctgagcaccaggaaacacacccagggcagaaaccatacatgtgtgtgctgtgtgggaaacagttctgcttcagtgcaaaccttcaccagcaccagaagcagcacagtggagagaaaccctttagaagtgataagagcaggccctttcttctgaacaactgtgctgtgcaatcaatggagatgtcttttgtgacaggggaggcttgtaaggacttcctagccagctcaagcattttcgagcaccatgcccctcacaatgagtggaagccacacagcaacaccaagtgtgaggaggcctctcactgtggaaaaaggcattacaaatgcagtgaatgtgggaaaaccttcagccgcaaagactcacttgttcaacaccagagagtccacactggagaaaggccttatgagtgcggtgaatgtgggaaaacctttagccgcaaacccatacttgctcagcaccagagaatccacactggagaaatgccttatgagtgtggcatatgtgggaaagtttttaatcatagctctaaccttattgtacatcaaagagtacacactggagcaaggccttacaagtgcagtgaatgtgggaaagcctatagtcacaaatctacacttgttcagcatgagagtatccatactggagaaaggccatatgagtgcagcgaatgtggaaaatactttggtcacaaatacagactcattaaacattggagtgttcatactggagcaaggccttatgagtgcatcgcatgtgggaagttctttagccaaagctctgaccttattgcacatcaaagagttcataatggtgaaaagccttatgtgtgcagtgaatgtggaaaagcctttagccacaaacatgtacttgttcagcatcatagaattcacactggagaaaggccatataagtgcagtgaatgtgggaaggccttcaggcagagggcttccctcatccgccactggaaaattcacactggagaaaggccttaggatgggagataattccgtttccttgttcaacataataactgacatcagagagaagctccaagcatagcctttatgtgtagccgacagccagaagtagaactttatacactcaaacactcaccctggggaggttcttccgagtgccagctatatgggaagccttctggagctatgctgaattttctagactcttgctggaatttcgtcaaggcagtgcctgttagaagccatctgtctttgtgctggaagagtcctgccttgtgccaaagtaaccccaatgtgtttcaaaagacagacctctgtactattcccttccctggagggaatcatcagtagcctgaggccatcaaggattctcactttttttctgccccactactggtttaagcatgagcatgacccagttttagccagaaaaatgggagctttgttctgctgaccactggcagaggtttcccttcatggatatagttgatctcacatggcacttgggacgaatttttctagccttcaagacacctgacctgaaattggctgcctcatattctggttttgcaacaaatgccttaatttttagactatctgaaatcttgaggattctgttcgctttgtgggttgggttgagaacagaattgagctaagccagtatgaagggaagaacagcttttgtgagagctccaactatctgtatctctgaagtgatagtaggatggcaaagactagctcttatgctagtgtcaagctaacttacttgactgcttcagctctcctaggaaagaatgccagtctttgtaggcctaatcttttggtctatatgttaagattttttgtgtaattgaggtcaccctaagcagtgggcatttgttgtgataatctctaatgtgtctgggagcaacatgaattacgtcccttgttcccagaagatacttcatattcccaaggcttcttgaggagaatttgaactcagtggacatgtcaagatctctgaagtctatttttcagtaggcagttgatattggctgtcctccagaaggcccaggtaggaatcatagttggtgcagaaacccagattaataaaggaatgagaaaactgcagcaaactatagggaatatgacccttctaaaggtacatccacatgtgtttccattactctggctccattatgagggtttacagaaatatttccatacctgtgtctcttatggctaaggttactgtccagaagtcagtctaaacatttttgcaataaactgcacatatttatagtgtaccatttgataagttttgatacatgttggcacttctcaaaccaaaagtttcctgattccttttatattttctccctttccttcacccatccccaggcaactattgatccgttgtcactgtagatttgtttgtatttcctagaattctacagagatagagtaatttaatatgtattctaatgtttttggcttcttaaactctgaaattaaggctcatggtggtgttctgtgtttcatagttcatttcttttcatttgtactttgctaagagtgttccattgtagagaaatagtttcaaagcaagtgatccaggagagaactcacacaagaacaaagccacagtatctgtcattaccttaaactgaaagtgatgagccgtcatttctgctatatttcataagtaaccctagctaatcctggttaaaagtggaagagaactacacaaaggtgaaaatagggatttgtggggcgttttcttggactctggtgaccataatcctatatggtttttttctttttctgttttagttgtttaatatgaattacattgactgatttttttaaatgttaagccaaccttgcatttctgtaataattcccatttggtcatgatgtattagtcatttagtatattgttgaatttgatttgctattttgttttgttttgttttgtttttttgtaacaagttttgcaccaatgttcacgagtgatatttgtccctaactttctttcttgcttgcttgcttttttttctttgtaattttatatcttgcccaggtttggctttggtatcagcataatgccagctttatagagtaagttgggaagtattcctgctcttcagctctctggaagagtttgtgaataattggtattatttcttccttaaatgtttggtagaattcaccaaggaagctgtctgggcctggagtttgttttgtaggaaagtttctaactataagtttgatttctgtggtagatagagggctgtacaagttatatgtacatctgtctgtgtgtgtgttgtctgtctgtcactctggccctgaagtgtgttttgtaggacagcatctaactacaagtttgatttccatggtagatggagggctatactagttatatatacatctgtctgtccgtccatctgtttgtcactccatccatccatctatctctagagtgagctttgatggtttgtgtctttcaaggagtttttctgttttatttaagtactcaaatttttcaaaatattattttcatacttgtagaatttgtagtggtgcaacctcttctattcctgatactggtaatgtctatatttttcttttaaccttgattggtttgggtagagatttatcaattttacaattttattgatcttaaagtacttggtattattgaattttctgttttctgatattttgggatttttcttttccattttgagttttactaatgccttccgcttttattggatttcatttcttttgctactttttaacatggaagctgaggtccttcatttcaaacctttgggtttttttcccctaatatggggaagagatgttaatgttaaaaatctatctgagaactgctttaattacctcccatcaagcttgatgtggtttcatttttttttttgagacagtgtcttgctctgtcatccaggttggagtgcagtggcgcgatctcggctcactgcaagctctgcctcctgggttcacaccattctcctgcctcagcctcccgagtagcttggactacaggcgcctgccaccatgcctggctaattttttgtatttttagtagagacgaggtttcaccgtgttagccaggatggtctcgatctcctgatcttgtgatccgcctgcctcagcctcccaaagtgctgggattacaggcgtgagcccagccgatgtggtttcattttagttgagtttaggatgttttccagttaaaaaaattcttcttgacacatggctctttttaaatgtatgttatttaattcctaaatatttggggattttgcttatctttctggtagtttctgcaataattccattgtggtcagagtacattaagacttgaattatttacatttattgagatttgctttgtggcccagaatatgggctatcttggtatgagttacatgttcacttgaaatgtatactgtactctcgtttgatgaaggggttctacaagtgttgattaggtaaaaatggttgatgttatttaagttttttctatctttattgacattctgtggttttggttccagcaattattttaagaggattgttgacatctctgaatattaaattggatttacttctctgcagttctgtcagattttgcttcacatattttagtatgtttttattaggtgaataataaatatttcctattttatgtcca

SEQ ID NO: 203753 - DNA, 1799 bp, Homo sapiens
  Payload ID: 20187
  Gene Name: zinc finger protein 772
  Uniprot ID: Q68DY9
  ENST ID: ENST00000356584
  CDS Start-End: 224-1570
gtttgcttttccattaatccactggtttagtttccagaacgcaatgtcagacctgaggtgacagaaaagggaaaacgtgagagagtgtcttcttccctgaagagaggtgggcctgaggcttgacagtggcgctgcctgagtgacctagccgctgggctgggccctggacagctgatcccaggttcctgcacttgtcgccacccttccgtagtccacaggcctgatggcggcggctgagccgatgggcccggcacaggttcccatgaactcagaagtaattgtggaccctatacaggggcaggtgaactttgaggacgtgttcgtgtacttctcccaggaggagtgggtgctccttgatgaggctcagaggctcctgtaccgtgatgtgatgctggagaactttgcacttatggcctctctgggttgttggcatggaatggaggatgaagagataccttttgagcagagcttttctataggaatgtcacagatcaggattcccaagggaggtccttctactcagaaggcttacccctgtgggacatgtggcctggtcttaaaagacattttgcacttggctgagcaccaggaaacacacccagggcagaaaccatacatgtgtgtgctgtgtgggaaacagttctgcttcagtgcaaaccttcaccagcaccagaagcagcacagtggagagaaaccctttagaagtgataagagcaggccctttcttctgaacaactgtgctgtgcaatcaatggagatgtcttttgtgacaggggaggcttgtaaggacttcctagccagctcaagcattttcgagcaccatgcccctcacaatgagtggaagccacacagcaacaccaagtgtgaggaggcctctcactgtggaaaaaggcattacaaatgcagtgaatgtgggaaaaccttcagccgcaaagactcacttgttcaacaccagagagtccacactggagaaaggccttatgagtgcggtgaatgtgggaaaacctttagccgcaaacccatacttgctcagcaccagagaatccacactggagaaatgccttatgagtgtggcatatgtgggaaagtttttaatcatagctctaaccttattgtacatcaaagagtacacactggagcaaggccttacaagtgcagtgaatgtgggaaagcctatagtcacaaatctacacttgttcagcatgagagtatccatactggagaaaggccatatgagtgcagcgaatgtggaaaatactttggtcacaaatacagactcattaaacattggagtgttcatactggagcaaggccttatgagtgcatcgcatgtgggaagttctttagccaaagctctgaccttattgcacatcaaagagttcataatggtgaaaagccttatgtgtgcagtgaatgtggaaaagcctttagccacaaacatgtacttgttcagcatcatagaattcacactggagaaaggccatataagtgcagtgaatgtgggaaggccttcaggcagagggcttccctcatccgccactggaaaattcacactggagaaaggccttaggatgggagataattccgtttccttgttcaacataataactgacatcagagagaagctccaagcatagcctttatgtgtagccgacagccagaagtagaactttatacactcaaacactcaccctggggaggttcttccgagtgccagctatatgggaagccttctggagctatgctgaattttctagactcttgctggaatttcgtcaaggcagtgcctgttagaagcc

SEQ ID NO: 203754 - DNA, 5130 bp, Homo sapiens
  Payload ID: 20187
  Gene Name: zinc finger protein 772
  Uniprot ID: Q68DY9
  ENST ID: ENST00000427512
  CDS Start-End: 309-1442
gggcgggacttcctctaccatcctcgggtggacattttgtttgcttttccattaatccactggtttagtttccagaacgcaatgtcagacctgaggtgacagaaaagggaaaacgtgagagagtgtcttcttccctgaagagaggtgggcctgaggcttgacagtggcgctgcctgagtgacctagccgctgggctgggccctggacagctgatcccaggttcctgcacttgtcgccacccttccgtagtccacaggcctgatggcggcggctgagccgatgggcccggcacaggttgttggcatggaatggaggatgaagagataccttttgagcagagcttttctataggaatgtcacagatcaggattcccaagggaggtccttctactcagaaggcttacccctgtgggacatgtggcctggtcttaaaagacattttgcacttggctgagcaccaggaaacacacccagggcagaaaccatacatgtgtgtgctgtgtgggaaacagttctgcttcagtgcaaaccttcaccagcaccagaagcagcacagtggagagaaaccctttagaagtgataagagcaggccctttcttctgaacaactgtgctgtgcaatcaatggagatgtcttttgtgacaggggaggcttgtaaggacttcctagccagctcaagcattttcgagcaccatgcccctcacaatgagtggaagccacacagcaacaccaagtgtgaggaggcctctcactgtggaaaaaggcattacaaatgcagtgaatgtgggaaaaccttcagccgcaaagactcacttgttcaacaccagagagtccacactggagaaaggccttatgagtgcggtgaatgtgggaaaacctttagccgcaaacccatacttgctcagcaccagagaatccacactggagaaatgccttatgagtgtggcatatgtgggaaagtttttaatcatagctctaaccttattgtacatcaaagagtacacactggagcaaggccttacaagtgcagtgaatgtgggaaagcctatagtcacaaatctacacttgttcagcatgagagtatccatactggagaaaggccatatgagtgcagcgaatgtggaaaatactttggtcacaaatacagactcattaaacattggagtgttcatactggagcaaggccttatgagtgcatcgcatgtgggaagttctttagccaaagctctgaccttattgcacatcaaagagttcataatggtgaaaagccttatgtgtgcagtgaatgtggaaaagcctttagccacaaacatgtacttgttcagcatcatagaattcacactggagaaaggccatataagtgcagtgaatgtgggaaggccttcaggcagagggcttccctcatccgccactggaaaattcacactggagaaaggccttaggatgggagataattccgtttccttgttcaacataataactgacatcagagagaagctccaagcatagcctttatgtgtagccgacagccagaagtagaactttatacactcaaacactcaccctggggaggttcttccgagtgccagctatatgggaagccttctggagctatgctgaattttctagactcttgctggaatttcgtcaaggcagtgcctgttagaagccatctgtctttgtgctggaagagtcctgccttgtgccaaagtaaccccaatgtgtttcaaaagacagacctctgtactattcccttccctggagggaatcatcagtagcctgaggccatcaaggattctcactttttttctgccccactactggtttaagcatgagcatgacccagttttagccagaaaaatgggagctttgttctgctgaccactggcagaggtttcccttcatggatatagttgatctcacatggcacttgggacgaatttttctagccttcaagacacctgacctgaaattggctgcctcatattctggttttgcaacaaatgccttaatttttagactatctgaaatcttgaggattctgttcgctttgtgggttgggttgagaacagaattgagctaagccagtatgaagggaagaacagcttttgtgagagctccaactatctgtatctctgaagtgatagtaggatggcaaagactagctcttatgctagtgtcaagctaacttacttgactgcttcagctctcctaggaaagaatgccagtctttgtaggcctaatcttttggtctatatgttaagattttttgtgtaattgaggtcaccctaagcagtgggcatttgttgtgataatctctaatgtgtctgggagcaacatgaattacgtcccttgttcccagaagatacttcatattcccaaggcttcttgaggagaatttgaactcagtggacatgtcaagatctctgaagtctatttttcagtaggcagttgatattggctgtcctccagaaggcccaggtaggaatcatagttggtgcagaaacccagattaataaaggaatgagaaaactgcagcaaactatagggaatatgacccttctaaaggtacatccacatgtgtttccattactctggctccattatgagggtttacagaaatatttccatacctgtgtctcttatggctaaggttactgtccagaagtcagtctaaacatttttgcaataaactgcacatatttatagtgtaccatttgataagttttgatacatgttggcacttctcaaaccaaaagtttcctgattccttttatattttctccctttccttcacccatccccaggcaactattgatccgttgtcactgtagatttgtttgtatttcctagaattctacagagatagagtaatttaatatgtattctaatgtttttggcttcttaaactctgaaattaaggctcatggtggtgttctgtgtttcatagttcatttcttttcatttgtactttgctaagagtgttccattgtagagaaatagtttcaaagcaagtgatccaggagagaactcacacaagaacaaagccacagtatctgtcattaccttaaactgaaagtgatgagccgtcatttctgctatatttcataagtaaccctagctaatcctggttaaaagtggaagagaactacacaaaggtgaaaatagggatttgtggggcgttttcttggactctggtgaccataatcctatatggtttttttctttttctgttttagttgtttaatatgaattacattgactgatttttttaaatgttaagccaaccttgcatttctgtaataattcccatttggtcatgatgtattagtcatttagtatattgttgaatttgatttgctattttgttttgttttgttttgtttttttgtaacaagttttgcaccaatgttcacgagtgatatttgtccctaactttctttcttgcttgcttgcttttttttctttgtaattttatatcttgcccaggtttggctttggtatcagcataatgccagctttatagagtaagttgggaagtattcctgctcttcagctctctggaagagtttgtgaataattggtattatttcttccttaaatgtttggtagaattcaccaaggaagctgtctgggcctggagtttgttttgtaggaaagtttctaactataagtttgatttctgtggtagatagagggctgtacaagttatatgtacatctgtctgtgtgtgtgttgtctgtctgtcactctggccctgaagtgtgttttgtaggacagcatctaactacaagtttgatttccatggtagatggagggctatactagttatatatacatctgtctgtccgtccatctgtttgtcactccatccatccatctatctctagagtgagctttgatggtttgtgtctttcaaggagtttttctgttttatttaagtactcaaatttttcaaaatattattttcatacttgtagaatttgtagtggtgcaacctcttctattcctgatactggtaatgtctatatttttcttttaaccttgattggtttgggtagagatttatcaattttacaattttattgatcttaaagtacttggtattattgaattttctgttttctgatattttgggatttttcttttccattttgagttttactaatgccttccgcttttattggatttcatttcttttgctactttttaacatggaagctgaggtccttcatttcaaacctttgggtttttttcccctaatatggggaagagatgttaatgttaaaaatctatctgagaactgctttaattacctcccatcaagcttgatgtggtttcatttttttttttgagacagtgtcttgctctgtcatccaggttggagtgcagtggcgcgatctcggctcactgcaagctctgcctcctgggttcacaccattctcctgcctcagcctcccgagtagcttggactacaggcgcctgccaccatgcctggctaattttttgtatttttagtagagacgaggtttcaccgtgttagccaggatggtctcgatctcctgatcttgtgatccgcctgcctcagcctcccaaagtgctgggattacaggcgtgagcccagccgatgtggtttcattttagttgagtttaggatgttttccagttaaaaaaattcttcttgacacatggctctttttaaatgtatgttatttaattcctaaatatttggggattttgcttatctttctggtagtttctgcaataattccattgtggtcagagtacattaagacttgaattatttacatttattgagatttgctttgtggcccagaatatgggctatcttggtatgagttacatgttcacttgaaatgtatactgtactctcgtttgatgaaggggttctacaagtgttgattaggtaaaaatggttgatgttatttaagttttttctatctttattgacattctgtggttttggttccagcaattattttaagaggattgttgacatctctgaatattaaattggatttacttctctgcagttctgtcagattttgcttcacatattttagtatgtttttattaggtgaataataaatatttcctattttatgtcca

SEQ ID NO: 203755 - DNA, 587 bp, Homo sapiens
  Payload ID: 20187
  Gene Name: zinc finger protein 772
  ENST ID: ENST00000450712
  CDS Start-End: 212-430
attaatccactggtttagtttccagaacgcaatgtcagacctgaggtgacagaaaagggaaaacgtgagagagtgtcttcttccctgaagagaggtgggcctgaggcttgacagtggcgctgcctgagtgacctagccgctgggctgggccctggacagctgatcccaggttcctgcacttgtcgccacccttccgtagtccacaggcctgatggcggcggctgagccgatgggcccggcacaggttcccatgaactcagaagtaattgtggaccctatacaggtgaggggagaatgtccatgctctcaccgatcccacccccacccaatacgctctccagcattgtggtgttatatagaacactctcctgctactctccgatctcttgggtctgaggactctggagaagccccaagcccagggtcctgactccgggccaggggttttatggaggggtttccatttctgccaaccattggaataaggttggaaggttgttccaggcacaggaaccagcctgtgcaaaatacttagaggggcaggtgaactttgaggacgtgttcgtgtacttctcccaggaggagtg

SEQ ID NO: 203756 - DNA, 1601 bp, Homo sapiens
  Payload ID: 20187
  Gene Name: zinc finger protein 772
  ENST ID: ENST00000425074
  CDS Start-End: 258-386
gggacttcctctaccatcctcgggtggacattttgtttgcttttccattaatccactggtttagtttccagaacgcaatgtcagacctgaggtgacagaaaagggaaaacgtgagagagtgtcttcttccctgaagagaggtgggcctgaggcttgacagtggcgctgcctgagtgacctagccgctgggctgggccctggacagctgatcccaggttcctgcacttgtcgccacccttccgtagtccacaggcctgatggcggcggctgagccgatgggcccggcacaggttcccatgaactcagaagtaattgtggaccctatacaggttgttggcatggaatggaggatgaagagataccttttgagcagagcttttctataggaatgtcacagatcaggattcccaagggaggtccttctactcagaaggcttacccctgtgggacatgtggcctggtcttaaaagacattttgcacttggctgagcaccaggaaacacacccagggcagaaaccatacatgtgtgtgctgtgtgggaaacagttctgcttcagtgcaaaccttcaccagcaccagaagcagcacagtggagagaaaccctttagaagtgataagagcaggccctttcttctgaacaactgtgctgtgcaatcaatggagatgtcttttgtgacaggggaggcttgtaaggacttcctagccagctcaagcattttcgagcaccatgcccctcacaatgagtggaagccacacagcaacaccaagtgtgaggaggcctctcactgtggaaaaaggcattacaaatgcagtgaatgtgggaaaaccttcagccgcaaagactcacttgttcaacaccagagagtccacactggagaaaggccttatgagtgcggtgaatgtgggaaaacctttagccgcaaacccatacttgctcagcaccagagaatccacactggagaaatgccttatgagtgtggcatatgtgggaaagtttttaatcatagctctaaccttattgtacatcaaagagtacacactggagcaaggccttacaagtgcagtgaatgtgggaaagcctatagtcacaaatctacacttgttcagcatgagagtatccatactggagaaaggccatatgagtgcagcgaatgtggaaaatactttggtcacaaatacagactcattaaacattggagtgttcatactggagcaaggccttatgagtgcatcgcatgtgggaagttctttagccaaagctctgaccttattgcacatcaaagagttcataatggtgaaaagccttatgtgtgcagtgaatgtggaaaagcctttagccacaaacatgtacttgttcagcatcatagaattcacactggagaaaggccatataagtgcagtgaatgtgggaaggccttcaggcagagggcttccctcatccgccactggaaaattcacactggagaaaggccttaggatgggagataattccgtttccttgttcaacataataactgacatcagagagaagctccaagcatagcctttatgtgtagccgacagccagaagtagaactttatacactcaaacactcaccct

SEQ ID NO: 203757 - DNA, 737 bp, Homo sapiens
  Payload ID: 20187
  Gene Name: zinc finger protein 772
  ENST ID: ENST00000600175
  CDS Start-End: 243-359
atcctcgggtggacattttgtttgcttttccattaatccactggtttagtttccagaacgcaatgtcagacctgaggtgacagaaaagggaaaacgtgagagagtgtcttcttccctgaagagaggtgggcctgaggcttgacagtggcgctgcctgagtgacctagccgctgggctgggccctggacagctgatcccaggttcctgcacttgtcgccacccttccgtagtccacaggcctgatggcggcggctgagccgatgggcccggcacaggttcccatgaactcagaagtaattgtggaccctatacaggaacacgagctgaacaactactcatgcaagaaagcacattcataagaaccagaaaactagatgagtgatcggagtacctgattttaacataatatcaagaagaaaggcattgaagtgggtaggaaaggtagtcttgcattgcttaaaccacccctttcccatcccttggcagaccaacatgcagagaaaaatctgtgtgcttgtagaagagagcacgaagtgagtgtgggactgcattggaacctggtgctgcccaggcacagaagaacacaacacggcacaattctacttgtgcccatggagacagcatttacaccagcctggggccagaagcaaattcctttcaacccccgtgaaaggaacctgagtctcagctggcaccaccaacagctgaccgaagtggcctggggcccagaataagtt

SEQ ID NO: 203758 - DNA, 482 bp, Homo sapiens
  Payload ID: 20187
  Gene Name: zinc finger protein 772
  ENST ID: ENST00000601768
  CDS Start-End: 196-273
agtttccagaacgcaatgtcagacctgaggtgacagaaaagggaaaacgtgagagagtgtcttcttccctgaagagaggtgggcctgaggcttgacagtggcgctgcctgagtgacctagccgctgggctgggccctggacagctgatcccaggttcctgcacttgtcgccacccttccgtagtccacaggcctgatggcggcggctgagccgatgggcccggcacaggaacacgagctgaacaactactcatgcaagaaagcacattcataagaaccagaaaactagatgagtgatcggagtacctgattttaacataatatcaagaagaaaggcattgaagtgggtaggaaaggtagtcttgcattgcttaaaccacccctttcccatcccttggcagaccaacatgcagagaaaaatctgtgtgcttgtagaagagagcacgaagtgagtgtgggactgcattggaacctggtgctgcc

SEQ ID NO: 203759 - DNA, 1554 bp, Homo sapiens
  Payload ID: 20187
  Gene Name: zinc finger protein 772
  ENST ID: ENST00000610548
  CDS Start-End: 301-1554
gggcgggacttcctctaccatcctcgggtggacattttgtttgcttttccattaatccactggtttagtttccagaacgcaatgtcagacctgaggtgacagaaaagggaaaacgtgagagagtgtcttcttccctgaagagaggtgggcctgaggcttgacagtggcgctgcctgagtgacctagccgctgggctgggccctggacagctgatcccaggttcctgcacttgtcgccacccttccgtagtccacaggcctgatggcggcggctgagccgatgggcccggcacaggttcccatgaactcagaagtaattgtggaccctatacaggggcaggtgaactttgaggacgtgttcgtgtacttctcccaggaggagtgggtgctccttgatgaggctcagaggctcctgtaccgtgatgtgatgctggagaactttgcacttatggcctctctgggacatacatctttcatgtcccacatagttgcctcactggtgatgggtagtgagccctgggtacctgactgggtggacatgaccctagctgttgccacagagactccaggtgggagttgttggcatggaatggaggatgaagagataccttttgagcagagcttttctataggaattgcaaaccttcaccagcaccagaagcagcacagtggagagaaaccctttagaagtgataagagcaggccctttcttctgaacaactgtgctgtgcaatcaatggagatgtcttttgtgacaggggaggcttgtaaggacttcctagccagctcaagcattttcgagcaccatgcccctcacaatgagtggaagccacacagcaacaccaagtgtgaggaggcctctcactgtggaaaaaggcattacaaatgcagtgaatgtgggaaaaccttcagccgcaaagactcacttgttcaacaccagagagtccacactggagaaaggccttatgagtgcggtgaatgtgggaaaacctttagccgcaaacccatacttgctcagcaccagagaatccacactggagaaatgccttatgagtgtggcatatgtgggaaagtttttaatcatagctctaaccttattgtacatcaaagagtacacactggagcaaggccttacaagtgcagtgaatgtgggaaagcctatagtcacaaatctacacttgttcagcatgagagtatccatactggagaaaggccatatgagtgcagcgaatgtggaaaatactttggtcacaaatacagactcattaaacattggagtgttcatactggagcaaggccttatgagtgcatcgcatgtgggaagttctttagccaaagctctgaccttattgcacatcaaagagttcataatggtgaaaagccttatgtgtgcagtgaatgtggaaaagcctttagccacaaacatgtacttgttcagcatcatagaattcacactggagaaaggccatataagtgcagtgaatgtgggaaggccttcaggcagagggcttccctcatccgccactggaaaattcacactggagaaaggccttag

SEQ ID NO: 203760 - DNA, 1506 bp, Homo sapiens
  Payload ID: 20187
  Gene Name: zinc finger protein 772
  ENST ID: ENST00000615214
  CDS Start-End: 262-1506
gggcgggacttcctctaccatcctcgggtggacattttgtttgcttttccattaatccactggtttagtttccagaacgcaatgtcagacctgaggtgacagaaaagggaaaacgtgagagagtgtcttcttccctgaagagaggtgggcctgaggcttgacagtggcgctgcctgagtgacctagccgctgggctgggccctggacagctgatcccaggttcctgcacttgtcgccacccttccgtagtccacaggcctgatggcggcggctgagccgatgggcccggcacaggggcaggtgaactttgaggacgtgttcgtgtacttctcccaggaggagtgggtgctccttgatgaggctcagaggctcctgtaccgtgatgtgatgctggagaactttgcacttatggcctctctgggacatacatctttcatgtcccacatagttgcctcactggtgatgggtagtgagccctgggtacctgactgggtggacatgaccctagctgttgccacaggttgttggcatggaatggaggatgaagagataccttttgagcagagcttttctataggaatcttcagtgcaaaccttcaccagcaccagaagcagcacagtggagagaaaccctttagaagtgataagagcaggccctttcttctgaacaactgtgctgtgcaatcaatggagatgtcttttgtgacaggggaggcttgtaaggacttcctagccagctcaagcattttcgagcaccatgcccctcacaatgagtggaagccacacagcaacaccaagtgtgaggaggcctctcactgtggaaaaaggcattacaaatgcagtgaatgtgggaaaaccttcagccgcaaagactcacttgttcaacaccagagagtccacactggagaaaggccttatgagtgcggtgaatgtgggaaaacctttagccgcaaacccatacttgctcagcaccagagaatccacactggagaaatgccttatgagtgtggcatatgtgggaaagtttttaatcatagctctaaccttattgtacatcaaagagtacacactggagcaaggccttacaagtgcagtgaatgtgggaaagcctatagtcacaaatctacacttgttcagcatgagagtatccatactggagaaaggccatatgagtgcagcgaatgtggaaaatactttggtcacaaatacagactcattaaacattggagtgttcatactggagcaaggccttatgagtgcatcgcatgtgggaagttctttagccaaagctctgaccttattgcacatcaaagagttcataatggtgaaaagccttatgtgtgcagtgaatgtggaaaagcctttagccacaaacatgtacttgttcagcatcatagaattcacactggagaaaggccatataagtgcagtgaatgtgggaaggccttcaggcagagggcttccctcatccgccactggaaaattcacactggagaaaggccttag

SEQ ID NO: 203761 - DNA, 2206 bp, Homo sapiens
  Payload ID: 20188
  Gene Name: zinc finger protein 773
  Uniprot ID: Q6PK81
  ENST ID: ENST00000282292
  CDS Start-End: 141-1469
cgctgcggcgaccagctccggaaagcgcggtggggacgcgctgtgttctcgcagctcagaggcgggtctgaggctcggtggcggcgcccagggtggcccgggccctttcctcggtcgttgtctcaccgccacaggctccgatggcggcggccacgctgagggaccccgctcagcagggctatgtgacctttgaggacgtggctgtctacttctcccaggaggaatggagattgcttgatgacgctcagaggctcctctaccgcaatgtgatgctggagaactttacacttctggcctctctgggacttgcatcttccaagacccatgaaataacccagctggagtcatgggaggagcccttcatgcctgcttgggaagttgtgacttcagccatactgagaggtagttggcaaggagccaaggctgaggcagctgctgagcagagtgcttctgtagaagtgcccagttcaaacgttcagcaacaccagaagcagcactgtggagagaaacccttaaaaagacaagagggcagggtcccagttttgaggagttgcagagtccacctatcagagaagtccttgcaaagcagggaagttgggaaggatcttctgaccagctcaggtgttctcaagcaccaggtgactcacacgggagagaagtcacataggagctccaaaagtagggaggcctttcatgctggaaaaaggcattacaaatgcagtgaatgtgggaaagcctttggtcagaaatatttacttgttcagcaccagagactgcacactggggaaaagccttatgaatgcagtgaatgtgggaagttatttagccataagtccaacctttttatacaccaaatagttcacactggagaaaggccttatgggtgtagtgactgtggaaaatcctttagccgtaatgctgacctcattcaacaccagagagttcacactggagaaaagccttttacatgcagtgaatgtggaaaagctttcaggcataattccacacttgttcagcatcacagaatccacactggagtaaggccttatgagtgcagtgaatgtggaaaattgtttagtttcaactccagcctcatgaaacatcagagagttcacactggagaaagaccttataagtgcagtgaatgtggaaaattctatagccacaagtccagccttatcaatcattggcgtgttcacactggagaaaggccttatgagtgcagtgaatgtgggaaattttttagccaaagctcaagcctcatgcaacatcgaaaagttcacactggagaaaaaccttttaagtgcaatgaatgtgggagattctttagtgagaattccagccttgttaaacatcagagggttcacactggagcaaagccttatgagtgcagggaatgtgggaaattttttcgccacagctccagtcttgttaaacatcgaaggattcacactggagaaatacaatgattgtgagaaatcctttagctggtgtttcaacctcattcaacaccagaaagttcacagtgtaaaaaagtcttgaaggttactaatggaaatccattagctatacctccaaactcattcaacactggacagttcacagagtggacaatgtagtgaatatggtaaaaggcctcagccaaaggcctaaccgtattcaacaccagaaagtttagactggagaaaggccttagactgtcgctgaatcaatatgacctgacttaaagcagaaacagccaggcgtggtggctgacacctgttattctcaccactttgggaggctgaagcgggcggatcacaaggtcaggacatcgaaaccatcctggttaacacaatgaaaccacatctctactaaaaatacaaaaatttactgggcatggtggtgggcgcctgtagtcccagctactcaggaggctgaggcagaagaatggcatgaacctaggaggcagagtttgcggtgagctgagatcacgccactgcactccagactgggtgacagagtgagactctgtctaaaaaaaaaaaaaaaaaaaattagcccggcgtggtggcaggcaactgtagtcccagctacttggggggctgaggcaggagatttgcttgaacccgggaggcggaggttgcattgagccgagatcacgccactgcactccagcttgggtgacagagtgagacttcgtctcaaaaaaaaaaaaaaaaaacaa

SEQ ID NO: 203762 - DNA, 5832 bp, Homo sapiens
  Payload ID: 20188
  Gene Name: zinc finger protein 773
  ENST ID: ENST00000599847
  CDS Start-End: 143-496
ttcgctgcggcgaccagctccggaaagcgcggtggggacgcgctgtgttctcgcagctcagaggcgggtctgaggctcggtggcggcgcccagggtggcccgggccctttcctcggtcgttgtctcaccgccacaggctccgatggcggcggccacgctgagggaccccgctcagcagggctatgtgacctttgaggacgtggctgtctacttctcccaggaggaatggagattgcttgatgacgctcagaggctcctctaccgcaatgtgatgctggagaactttacacttctggcctctctgggacttgcatcttccaagacccatgaaataacccagctggagtcatgggaggagcccttcatgcctgcttgggaagttgtgacttcagccatactgagagtttggctgcgtaacaggtcggcaaatctcctcactcagatattcttcccgaaccgacagccacaagtggcgcccgaacagggacgtgagtgaagaaggtctgctggagcagagaaagtgaaactgaccagaagaatgagaaaccccaggacaagtctgctggcagtggatataaggtcagtgccctaaagaggtactgggagtgggaagtttctgaatcagggtaacatagggcagaatttgtctgctgaagagcaacattatatgcagtcacttaaaggtttacttaaacaatctggtgctcaggttagttctcaaacactagctaagctgctgcaggaggttatcacgcataacccatggtttccacagacagacactcttgatgtggaaaactggggtgaagatttgcttacggcataggatatgagacttacaaattaaactattggcaatccaggatttaaaatgttaaagaaaatgagatatcagagcagacaaggcttaggaaagtccctacaggaaaaccctgatcctatatcaataactgggcaaacagatagaaaagggctaggtcgtcagatttctgatgtgggtcattgatatttctcctccacccactgctttgccactagagtggctaacaaacctgtatgggtggatcaatggcccctttcacaggagaaactaactcaactccatcagctagtaaaagagcgattggatgcaggacatattgaagagtcagcccctggaattcaccagtatttgtaataccaaaaaagtcaggaaaatggggactgctacatgatttgagagctattaatgcacagattaaaccaatgggtgcattacagcaaggtctgccatccctggcaggcatttccaagagactggcctcttgtagtaatagatcttattgttttttttactatactattacatcagcaggataggcctggatatgccttctctgtgccttctgttaatcaaagggagcctgtctcttgttatcaatggaaagttttgccccaaggcgtgcttaacagtcctacattatatcagaattttgtaggacaggcattaaaggagccttgtaatgtgtttcccactggctatgtcattcattatatggatgatattcttttggccgctcctacagatcaaatcttacatcagttattcagagaaacaaaacaggctttgactaaatggaatctcaaaatagctcctgaaaaggtgcaaaccacctccccataccagtacttaggcactattattactgaaagaagtgttcagcctcagaaagtagtcatctgtagggacagattacaaactttgaatgatttccaacaattatcaggggacattaattggctgcacccaatgctaggtattgctacttattaactcaaacacctttatcagaccctccaaggagattcttcattagactctcctcggcaacttactaaggaggcagaagctgaattatagcttgtagaacagatgcttcagcaacaacatgccacctggttacagccacaaaagcctttgcttctgtttattcttcctacctcccattctccaacaggacttttaggccaattcatacacaaatctgtaatagtattagaatggcttttttatccaatcagacagtgaaatctttgcaaatttatctttctttaattactcaacttataacaataggtaggcatagatcaaaaatgtttatgggatgtgatccagacaaaattattgttcccttggattcccaacaacaggccacagcatgggaaatgtcgactgcatggcaaatcactctcacagattttgtaggaataatagataaccattatccatcagacaaaattttgcaattttatgaagttcacccttttacccttcctgtaatcactcatcacaagcctattccaggcagacagacctattttactgatgactcttctaaaggctgtgcagctatttatggacctaagcatactgaaacaataaagacctctggagtttcagctcaatgctcagaattagtggcagttattcaagttttacagctcaccgctttatctcctattaacattgtctgtgattcagcctatattgtaaatgtagccagtcacattgagactgccactattaaaagcaccctagaaccagagctgtataatttgtttctaagacttcaacaagctgttcactctcatgctgctccttttcatatttctcatatttgctatcacacacaacttcctggaccactatctctaggtaacaataaagcagataaactaatcggttctgtatttcaacaagcccaatcttctcatgcattcctgcatcaaaacacctctgcccttactcgtatgtttcatctgccttgcagccaggcttgagctattgcgcaagcctaccccacttgccagcctgtccctggcgttgcacccatggaaggatgtaacccactaggcttggctccatatgaaatctggcagatggatgttacacatatagcagcctttggcaaactcagctatgttcatgtgactacagacacttactcccatatgctacatgtcacgtgccaaactggggaaacagctggtcatgtctgatgacattgtctgtcaccttttgcccatatgggggtccctacacaatgaaaaactgacaatggacctgcttatgttagtcatgcttttcaaaattttttacagttatgggcaatcactcataaaacagaaattccttacaatcctcaaggacaaggaatcatagagtgggcacatcaaacattacaatgcatgttgaaaaaacaaaaatggggactaggagaccagctaccacctcaaacaaaattacatttagccttatttactttaaattttttgactcctggtatggatattaagactctggcagaatgacattggcaaatgttagagggaaaaaggaaagtttacccaaaggtattacagaaatccccggaagaaggacaatggaaaggcccggtagacttactgatatggggacgagggtttgcttgtgtttttacaggagatggacaatccgtgtgggtgccctcaaggtgtgtgtgaccatggaacgggagactggagaaatccatggatctcaactgtgggcccagctcctccagtacgagccatgagctagttgaatctgaatgcaaagacagaacaaggaccgactggagtcacactgacatcaacccccataaaatggggacagctcaagaaaaccacacaggaagctgagaaactgctggagcaaaacccctgactccatgtttatggccatgctagctgtaatatcctgtgcggtatgttttccctgtgcagaggcaaaaacttattgggcatatattcctaacccaccagtagtacgaccggtactcgggagcaacactcctcctgagatatatcatgatcagggagcatggacaccaggacccctaactccccctgacagagagtgattagattctcagaacaatggtatcaattatactgcaccattggagggacttctttatgtgtcacccaggatgcatcactcaaccgcagttgccttgcaattcagtcccaagcatgcttgagttaccatggaaaaattatgtacctattaggccttagctctattaatattactggtgtagttactaatcactcctggccccatcacccaaattgtattgattgtacagaatgggctccctttgataattctcacccctgtccttggactcagtgtcttggccccttagctaaacaacagtccatgttaatgggagacattatcgactggggtccccatggtcatttagatgggagaagtgagaatcagacctcatggcataaattttgctggcactggtggcgaaacttgaacatctcttcgctacatcccaatctgctacacaacttgcttggcacagaatgggctttagcccacctttgcctcaatggcattatcaaggaaagagaggtccaattcaggagtcaatatggaagacagcactcccatttatgaatggcagcatttgggttgggacactatccaataatagtaataatgctcaatgcagttttaatgttacctttgtagaaaatactaccacacagtttacaatttgtatttttaatccgtatgtttttctagcagcaaaaaaggaccaactccgggtaaacaatgcccaatcgatttgtgatgcctgtcaactgtatcattgccttaatcatagcacaatacaaacacacagcatatccaccctaataattctaggtcacattcctggattatagattcctgtaaatctgtccgagccttgggaggccacccccgctttacattttgtaaaactccttcttattcagcttactcatcgtgctcgtagagctttaggcatgataatttttgctataatttccctagtcacactaataacctctgctgtgttgtcctcagtagcactgcacagctccattcaaacagctcaatgtgtgaaaaattggatgtgcacagccgaccaggaatggatgcttcaaaataaaattaacaccaagatacaaacagaagtggcaatgttaaagactactgttctgtggctaggataacaaatacaaagcctgaagttgcagcagcaattgcattgtcattttaaccctattcatatttgtgtaactaatttggaatataatcaaagtgaatatccaaggaactttgtaaaggcccatttacagggagttttacattcaatgttacttttgatattaatgattcacaaagtaaaatccttaacttgaataagcagactcaagtgcttcagccctctttaaaagcttgggcagaattccagcaaggtttagggagccttaacccttggacctacttcaaacagcacctcaatgtcttttttgtgattatcggaataatgttattatgtttctgttttttgttcatagtctgtaaaatcagctggaccaccaaccggcaattgagagctgcacagcctgcaattacctttattcaattaatacaaaaacagaaaaggggggaggttggaggccgaaagaatgagggtcgtgaccaactcagtataccactggaggctatatgagcaaacagcaaactgttctcatgaatgcaggatgctggcaagctgacaactgcatctgccaccagaaggaatgctgagggcagtcataccccacgtgcagtgttccttgtggttatctataggaacatctggaggctgttgtataaagaaagcaattatgtgagcctgtgataaatcaagcagctgaccaaccattacctcttcctccctgttgattctacctaataaatacaaagggctgtagaagctcagggcccttgttccctagaag

SEQ ID NO: 203763 - DNA, 929 bp, Homo sapiens
  Payload ID: 20188
  Gene Name: zinc finger protein 773
  ENST ID: ENST00000597061
  CDS Start-End: 125-478
tccggaaagcgcggtggggacgcgctgtgttctcgcagctcagaggcgggtctgaggctcggtggcggcgcccagggtggcccgggccctttcctcggtcgttgtctcaccgccacaggctccgatggcggcggccacgctgagggaccccgctcagcagggctatgtgacctttgaggacgtggctgtctacttctcccaggaggaatggagattgcttgatgacgctcagaggctcctctaccgcaatgtgatgctggagaactttacacttctggcctctctgggacttgcatcttccaagacccatgaaataacccagctggagtcatgggaggagcccttcatgcctgcttgggaagttgtgacttcagccatactgagagtttggctgcgtaacaggtcggcaaatctcctcactcagatattcttcccgaaccgacagccacaagtggcgcccgaacagggacgtgagtgaagaaggtctgctggagcagagaaagtgaaactgaccagaagaatgagaaaccccaggacaagtctgctggcagtggatataaggagatggacaatccgtgtgggtgccctcaaggtgtgtgtgaccatggaacgggagactggagaaatccatggatctcaactgtgggcccagctcctccagtacgagccatgagctagttgaatctgaatgcaaagacagaacaaggaccgactggagtcacactgacatcaacccccataaaatggggacagctcaagaaaaccacacaggaagctgagaaactgctggagcaaaacccctgactccatgtttatggccatgctagctgtaatatcctgtgcggtatgttttccctgtgcagaggcaaaaacttattgggcatatattcctaacccaccagtagtacgaccggtactcgggagcaaca

SEQ ID NO: 203764 - DNA, 2019 bp, Homo sapiens
  Payload ID: 20188
  Gene Name: zinc finger protein 773
  Uniprot ID: Q6PK81
  ENST ID: ENST00000598770
  CDS Start-End: 147-1472
gttgttcgctgcggcgaccagctccggaaagcgcggtggggacgcgctgtgttctcgcagctcagaggcgggtctgaggctcggtggcggcgcccagggtggcccgggccctttcctcggtcgttgtctcaccgccacaggctccgatggcggcggccacgctgagggaccccgctcagggctatgtgacctttgaggacgtggctgtctacttctcccaggaggaatggagattgcttgatgacgctcagaggctcctctaccgcaatgtgatgctggagaactttacacttctggcctctctgggacttgcatcttccaagacccatgaaataacccagctggagtcatgggaggagcccttcatgcctgcttgggaagttgtgacttcagccatactgagaggtagttggcaaggagccaaggctgaggcagctgctgagcagagtgcttctgtagaagtgcccagttcaaacgttcagcaacaccagaagcagcactgtggagagaaacccttaaaaagacaagagggcagggtcccagttttgaggagttgcagagtccacctatcagagaagtccttgcaaagcagggaagttgggaaggatcttctgaccagctcaggtgttctcaagcaccaggtgactcacacgggagagaagtcacataggagctccaaaagtagggaggcctttcatgctggaaaaaggcattacaaatgcagtgaatgtgggaaagcctttggtcagaaatatttacttgttcagcaccagagactgcacactggggaaaagccttatgaatgcagtgaatgtgggaagttatttagccataagtccaacctttttatacaccaaatagttcacactggagaaaggccttatgggtgtagtgactgtggaaaatcctttagccgtaatgctgacctcattcaacaccagagagttcacactggagaaaagccttttacatgcagtgaatgtggaaaagctttcaggcataattccacacttgttcagcatcacagaatccacactggagtaaggccttatgagtgcagtgaatgtggaaaattgtttagtttcaactccagcctcatgaaacatcagagagttcacactggagaaagaccttataagtgcagtgaatgtggaaaattctatagccacaagtccagccttatcaatcattggcgtgttcacactggagaaaggccttatgagtgcagtgaatgtgggaaattttttagccaaagctcaagcctcatgcaacatcgaaaagttcacactggagaaaaaccttttaagtgcaatgaatgtgggagattctttagtgagaattccagccttgttaaacatcagagggttcacactggagcaaagccttatgagtgcagggaatgtgggaaattttttcgccacagctccagtcttgttaaacatcgaaggattcacactggagaaatacaatgattgtgagaaatcctttagctggtgtttcaacctcattcaacaccagaaagttcacagtgtaaaaaagtcttgaaggttactaatggaaatccattagctatacctccaaactcattcaacactggacagttcacagagtggacaatgtagtgaatatggtaaaaggcctcagccaaaggcctaaccgtattcaacaccagaaagtttagactggagaaaggccttagactgtcgctgaatcaatatgacctgacttaaagcagaaacagccaggcgtggtggctgacacctgttattctcaccactttgggaggctgaagcgggcggatcacaaggtcaggacatcgaaaccatcctggttaacacaatgaaaccacatctctactaaaaatacaaaaatttactgggcatggtggtgggcgcctgtagtcccagctactcaggaggctgaggcagaagaatggcatgaacctaggaggcagagtttgcggtgagctgagatcacgccactgcactccagactgggtgacagagtgagactctgtct

SEQ ID NO: 203765 - DNA, 548 bp, Homo sapiens
  Payload ID: 20188
  Gene Name: zinc finger protein 773
  ENST ID: ENST00000593916
  CDS Start-End: 167-472
actcagcttgccggaagctggttgttcgctgcggcgaccagctccggaaagcgcggtggggacgcgctgtgttctcgcagctcagaggcgggtctgaggctcggtggcggcgcccagggtggcccgggccctttcctcggtcgttgtctcaccgccacaggctccgatggcggcggccacgctgagggaccccgctcagggctatgtgacctttgaggacgtggctgtctacttctcccaggaggaatggagattgcttgatgacgctcagaggctcctctaccgcaatgtgatgctggagaactttacacttctggcctctctgggacttgcatcttccaagacccatgaaataacccagctggagtcatgggaggagcccttcatgcctgcttgggaagttgtgacttcagccatactgagagtcccgaaccgacagccacaagtggcgcccgaacagggacgtgagtgaagaaggtctgctggagcagagaaagtgaaactgaccagaagaatgagaaaccccaggacaagtctgctggcagtgg

SEQ ID NO: 203766 - DNA, 3202 bp, Homo sapiens
  Payload ID: 20189
  Gene Name: zinc finger protein 774
  Uniprot ID: Q6NX45
  ENST ID: ENST00000354377
  CDS Start-End: 187-1638
actttccggccgctggctgtcgaagccggagtcccacctgtgtccccacagccctgtcacgaatcccggtcgggttctgggaggcacagcctcggggttgcgggccgggtgcggctcggcggtggaggactcacttcctgctccatccccggctgggccctggggcggaactgatgacgcttgataatgtggctggggacttcagggaagagtgggttacctggacactgcttagagaatcctctccaggaatgccacccagcacagttagaagaatgggctctcaaaggaatttccaggcctagtgtaatctcccagccggagcagaaagaagagccatgggtcctaccactccaaaactttgaggcgaggaagatcccgagggaaagccacacagactgtgagcatcaggtggcaaagctcaatcaggacaattctgaaacagcagaacaatgtggaacatcctcagaaaggaccaataaagatctttctcatactcttagttggggaggaaactgggagcaaggcctagaattagaagggcaacatggaacccttccaggagagggccagctggagtccttttcacaggagagggatttaaacaagctcctggatggatatgtaggagagaagcctatgtgtgcagaatgcgggaaaagctttaaccagagttcctatctcataagacacctaagaacccacactggcgagaggccctatacgtgcattgagtgtgggaaaggcttcaaacagagctcagaccttgtcacccatcgcagaacacacacaggagagaagccctaccaatgcaaggggtgtgagaagaaattcagcgacagctcaacactcatcaaacatcagagaacccacacaggggagagaccctatgagtgcccagagtgtggaaagacttttgggcggaagccacacctcataatgcaccaaagaacccacacaggcgagaagccctacgcgtgcctggaatgtcacaaaagcttcagtcgaagctcaaatttcatcactcaccagaggacccacacaggggtgaagccttacaggtgtaatgactgtggggagagttttagccagagctcggatttgattaagcaccaacgaacccacacgggagaacggcccttcaaatgcccggagtgcgggaagggcttcagagatagttctcattttgtagctcacatgagcactcattcaggagagaggcctttcagttgtcctgactgccacaaaagcttcagtcagagctcacatttggtcacgcaccaaagaacacacacaggtgagagaccttttaagtgcgaaaactgtgggaaaggattcgccgacagctccgccctcattaagcaccaacgaatccacaccggagaaagaccctacaaatgtggagagtgtgggaagagcttcaatcagagctcccactttattacccatcagcgaatccacttaggagacaggccctatcgatgtcctgagtgtggcaagaccttcaatcagcgttcccatttcctcacacaccagagaacgcatacaggagaaaaacctttccactgtagtaaatgtaacaagagcttccgtcagaaagcgcatcttttatgccatcaaaacacccatttgatttaggaagtagtctttggtgttcagctgctcccttgcacattttcattgctactgtcttcaagcaccccaaatagagaaaacctgggcgtcagtggctcaatttgggccctgatctattctccctctttcttgtctatgttataacagagaggataaacttaaagggtccaaataacggtccgaatacaaaaggcattccttcagtgtgtgactgactcttagggaaatgtgagtttaatagttgatgcccgccaggcgtggtggctcacccctgtaatcccagcacttttgggaggccaaggtgggtggatcacttgaggtcaggagttgagaccagcctggtgagcatggtgaaacctcatctctactaaaaatgcaaaaattagctgggcatggtggcacgtgcctgtagtcccagctactcgggaggccgaggcagaagaatcatttgaactcagaaggtgcaggttgcagtgagttgagatcatgccactgcactccagcctgggcaacagagagagactctgtctccaaaaaaattaaaaagttgatgcctagttactaaatgagaagtgagaaaaatgtggcctagagatcacatgttcaccacctagtacagtgcctggcacaacatagatgctcaataactaaatggtcccatcattattaatgattaatagttgaggtcttatataaaggctttaatgcagtacctggcccttaaaagacactcagtacaagattggtggcttttatcagtcttattactcaattagaaatttattagtgtagtccccccgccccaaactcagaacgtgaaagaaattagattggaactagaaggtttggggttggaatacacaaattgaataaaatggaaatgcactgccagttcagtgctgtgcaggcattagtcaccagaggtctcactgccatgacaaggccaaattatcgtagaggatgtttgcggtcttgtgacttggaggctgaaagaatttcagaagctcttttaaatggcagtgtatggcagtgtatctaccagaggtttgctgtcatctgacacagagaaaatatcctacaatgaacaagccagagggacctggtagaggactataaaattgtggaagcaaaattgctgagaatgtcaaatgatattacagggatcctccctggcatttagctgaaggaagcaactcttgttttctaatttgctgggtcattggccatttagttttaggttaatataattctctgatccttttagggccatccaggttatgcactagtacattcctacattcaattgaaataaattgagggacggcaagtgtgttggaaagaacaccgacttcattgagaaggtaaagtatttgagtcctggccctgacgcttaatttggccagactttcatcttctcccagcctcaagttttacctacctcacaaggttgttgtgaggatctaaaaatacacacacacacacacacacacacacacacacacacactttgttggttaactataaatgtaatatctctatgttataattctgttgctaatgtcttttt

SEQ ID NO: 203767 - DNA, 5613 bp, Homo sapiens
  Payload ID: 20189
  Gene Name: zinc finger protein 774
  ENST ID: ENST00000379090
  CDS Start-End: 92-355
ggttgcgggccgggtgcggctcggcggtggaggactcacttcctgctccatccccggctgggccctggggcggaactgatgacgcttgataatgtggctggggacttcagggaagagtgggttacctggacactgcttagagaatcctctccaggaatgccacccagcacagttagaagaatgggctctcaaaggaatttccaggcctagtgtaatctcccagccggagcagaaagaagagccatgggtcctaccactccaaaactttgaggcgaggaagatcccgagggaaagccacacagggccatccaggttatgcactagtacattcctacattcaattgaaataaattgagggacggcaagtgtgttggaaagaacaccgacttcattgagaaggtgaagtcttgctctgttgcccatgctggagtgcaatggcatgatcttggctcactgcaacctctgcctcccaggttcaagcgattctcctgcctcagcctccggagtagctgggattacagatgcatgtcaccatgcccagctaattttatatgttaagtagagacggggtttcaccatgttggccaggcgggtcttgacctcctgacctcaggtgatccacctgccttggcctcccaaagtgctgggattacaggcgagagccacctcacctggccacctatcactttgattttcatgttgtttggctatggtaaaatgtgagctctcgaagggcaatgtgagatttgctttgtggccctgccaatcccctccctcctccctgtcttcctgcccacccccccccactcccccgccagccatgagcagggaatatttcaatgctattgctgagagtggaggtaaccctttctatagttttcttttgtttctacctcatgactagatgattcactgcttgaacatgctccacacatccgttctttctcactccaaaattgaggtcatcaccaagccccattaattttacctcccagattcctctcgaacctatctgtcaaatctgtccatcttcactgccacccttcagtaccaaatgaccagtctcttacctgaattcctgtagcagcctccaaactgatcttcctgatatgatttttgctctgaaaaaactggtttcactcacagaaaccagagtgaacttttaaaatcctaaatcgaatcacatcacttctcagcagctttccattgcttttagaatgaagacccaaatccttacccaggcctaagaggcccttgtggttttgtcccctccccctccatcctcttgtgatatccccttccctctcccttgcctcacctcagcactcttgagttctctgctccttggtcatgccaaggttgtgtgctctttagacccttggtactaactgttccctctgcccagaatgttcctcgcccagtcctttgtgttgcctcctatttgtcaaccaggtttcagcctaaacctatctccttaggaagactttccctaactatcccatctaaattagtcaccctccatcacattatcctcttttttcatcaaagtccttacacctgtctggcaatttcttattaattgatttgtttttggtaaactccacgaaaggtgggagtcatttctcttgtttccattctttccacagcacttagaacagtgcctggcacatggtaggtgctcaatatgtgtttactggatgaattaatgagtgcatgctcatgggcaaggatctcattgtgctggaaaagcagcagagtgagacaaaactggacaggtgagtgaaggtcacaccaagaaggttcttagctgccaaactaaagggtttggatcttactctctggagaaaagggtgtagctagtggttttataggagaggagaggcgcgatccgcacttgagaaggtcaatttggccgctgtgtgtaggtcatattacggagaaaaaaactaaaggctttgagacaatccatgatgtaaagggcttagcacagtgcccagcacgcagtaggtctccagcgagtcgttatcaccaagcaccagggcaggcaccacaacaaaaagataagatccctaacccttcttttacctcgaaataattcctcctagaccctatcatcgcattccttctcttccccttttgtcaaacttccactcacatgtagatattctcagggttatcatgcctaggcctttttaatagggccacttaccctagcatgcttctacaactggaccctcaaaggtcttttagggctgagtgtggtggctcacacctgtaatgccagcattttgggaggccgaagccagaggactgcttgagcccagaggttcaagaccagcctgggcaccatagccagaccctgtctctacaaaaaatagtttcaacaaattagccaggcatggtgatgtgcgcctgtcatcccaagtacttgggaggctgaggtgggaggattgcggattgcctgagcccaggagttcaaggctgcagtgagctgtgatcataccaccgtactccagattgcgtgacagagctagaacttgtctcttaaaaaaaaaaaaagacttaatttccacatctgaaggcctcttgttagtcttcttctgattcaacaactctttactgtttgatgccatttacatatgtttattattttttagagatggggtctcattcttttgctgaggctggagagcagtggtgcgatcatggctcactgcagcctcaacctcccagactcaagcaatcctcctgtctcagcctcctgagtaacagctaggactacaggcacatgccaccaagcccggccttttaaaatttttggtagaggccaggtgtggtggctcatgcttgtaatcccagcactttgggaggtccaggcgagtggatcacctgaggtcaggagtttgagaccagcatggctaatatggtgaaaccccgtctctagtaaaagtacaaaaattagccaggcgtggtcgtgggcgcctgtgatcccagctactcgggaggctgaggcaggagaatcacttgaacctgggaggcggaggttgcagtgagctgagatcgtgtcattgcactccagcccaggtgacaagagcgaaactccatctccaataataataataataataataataataactttgctagagacagggttcccctatgttgcccaggctggtcttgaactcctgacctcaagcaactctcccaccttggcctcccaaagcgctgggattacaggtgtgagctactgcaccaggcccatatgcctttttaaaaaaattatcttttccattggtgactatgaggttgagagatgattctcctacatttctggctgctcctcttcaagtaccttccctggctcctctggatttttttgttttgttttgttttgttttgttttgtttttgagacaaagtcttgctttgttgcccaggctggagtgcagtggcaggatcttggctcaccagctcactgcaacctccacctcccaggttcaagggattctggtgcctcagcctccagagtagctgggactacaggcccagctaatttttgtacttttggtagagatgggggtttcaccaggctggtcttgaactcctgcctcaggtgatctgcccacctcggcctcccaaagtgctgggattctaggcatgagccaccgcgcctggcctggctcctcttcttcttccactcagatatgcctgaccctgtcaacactttggttgaggtcttctttcttctttcttttttgctccgcacatttagcttatgacttcaaccatcatttctcagagcatgggtctggctcaacctctctcctgaatttcagacctacaagtctagctacttggtggagacctccccagaatgacctgctgcttcccaaaagcagactctccaaattacagtcagtatctcccccggaagcattcccccaggcatttctctttctgccttcaattccccattctcctacattgccttgccagaagcctgctggtcagcttggatttctttttgtccttttttttctatattttgctggtgcctagtcatgtagttgctgcctctacactttctcttctttaaaaaaaattattaaagcaccacgtgcttgttgtaaacatttccagaaaatacagaagtgctcaaagtgaaaaaatggaaatgccttgtcccttcctcattccctgccctaacctcacgccccagattcagctatgtaatagtctgtcatgccaagtcttatttccagctcctcttttccatccccactgccatcatctgaactaaacggattgttttccatctggtctccttggcttttcctttcagtgcagctcaacagacattaatcaagtgccttccacacaccaaagtcctaccctagatcctagaggttcagagacaagtaagatagttaaagagatccacattccagagctgtttaactttgggcaagttacttaatctctctgacccttacttccttatctgtaaaatgatgctaatcccagcacctttttcatgggtttggacgagcattaatgagatgatccatgtaaaactctttgtactaactacctggtacactgtatctgctccataaatgtcagtgacaacaatgataataatgacaatgtttggaggagtttatagcttaatggagagacttaaagcataagaattatctaggcgaagaatgatgagaaaatatttttggaaaaggaaaacaaacagttctactaaaattaaaaggctgatgtagagacttgggaaactgggaggtaagagctcggactgtgtcctctaagacagtaattcccgaagtgtgagcaaaagtccacctgcatcagtcttacttggggtgattgctcaaaatgaggatttaatggctgcacctccgagcaagttggtaatttacatatcggaatgctatccatcaaggaaaatgggcagactacagttacatgcatcaacacagacaagcttcaaacaatattgagtgtaaaaagcaagacatagaaatatatatttagtaagagtaaaaatacagtaaaggtaaaaaagaggcaaaactaaacaatatattgcttaagcaataaggatacacaaactaatgaaaatcaaaggatttactaatacaaacttcagtatagtaattaattggaatgggagagaaagatgcaaagtttctatttctttttttgttttgttttgagacagtgtctcattctgttgccaaggcaggagtgcagtggcaggatctcagatcactgcaagctcagcctcctgggttcaagtggttcttctgcctcagcctcccaagtagctgggattacaagcatgcaccaccacacccagctaatttttgtaattttagtagagatggagtttcaccatgttggccaggctggtctcgaactcctggtcttaagtaatccgcccacctctgccatcaaagtttctgtttcttaagttggctgccgagtacacaggttttctttgtaaaataattatttaaattgttaatatgcattacttatatgcttttcatttacaatgtatttcacaagaaaaataaaacaaagcaaataagaaaac

SEQ ID NO: 203768 - DNA, 541 bp, Homo sapiens
  Payload ID: 20189
  Gene Name: zinc finger protein 774
  ENST ID: ENST00000560038
  CDS Start-End: 129-263
acgaatcccggtcgggttctgggaggcacagcctcggggttgcgggccgggtgcggctcggcggtggaggactcacttcctgctccatccccggctgggccctggggcggaactgatgacgcttgataatgtggctggggacttcagggaagagtgggttacctggacactgcttagagaatcctctccaggaatgccacccagcacagttagaagaatgggctctcaaaggcctgggttggactctcacctctgccacttaacttctgagacttctgaggtctttgtggaaaaggagaatttccaggcctagtgtaatctcccagccggagcagaaagaagagccatgggtcctaccactccaaaactttgaggcgaggaagatcccgagggaaagccacacagactgtgagcatcaggtggcaaagctcaatcaggacaattctgaaacagcagaacaatgtggaacatcctcagaaaggaccaataaagatctttctcatactcttagttggggaggaaactgggagcaaggcctaga

SEQ ID NO: 203769 - DNA, 284 bp, Homo sapiens
  Payload ID: 20189
  Gene Name: zinc finger protein 774
  ENST ID: ENST00000558586
  CDS Start-End: 49-284
ctgatgcacattgaggtctcttgctttaggaactgatgacgcttgataatgtggctggggacttcagggaagagtgggttacctggacactgcttagagaatcctctccaggaatgccacccagcacagttagaagaatgggctctcaaaggaatttccaggcctagtgtaatctcccagccggagcagaaagaagagccatgggtcctaccactccaaaactttgaggcgaggaagatcccgagggaaagccacacagactgtgagcatcaggtggcaaagct

SEQ ID NO: 203770 - DNA, 2257 bp, Homo sapiens
  Payload ID: 20190
  Gene Name: zinc finger protein 775
  Uniprot ID: Q96BV0
  ENST ID: ENST00000329630
  CDS Start-End: 108-1721
ggtgcccaagtcgccctcggggtggcagttcccgttaaccttagccacaaagtcaaagatggcaggaaagggacacagccggcgctgatgctgggaggcctccagggatggagagtggcctggctggcaacggcacaggagctgggctggtgatgaaggtcaagcaggagaagccggagcggctgctgcagacgctggcgccgcaggccatgcttgtggagaaggacaaggagaacatatttcagcagcaccggggcctcccgccacgccagaccatggggcggcctcgagccctggggggacaggaggagtctgggagtccaaggtgggcccctcccactgagcaggatgcggggctggcaggccgggctcccgggtcagcctccggccccctgagcccctcgctttcctccggcgagggtcactttgtatgcctggactgcgggaagaggttcagctggtggtcgtccctgaagatccaccagcgcacccacaccggggagaagccgtacctctgcggcaagtgcggcaagagcttcagccagaagccgaacctggcgcgccaccagcggcaccacacgggcgagcgacccttctgctgccccgagtgcgcgcggcgcttcagccagaagcagcacctgctcaagcaccagaagacccactcccggcccgccacccactcgtgccccgagtgcgagcgctgcttccgtcaccaggtgggcctccgcatccaccagcgcgcgcacgcccgggaccgccagggctcccgcgccggcctgcacgagctgattcaggacgcggcggcgcgccgggcctgtcgcctgcagccggggccgccgcgggggcgccccgagtgggcctggctggggctctgccagggctggtggggccagcccggggcccgggccgcggtctccggccccgaggggccgggcgagccgcgccagttcatctgcaacgagtgtggcaagagcttcacctggtggtcgtcgctgaacatccaccagcgcatccacactggcgagcgcccctatgcgtgccccgagtgcggccgccgcttcagccagaagcccaacttgacgcggcacctgcgcaaccacacaggcgagcgcccgcacccctgcccgcactgtggccgcggcttccgccagaagcagcacctgctcaagcacctgcgcacgcacctgcccggcgcccaggctgcgccctgccccagctgcggtaagagctgccgcagccgcgccgcgctgcgcgcccaccagcgcgcccacgctgtcgctgagcccgccgttccggccggggaaccgggcgaccagccgcaggccgaggccatcccgggcttggccgcgaggccgcggagctcccaacggtccccgggggcccgggacacgctgtggggccggggacaagcgggcctcgctgggcctggcgagccgcgccagttcatctgcaacgagtgcggcaagagcttctcgtggtggtcggcgctcaccatccaccagcgcatccacacgggtgagcggccctacccgtgccccgagtgcggccgccgcttcagccagaagcccaacctgacgcggcaccggcgcaaccacacaggcgagcggccctacctgtgtcccgcctgcggccgcggcttcagccagaagcagcacctgctcaagcaccagcgcgtgcaccgcgcggcccctgcgtgcagccccaaggaggaggcgcgctagtggactggacctcagcggacccgtggtggtgcgggggatgtttgcggggtgtgtgtggggagtgggggtggccaggattgctggctcttagaaccccttagagcgggaccggtggattccttaaggctctgaagggctgagaacagttctagaagcgtcccaaagggtgctgggaaaggtcccagcgtgggttgagggaggagggaagatccgagttcctcaccgcgggccgggatgtgaccaccctcttcagaggttggaccccaggcttcaagcaccgagtgaggggtctgttggggacgctgggagagtctctggtgtgaagtggcttaggtctggactggtcagctgtggcaccagccggtcctgcccacgcttcaggatggccgggggctgcccctgtgggagagttgccaagactcggcgataccaaggatggaagccagaggctgtggcgagggagagccaagcatattcccagcaccagggccactgctggcacgtcgtagacatccaataaatatttttggaaggag

SEQ ID NO: 203771 - DNA, 675 bp, Homo sapiens
  Payload ID: 20190
  Gene Name: zinc finger protein 775
  ENST ID: ENST00000490973
  CDS Start-End: 178-675
attgtctctagggctttctgtcttgctgtaacgtctctccagccagctgcagctcctgctgacttatcccaccccagcgcaggtcatccaacggtgacttatggccccggcctcctggctcgatgaggatggcaggaaagggacacagccggcgctgatgctgggaggcctccagggatggagagtggcctggctggcaacggcacaggagctgggctggtgatgaaggtcaagcaggagaagccggagcggctgctgcagacgctggcgccgcaggccatgcttgtggagaaggacaaggagaacatatttcagcagcaccggggcctcccgccacgccagaccatggggcggcctcgagccctggggggacaggaggagtctgggagtccaaggtgggcccctcccactgagcaggatgcggggctggcaggccgggctcccgggtcagcctccggccccctgagcccctcgctttcctccggcgagggtcactttgtatgcctggactgcgggaagaggttcagctggtggtcgtccctgaagatccaccagcgcacccacaccggggagaagccgtacctctgcggcaagtgcggcaagagcttcagccagaagccgaacctggcgcgccaccagcggcaccacacgggcgagcgacccttctgctgcccc

SEQ ID NO: 203772 - DNA, 635 bp, Homo sapiens
  Payload ID: 20190
  Gene Name: zinc finger protein 775
  ENST ID: ENST00000478789
  CDS Start-End: 202-635
cccggcggggggaggttggggacgggcctggcagttgtgaactcgaacctgccgctgtcgccgcggcggggcggggagcgagagtgggccgcggaggccggccttcgggctccatggacgggcgccgcgtccctgcacagcccgccgcagagatggcaggaaagggacacagccggcgctgatgctgggaggcctccagggatggagagtggcctggctggcaacggcacaggagctgggctggtgatgaaggtcaagcaggagaagccggagcggctgctgcagacgctggcgccgcaggccatgcttgtggagaaggacaaggagaacatatttcagcagcaccggggcctcccgccacgccagaccatggggcggcctcgagccctggggggacaggaggagtctgggagtccaaggtgggcccctcccactgagcaggatgcggggctggcaggccgggctcccgggtcagcctccggccccctgagcccctcgctttcctccggcgagggtcactttgtatgcctggactgcgggaagaggttcagctggtggtcgtccctgaagatccaccagcgcacccacaccggggagaagccgtacctctgcggcaagtgcggcaagagcttcag

SEQ ID NO: 203773 - DNA, 5292 bp, Homo sapiens
  Payload ID: 20191
  Gene Name: zinc finger protein 776
  Uniprot ID: Q68DI1
  ENST ID: ENST00000317178
  CDS Start-End: 264-1820
acttccggcgtcctctactagtggccattttgattggtgttgggtgtattttccagtgagagaccgcggagtgttgggtcgtgtagaagtgactgaacccagaaggtggagacgagacgttgtcccgactgcacagaggctgctctgcagctccttaaaggcgctaggcgtgacccgcaccaaggccgggatcgggaccaccgtgcccgggtacctgcactgctcgccccctcctttcgaccccgctttccccacccagtcggatggcggcggccgcgctgaggcccccggctcagggcactgtgacctttgaagatgtggctgtgaacttttcccaggaggaatggagtctccttagtgaggctcagagatgcctttatcatgacgtgatgctggagaacctgacacttatatcttctctaggttgttggtatggagcaaaagacgagacaccttctaagcagaccctttctatacaacaggagtccccactcaggacacattggacaggtgtatgtaccaagaaggtccacctctggggaatgtgtggccctctcctgggagatatcttacaccagggaacacaacacaatcagaaattgaatgggtttggggcatatgaaaaaaaattggatgacgatgcaaaccatcatcaagaccagaagcagcacattggagagaaatcgtacagaagcaatgccaagggaacatcttttgtaaagaactgtaaattccatatgtcacatgagccatttatctttcatgaggttgggaaagactttttgtccagcttgagattactccaacaagaggacattcacacttcagggaagtcaaactttgaaactaagcatgggataccccttcagggtggaaaaactcattacatctgtggagagtccacaataccgtttagcaacaaacactcacttgtccttcaccagagacttctccctagagaaggaccttatgtatgcagtgattctgggaaattcactagcaaaagtaatagttttaataatcatcagggagttcgcactggaaaaagaccttatcagtgtggacaatgtgatgaatcattttggtataaggcccacctcactgaacaccagagagttcacactggagaaagaccttatgagtgtggagaatgtgataaatcttttagtcataagcacagtcttgttgaccatcagcgagttcacactggagaaagaccttatgaatgtgacgaatgtgggaaatcttttagccataagcgcagccttgttcaccaccagcgagttcacactggagaaagaccttatcagtgtggagaatgtgggaaatcgtttaatcacaagtgcaacctcattcagcatcagcgagttcacactggagaaagaccttttgagtgtacggcatgtgggaagttatttaggagcaactcccacctaaaggaacaccagagagttcacactggagaaagaccctatgagtgtaaagaatgtaggaaatcatttaggtacaagtcacacctcactgaacaccagagagttcacactggagaaaggccatatgagtgtagagaatgtgggaaatgttttcatcaaaagggcagtctcattcaacatcagcagatccactctggagaaaggccacatgagtgtggagaatgtgggaaatgttttcatcaaaagggcagtctcattcgacatcagcagattcactctggagaaaggccacatgagtgtggagaatgtggaaagtgttttcgtcaaaagggaaacctcattaaacatcaacgagttcacacgggagaaagacatcatgaatgttgaaaatttggcagatctgttggtaaaaagagcaccctcattcaacattcgtgagatcacactggaaagcacttatgagtatggagaatgtgcaaaatcatctagccaaaaggttggcctcattcaacaatagcaagatcacactggggaaaggctttctgagtgtagagaatgtatgaaatcctgtacatagaagttttgcctcaccaaataccagaagggtcacactggagaaagaccctatagttatggggaatttgggaaattacctaacaagaagtcccacctcactgaacactactgagttcacagttgagaaaggccatatgactgtaaggaatttgtaaaattatttagccagaagagctgcattactattcatcagataatttacaatggagaaaggccacataataatttctcacataataaatgtgagaaatcatttccgtacagctctgcgctccatgttcgtaagagttcacactggacaaagccttatgagagcagcgagtagaaaatcctttgtgggaaaactctggtttcattaaacacaggagagttcatgctagagaaaggcctcaacagtgtagcaaatatggaaagacattcactagaagctctgccctgcaagttcacactagagaaagcccttctcagtgaagtaaatttggaaaattgattagtcaaacctctatgctccttcaaaatcagagttcacactggatcaaggctttatggtgtgacaaatatggcacattctttatctaaatgtctaacatattatgcacagacaagctcctgctgtggaagtgccttttgagtgcagagcatttgcgagggcttcactcttctttcactggataccagaatgttgacaggagaaaaataacatagatgtgtgggaatattacttcttgtccagtgtaactgtgggagagagcccttatgaggacaccatcaacctatattgaatgtcatatgtccagtagctgcataaattccaggtatatgggagctgtattgcatttcttatcctgcgtatgtccttgccagatttatttcattcttaggtctctggcaaaagccatttcatctctaccacttggcaggtacctacagtgcatcactcatgcactccatcatattccagaaaaaaagttcaagttgtctcccattcagcagtggtatttttgagtagcctctgcactcgttcctttctcatttctctatgaagagttaggccatggacctgactcagttctggcctagagcagaagtgtccaatcttttggctttcctggtccacattggaagaagaattgtcttgtgccgcatatgaaatacattaacactaatgatagctgatgaacttttttaaaaaatcacacaaaaaccctcataatgttttaagaaagtttacaaatttgtgttgggctgcattcaaagctgtcctgagatacatgcggcccacaagctgcgggttggaccagcttggcctagagaatttttctgattacttgacaagatgggctgtctttcctaggaatctcatgattgtcatgattcttaaaatggaattttccagcctcttaactcaccaacccaagtacaagctgcctctcattgttctggtttctgctatgatgaagtccttatttaagcttccttcaatcttgggaattgtattgactgtattgtgtgaattgtatactcactgcattgtgtggcttagatacaacatggttctggtaccatgaaggattctggtaccatgaaagtttgttggggttactaaactgtgtgactcttagggaacagtatgaaggcagaatatagctctgcatttgtggcctagtttggatggctgcctaaggcctccaaataaagacttcagggctttgtgatctttatttttagatgaaatagtgcaataatatgtgttttcataaatcaacctgagtaggggacagttttagtgacacactttggtgcttctgagaacagcacaaaattattctcttgtttataatggatattgcattctgctcagtactggtgagggaaatctgttctcaagtcctacagtgcattcatgtgtcctgaagtccagaattctgtaggatagtgtcctacgttataagcctggagaaagaaatcataattctttaatttttatttttttagggaaatgatgtcactctgaaactcaggctggaatacactggcatggtcatacctcactgcggcctcaaactcctgggctcaagtgatcctcctgcctcagcctcccgagtacctgagattagcccaggtaatttaagaattttttatagagatagggttttgctattttaccctgactgatgttcaactcctggcctcaagtaatcctctagcatacgcccttgaaagcactaggattacaggtgtgagccaccatgcccagcccaaaaataatttttgtagaattagcatttctaggtagtgaagcagactgcaacagaatagttgggatatactttttttaaaaaggcatccacaatgattcagtcactatgtctgtgatggacaagcaggtacagaaattttcaggacctccataattatgaatctagtgtagcttaggtcattgtcagactaaatctaaaggttttgtggatttctgtagcctatctgggctgcataccaaaaagccatccctgaattagtaggaggaagaggatagggagaaaggaaatctcttagtccagtgatgtggcctttgcaaccagccagcattccaatttaatcaggtggaaatgatcttcctggctcataagtatttggtatcacacaggctaattgccccccttagggcgtgatgagagttaggagagtcaatgtaaaatcacataacctatttgtcaaaaataatgttaaatccagatagttctttcaaattaaatttttaaagctgtaataagactgggcatggtgactcatgcctgttatcccaacactttgggagtccagggtgggagtattgcttgaggtaagaagtttgagactagcctgggtcccatagtaagaccctgtctcttaaaaaataaatactatctttctctctggcctctccatgctccagacaatcactgaattacaatatttgcttaacagtagattaatgtcaattttctggaattttatatgactgatataacatgtttcctcttttcatacctgagtactctcctgagccctatttatttagatgttcttcttttttctttattattatttttatttcacatagcagggatgcatattttgacattcatcaatcatgatatatgagtagttcattctttttatcttagaatatgacatgctatggaaatcactgtatacgaattcatctgcttatggatatgttattgcttcttatttttgtctgttaggaataaaactgcttgttaagcacatttgaatgcaa

SEQ ID NO: 203774 - DNA, 549 bp, Homo sapiens
  Payload ID: 20191
  Gene Name: zinc finger protein 776
  ENST ID: ENST00000431353
  CDS Start-End: 219-395
gtattttccagtgagagaccgcggagtgttgggtcgtgtagaagtgactgaacccagaaggtggagacgagacgttgtcccgactgcacagaggctgctctgcagctccttaaaggcgctaggcgtgacccgcaccaaggccgggatcgggaccaccgtgcccgggtacctgcactgctcgccccctcctttcgaccccgctttccccacccagtcggatggcggcggccgcgctgaggcccccggctcagggcactgtgacctttgaagatgtggctgtgaacttttcccaggaggaatggagtctccttagtgaggctcagagatgcctttatcatgacgtgatgctggagaacctgacacttatatcttctctagcattttatttcttttaggttgttggtatggagcaaaagacgagacaccttctaagcagaccctttctatacaacaggagtccccactcaggacacattggacaggtgtatgtaccaagaaggtccacctctggggaatgtgtggccctctcctgggagatatcttacacca

SEQ ID NO: 203775 - DNA, 546 bp, Homo sapiens
  Payload ID: 20191
  Gene Name: zinc finger protein 776
  ENST ID: ENST00000451849
  CDS Start-End: 1-116
atgtggctgtgaacttttcccaggaggaatggagtctccttagtgaggctcagagatgcctttatcatgacgtgatgctggagaacctgacacttatatcttctctagggaaatgatgtcactctgaaactcaggctggaatacactggcatggtcatacctcactgcggcctcaaactcctgggctcaagtgatcctcctgcctcagcctcccgagtacctgagattagcccaggtaatttaagaattttttatagagatagggttttgctattttaccctgactgatgttcaactcctggcctcaagtaatcctctagcatacgcccttgaaagcactaggattacaggtgtgagccaccatgcccagcccaaaaataatttttgtagaattagcatttctaggtagtgaagcagactgcaacagaatagttgggatatactttttttaaaaaggcatccacaatgattcagtcactatgtctgtgatggacaagcaggtacagaaattttcaggacctccataattatgaatctagtgtagct

SEQ ID NO: 203776 - DNA, 3233 bp, Homo sapiens
  Payload ID: 20192
  Gene Name: zinc finger protein 777
  Uniprot ID: Q9ULD5
  ENST ID: ENST00000247930
  CDS Start-End: 325-2820
ccctggctccccttggaagcacagcccgcgtccctggaacccgggctgcactgagctggtcacatgaactccgggctttctctggtgtgacgggtttcttagatccctttgtgagcgcaggttttgaaagggaacgaccccgggttctgggtgtgagaggcgcaggggatcggcgggaggaaggctgtcggagccaatcaagccgcctccagaccccagcacgtcgcctgggctgcgcgctccgactgcgcctccgcccgcgcgcctcccggcctcgcccgagggtgcctgggcaggcgaggaccccaggttcagcagctggacatggagaaccaacgctcatcacctctgtcgttccccagtgttccacaagaagaaaccttacgtcaggcccctgctggactcccccgagaaactctgttccaatcccgcgttcttcctcccaaagaaattccttctttgtctcccaccattccccgtcaaggctccctgccccaaacttccagtgctcccaagcaagagacttctggccggatgccacatgtgctccagaagggaccctcactcctgtgttctgccgcttctgagcaagagacttctctccagggccccctggcttcccaggaagggacccagtatccacccccagctgctgctgaacaagaagtctcccttctctcccactccccccaccaccaggaagcccccgttcactcccctgaagctcctgagaaagaccccctgaccctttccccaacagttcccgagactgacatggacccgctgctccagagcccggtttcccaaaaggacacccctttccagatctcttctgcagtccagaaggaacagccgctccccacggcagagatcacccgcttggctgtgtgggctgccgtccaagcagtggagaggaagctggaggcccaggccatgaggctactgaccctggaaggcaggacggggacaaatgaaaagaagatagccgactgcgagaagacagccgtggagttcgcgaaccatctggagagcaagtgggtcgtgttggggaccctgctgcaggagtatgggctgctgcagaggcggctggagaacatggagaacctgctgaaaaacagaaatttctggatcctgcggctgccccccggcagcaatggagaagttcccaaggtccctgtcacatttgatgatgttgctgtgcacttctcggagcaggagtggggaaacctgtctgagtggcagaaggagctctacaagaacgtgatgaggggcaactacgagtccctggtttccatggactatgcaatttccaaaccagacctcatgtcacagatggagcgcggggagcggcccaccatgcaggagcaggaagactctgaggagggcgaaacgccgacagatcccagtgctgcgcacgatgggatcgtgattaagatcgaggtacagaccaacgacgagggctcagaaagtttggagacacctgagcccctgatgggacaggtggaagagcacggcttccaggactcagagctgggtgacccctgtggggaacagccagacctggacatgcaggagccagagaacacgctggaggagtccacggaaggctccagcgagttcagcgaactgaagcagatgctggtgcagcagaggaactgcacggaggggatcgtgatcaagacagaggaacaagacgaggaggaagaagaggaggaggaggatgagctgccgcagcacttgcaatcccttgggcagctgtccgggagatatgaggccagtatgtaccagaccccgctgcccggggagatgtcccccgagggcgaggagagccccccgcccctgcagctaggaaaccccgcagtgaaaaggctggcgccctccgtgcacggtgagcggcacctgagcgagaaccgcggggcctcgagccagcagcagcggaaccggcgcggcgagcggcccttcacatgcatggagtgcggcaagagcttccgcctgaagatcaacctcatcatccaccagcgcaaccacatcaaggaggggccctacgagtgcgccgaatgcgagatcagcttccggcacaagcaacagctcacgctgcaccagcgcatccaccgcgtgcgcggaggctgcgtctcacccgaacgcgggcccacgttcaaccccaagcacgcgctcaagccgcgtcccaagtcacccagctctggtagcggcggcggtggccctaagccctacaagtgccccgagtgcgacagcagcttcagccacaagtccagcctgaccaaacaccagatcacgcacacgggtgagcggccctacacgtgccccgagtgcaagaagagcttccgcctgcacatcagcttggtgatccatcagcgcgtgcacgcgggcaagcatgaggtctccttcatctgcagcctgtgcggcaagagcttcagccgcccctcgcacctgctgcgccaccagcggactcacacaggcgagcggcccttcaagtgccccgagtgcgagaagagcttcagcgagaagtccaagctcaccaaccactgccgcgtgcactcgcgcgagcggccgcacgcctgccccgagtgcggcaagagcttcatccgcaagcaccacctcctggaacaccggcgcatccacacaggcgagcggccctaccactgcgccgagtgcggcaagcgcttcacgcagaagcatcacctgctggagcaccagcgcgcgcacacgggcgagcggccctacccctgcacgcactgcgccaagtgcttccgctacaagcagtcgctcaagtaccacctgcggacccacacgggcgagtgagcgcgcgccccgccgccgccgcccggccaggtgcgcgggccgtgccccccctcggacaccgccaggcccgagcccagcgggcgggggcggggcgccccccagcccctttgccgtgagctccccctctcctctcgtccctcctcccaaggacatgggggcagtgagaccaggtcccttgctgccgcgtttccccgggggccccaggggggagggcgcggacctggggaaccctttcgggctgttaatttccttgacaataaaatggatgaaaccaatcagcacggggggcgtgatttggccgccggccactcagaggggcggtgtagggcccatctagttggggatagaactttataattaccttttggatactgtggttctatttgataataatagagtaatttttaaaagaa

SEQ ID NO: 203777 - DNA, 2386 bp, Homo sapiens
  Payload ID: 20193
  Gene Name: zinc finger protein 778
  Uniprot ID: Q96MU6
  ENST ID: ENST00000306502
  CDS Start-End: 171-2234
tggccttggcttcaggaaaggagcattcagacgcttccgtcagcctcccaggatggcagcccctgacctggcccacggacgcggtgacctttgacgacgtggctgtggacttcacccaggaggaatggactttactggacccatctcagagagacctctacagagatgtgatgctggaaaactacgagaacctggcctcagtaggacatcacctgttccaacccagtgtgatctattggctggagcaggaagaggagttgagggcagggcggagagcagttctccaagaatggcgacttaaaaccaaagggccagcacttcggcaggatagatcttggttcagagcatcaaatgagacacagacggcaagaagccacaatggagggcagctctgtgaccgcacgcagtgtggagaagctttcagtgaacactcaggcctcagcacacacgtgagaactcaaaatacaggagacagttgtgtgtctaatcattatgaaagggacttttttattccatgccagaaaaccttgttcaaaattggagagcagttttccgtgttgggtcagtgtggaaaagccttcagctctactccaaatgttgtttcccagcaagcatgcactcgggacagatctcttgactacagcagctgtggggaagtgttccttaatcagtcataccttcaggcacgtgcgggaagtcacaacggagaagaaacatggaaatggaagccgtgtgggaaagctctaactcactccatgggctgcgccacacctgttgaaatgcatgccgtcaggaatccccacgtatgtagggaatgtgggaaggcctttaggtacactgcctaccttactggtcgcgtgcaagtccaccctggggaaaagccctgtgaattggaagaatgtggaaaagcctcccctgtttcttccagcctaactcaacatgtaagaattcatgctgcagagaaaccctgtgaatgtaaagaatgcggaaaagccttcactggactctcaggtctttctaaacacgtccaaacagaccctggacagaagccctatgaatgtaaggactgtgggaaagcctgcggtgggttttatctactgaatgagcatggaaaaactcacacgagggagaagccctttgcatgtgtggtttgcggaaaatattttagaaattcctcatgccttaataatcatgttcgaattcacactggaataaaaccctatacatgcagctactgtgggaaggccttcactgtgcgctgtggccttactagacacgtacgaacacacacgggcgagaagccatacacgtgtaaggactgcgggaaagccttctgtacatcctcgggccttactgagcatgtaaggactcacactggagagaaaccatatgaatgtaaagattgtgggaaatccttcactgtttcttcaagcctgactgagcacgcgagaatccataccggagagaaaccctacgaatgtaagcagtgtggcaaagccttcacagggcgctcaggcctcactaaacacatgcggacacacaccggggagaagccctatgaatgtaaggactgtgggaaagcctacaatagggtttatctactgaatgagcatgtgaaaactcacacagaggagaagccctttatatgtacggtatgcaggaaatccttcagaaattcctcgtgcctgaataagcacattcagattcacactggaataaaaccttatgaatgtaaggactgtgggaaaacattcactgtttcttcgagcctaaccgagcacatacgaactcacactggagagaaaccttatgaatgtaaagtatgcggaaaggccttcaccacatcctcacaccttatcgtgcacataagaacccacaccggtgagaaaccctacatatgtaaggagtgtgggaaagcctttgcttcctcctcacaccttatcgaacacagaaggactcacacaggagagaaaccttacatatgtaacgagtgtgggaaagccttccgtgcctcctctcacctgcataaacatggaagaattcacactgggcagaaaccctataaatgtaaggaatgtgggaaagcatacaataggttttatctactaaaagaacatttaaaaacttacactgaagagcaggtttttgtatgtaaggactgtggaaaatcttttaagaattcctcatgccttaaccatcacactcaaattcacactgatgagaaacctttctaatgtaaagaatgtggggaagctgtcagctacactcattcacgttgaagacatgaaagacctctcgttctccagatgtccatgacttgaggaatgtggctaggcaatcagcatctcatcacaacccggcaggcaggaactcaccctggagccct

SEQ ID NO: 203778 - DNA, 3608 bp, Homo sapiens
  Payload ID: 20193
  Gene Name: zinc finger protein 778
  ENST ID: ENST00000433976
  CDS Start-End: 340-2613
ctgtcttacagctgatccggttcttgcggcggtgcgtgctggcgccggagagttccgcgcgtgtcctcgggctgtccgcggggaagctggtccgggagtgggcgcccgcccgcctgcctcgcgccttgcgcccccggcaccgcttccagaagggaaagtcgccgccgctcgcggtagacccgggcagcgcttccattccgcggagctggaaatagggatccagccatccgtgggtcaggaggaatggagactgtaccttccacatagattcacaagctgccctgcagtggccttggcttcaggaaaggagcattcagacgcttccgtcagcctcccaggatggcagcccctgacctggcccacggaggtcatgtttctagggactcagtctgccttcatgaagaacagacacaggcagcagggatggtggctggctggctgataaattgttaccaggacgcggtgacctttgacgacgtggctgtggacttcacccaggaggaatggactttactggacccatctcagagagacctctacagagatgtgatgctggaaaactacgagaacctggcctcagtaggacatcacctgttccaacccagtgtgatctattggctggagcaggaagaggagttgagggcagggcggagagcagttctccaagaatggcgacttaaaaccaaagggccagcacttcggcaggatagatcttggttcagagcatcaaatgagacacagacggcaagaagccacaatggagggcagctctgtgaccgcacgcagtgtggagaagctttcagtgaacactcaggcctcagcacacacgtgagaactcaaaatacaggagacagttgtgtgtctaatcattatgaaagggacttttttattccatgccagaaaaccttgttcaaaattggagagcagttttccgtgttgggtcagtgtggaaaagccttcagctctactccaaatgttgtttcccagcaagcatgcactcgggacagatctcttgactacagcagctgtggggaagtgttccttaatcagtcataccttcaggcacgtgcgggaagtcacaacggagaagaaacatggaaatggaagccgtgtgggaaagctctaactcactccatgggctgcgccacacctgttgaaatgcatgccgtcaggaatccccacgtatgtagggaatgtgggaaggcctttaggtacactgcctaccttactggtcgcgtgcaagtccaccctggggaaaagccctgtgaattggaagaatgtggaaaagcctcccctgtttcttccagcctaactcaacatgtaagaattcatgctgcagagaaaccctgtgaatgtaaagaatgcggaaaagccttcactggactctcaggtctttctaaacacgtccaaacagaccctggacagaagccctatgaatgtaaggactgtgggaaagcctgcggtgggttttatctactgaatgagcatggaaaaactcacacgagggagaagccctttgcatgtgtggtttgcggaaaatattttagaaattcctcatgccttaataatcatgttcgaattcacactggaataaaaccctatacatgcagctactgtgggaaggccttcactgtgcgctgtggccttactagacacgtacgaacacacacgggcgagaagccatacacgtgtaaggactgcgggaaagccttctgtacatcctcgggccttactgagcatgtaaggactcacactggagagaaaccatatgaatgtaaagattgtgggaaatccttcactgtttcttcaagcctgactgagcacgcgagaatccataccggagagaaaccctacgaatgtaagcagtgtggcaaagccttcacagggcgctcaggcctcactaaacacatgcggacacacaccggggagaagccctatgaatgtaaggactgtgggaaagcctacaatagggtttatctactgaatgagcatgtgaaaactcacacagaggagaagccctttatatgtacggtatgcaggaaatccttcagaaattcctcgtgcctgaataagcacattcagattcacactggaataaaaccttatgaatgtaaggactgtgggaaaacattcactgtttcttcgagcctaaccgagcacatacgaactcacactggagagaaaccttatgaatgtaaagtatgcggaaaggccttcaccacatcctcacaccttatcgtgcacataagaacccacaccggtgagaaaccctacatatgtaaggagtgtgggaaagcctttgcttcctcctcacaccttatcgaacacagaaggactcacacaggagagaaaccttacatatgtaacgagtgtgggaaagccttccgtgcctcctctcacctgcataaacatggaagaattcacactgggcagaaaccctataaatgtaaggaatgtgggaaagcatacaataggttttatctactaaaagaacatttaaaaacttacactgaagagcaggtttttgtatgtaaggactgtggaaaatcttttaagaattcctcatgccttaaccatcacactcaaattcacactgatgagaaacctttctaatgtaaagaatgtggggaagctgtcagctacactcattcacgttgaagacatgaaagacctctcgttctccagatgtccatgacttgaggaatgtggctaggcaatcagcatctcatcacaacccggcaggcaggaactcaccctggagccctatgcagcagacacagagaaagccctcagtgttctctaaggtcttgctgaatatggatggtatccagtagagagaactctattgatgtgtgatatgcagcagcattgttgctgttctgctcagtactttgatgatcccttgtgatctcacaatgaagaaaaaccttaggagggtgagaattgttgggaagtcattttttacattacatctttcctcaccctttagtaaacgtggtgattgacacttgaagtgttgtgaatgtatggaagatagcagtcgcttccctgtgttctaaaaccttgtgggctaacttgagacatgtctttctgggggttctgtagacgtattttgaatctttatgatgctgcactgatcattcttggagtgaggactctgttccctgtagaaatcctccagtctggttgctacagtgtccacgtcgcagcctggctaacagtaggccttgaggactcagatgtgatcctgtgtgagcagtgtaggctctggttggttagtcttgaggatccagatgtgattctttgagcagcgtaggctctggttggttagtcttgaggatccagatgtgattctgtgagcagtgtaagctctggttggttagtcttcaggatccagatgtgatcttgtgtgagcactgtaggctctggttggttagtcttgaggatccagatgtgattctgtgagcagtgtaggctctggttggttagtcttgaggatgcagatgtgattctgtgtgagcagcgtaggctctggttggttagtcttgaggatccagatgtgattctgtgagcagcataggctctggttggttagtcttgaggatcca

SEQ ID NO: 203779 - DNA, 1431 bp, Homo sapiens
  Payload ID: 20193
  Gene Name: zinc finger protein 778
  ENST ID: ENST00000567651
  CDS Start-End: 57-200
gcagtggccttggcttcaggaaaggagcattcagacgcttccgtcagcctcccaggatggcagcccctgacctggcccacggaggtcatgtttctagggactcagtctgccttcatgaagaacagacacaggcagcagggatggtggctggctggctgataaattgttaccaggacatcacctgttccaacccagtgtgatctattggctggagcaggaagaggagttgagggcagggcggagagcagttctccaagaatggcgacttaaaaccaaagggccagcacttcggcaggatagatcttggttcagagcatcaaatgagacacagacggcaagaagccacaatggagggcagctctgtgaccgcacgcagtgtggagaagctttcagtgaacactcaggcctcagcacacacgtgagaactcaaaatacaggagacagttgtgtgtctaatcattatgaaagggacttttttattccatgccagaaaaccttgttcaaaattggagagcagttttccgtgttgggtcagtgtggaaaagccttcagctctactccaaatgttgtttcccagcaagcatgcactcgggacagatctcttgactacagcagctgtggggaagtgttccttaatcagtcataccttcaggcacgtgcgggaagtcacaacggagaagaaacatggaaatggaagccgtgtgggaaagctctaactcactccatgggctgcgccacacctgttgaaatgcatgccgtcaggaatccccacgtatgtagggaatgtgggaaggcctttaggtacactgcctaccttactggtcgcgtgcaagtccaccctggggaaaagccctgtgaattggaagaatgtggaaaagcctcccctgtttcttccagcctaactcaacatgtaagaattcatgctgcagagaaaccctgtgaatgtaaagaatgcggaaaagccttcactggactctcaggtctttctaaacacgtccaaacagaccctggacagaagccctatgaatgtaaggactgtgggaaagcctgcggtgggttttatctactgaatgagcatggaaaaactcacacgagggagaagccctttgcatgtgtggtttgcggaaaatattttagaaattcctcatgccttaataatcatgttcgaattcacactggaataaaaccctatacatgcagctactgtgggaaggccttcactgtgcgctgtggccttactagacacgtacgaacacacacgggcgagaagccatacacgtgtaaggactgcgggaaagccttctgtacatcctcgggccttactgagcatgtaaggactcacactggagagaaaccatatgaatgtaaagattgtgggaaatccttcactgtttcttcaagcctgactgagcacgcgagaatccataccgg

SEQ ID NO: 203780 - DNA, 568 bp, Homo sapiens
  Payload ID: 20193
  Gene Name: zinc finger protein 778
  ENST ID: ENST00000564906
  CDS Start-End: 326-568
acagctgatccggttcttgcggcggtgcgtgctggcgccggagagttccgcgcgtgtcctcgggctgtccgcggggaagctggtccgggagtgggcgcccgcccgcctgcctcgcgccttgcgcccccggcaccgcttccagaagggaaagtcgccgccgctcgcggtagacccgggcagcgcttccattccgcggagctgggatccagccatccgtgggtcaggaggaatggagactgtaccttccacatagattcacaagctgccctgcagtggccttggcttcaggaaaggagcattcagacgcttccgtcagcctcccaggatggcagcccctgacctggcccacggaggtcatgtttctagggactcagtctgccttcatgaagaacagacacaggcagcagggatggtggctggctggctgataaattgttaccaggacgcggtgacctttgacgacgtggctgtggacttcacccaggaggaatggactttactggacccatctcagagagacctctacagagatgtgatgctggaaaactacgagaacctggcctcagta

SEQ ID NO: 203781 - DNA, 11031 bp, Homo sapiens
  Payload ID: 20193
  Gene Name: zinc finger protein 778
  Uniprot ID: Q96MU6
  ENST ID: ENST00000620195
  CDS Start-End: 333-2522
acagctgatccggttcttgcggcggtgcgtgctggcgccggagagttccgcgcgtgtcctcgggctgtccgcggggaagctggtccgggagtgggcgcccgcccgcctgcctcgcgccttgcgcccccggcaccgcttccagaagggaaagtcgccgccgctcgcggtagacccgggcagcgcttccattccgcggagctggaaatagggatccagccatccgtgggtcaggaggaatggagactgtaccttccacatagattcacaagctgccctgcagtggccttggcttcaggaaaggagcattcagacgcttccgtcagcctcccaggatggcagcccctgacctggcccacggaggtcatgtttctagggactcagtctgccttcatgaagaacagacacaggcagcagggatggtggctggctggctgataaattgttaccaggacgcggtgacctttgacgacgtggctgtggacttcacccaggaggaatggactttactggacccatctcagagagacctctacagagatgtgatgctggaaaactacgagaacctggcctcagtagaatggcgacttaaaaccaaagggccagcacttcggcaggatagatcttggttcagagcatcaaatgagacacagacggcaagaagccacaatggagggcagctctgtgaccgcacgcagtgtggagaagctttcagtgaacactcaggcctcagcacacacgtgagaactcaaaatacaggagacagttgtgtgtctaatcattatgaaagggacttttttattccatgccagaaaaccttgttcaaaattggagagcagttttccgtgttgggtcagtgtggaaaagccttcagctctactccaaatgttgtttcccagcaagcatgcactcgggacagatctcttgactacagcagctgtggggaagtgttccttaatcagtcataccttcaggcacgtgcgggaagtcacaacggagaagaaacatggaaatggaagccgtgtgggaaagctctaactcactccatgggctgcgccacacctgttgaaatgcatgccgtcaggaatccccacgtatgtagggaatgtgggaaggcctttaggtacactgcctaccttactggtcgcgtgcaagtccaccctggggaaaagccctgtgaattggaagaatgtggaaaagcctcccctgtttcttccagcctaactcaacatgtaagaattcatgctgcagagaaaccctgtgaatgtaaagaatgcggaaaagccttcactggactctcaggtctttctaaacacgtccaaacagaccctggacagaagccctatgaatgtaaggactgtgggaaagcctgcggtgggttttatctactgaatgagcatggaaaaactcacacgagggagaagccctttgcatgtgtggtttgcggaaaatattttagaaattcctcatgccttaataatcatgttcgaattcacactggaataaaaccctatacatgcagctactgtgggaaggccttcactgtgcgctgtggccttactagacacgtacgaacacacacgggcgagaagccatacacgtgtaaggactgcgggaaagccttctgtacatcctcgggccttactgagcatgtaaggactcacactggagagaaaccatatgaatgtaaagattgtgggaaatccttcactgtttcttcaagcctgactgagcacgcgagaatccataccggagagaaaccctacgaatgtaagcagtgtggcaaagccttcacagggcgctcaggcctcactaaacacatgcggacacacaccggggagaagccctatgaatgtaaggactgtgggaaagcctacaatagggtttatctactgaatgagcatgtgaaaactcacacagaggagaagccctttatatgtacggtatgcaggaaatccttcagaaattcctcgtgcctgaataagcacattcagattcacactggaataaaaccttatgaatgtaaggactgtgggaaaacattcactgtttcttcgagcctaaccgagcacatacgaactcacactggagagaaaccttatgaatgtaaagtatgcggaaaggccttcaccacatcctcacaccttatcgtgcacataagaacccacaccggtgagaaaccctacatatgtaaggagtgtgggaaagcctttgcttcctcctcacaccttatcgaacacagaaggactcacacaggagagaaaccttacatatgtaacgagtgtgggaaagccttccgtgcctcctctcacctgcataaacatggaagaattcacactgggcagaaaccctataaatgtaaggaatgtgggaaagcatacaataggttttatctactaaaagaacatttaaaaacttacactgaagagcaggtttttgtatgtaaggactgtggaaaatcttttaagaattcctcatgccttaaccatcacactcaaattcacactgatgagaaacctttctaatgtaaagaatgtggggaagctgtcagctacactcattcacgttgaagacatgaaagacctctcgttctccagatgtccatgacttgaggaatgtggctaggcaatcagcatctcatcacaacccggcaggcaggaactcaccctggagccctatgcagcagacacagagaaagccctcagtgttctctaaggtcttgctgaatatggatggtatccagtagagagaactctattgatgtgtgatatgcagcagcattgttgctgttctgctcagtactttgatgatcccttgtgatctcacaatgaagaaaaaccttaggagggtgagaattgttgggaagtcattttttacattacatctttcctcaccctttagtaaacgtggtgattgacacttgaagtgttgtgaatgtatggaagatagcagtcgcttccctgtgttctaaaaccttgtgggctaacttgagacatgtctttctgggggttctgtagacgtattttgaatctttatgatgctgcactgatcattcttggagtgaggactctgttccctgtagaaatcctccagtctggttgctacagtgtccacgtcgcagcctggctaacagtaggccttgaggactcagatgtgatcctgtgtgagcagtgtaggctctggttggttagtcttgaggatccagatgtgattctttgagcagcgtaggctctggttggttagtcttgaggatccagatgtgattctgtgagcagtgtaagctctggttggttagtcttcaggatccagatgtgatcttgtgtgagcactgtaggctctggttggttagtcttgaggatccagatgtgattctgtgagcagtgtaggctctggttggttagtcttgaggatgcagatgtgattctgtgtgagcagcgtaggctctggttggttagtcttgaggatccagatgtgattctgtgagcagcataggctctggttggttagtcttgaggatccagatgtgattctgtgagcagcgtaggctctggttggttagtcttgaggatccagatgtgattctgtgagcagcgtaggctctgcttggttagtcttgaggatccagatgtgatcctgcgtgagcagcgtaggctctggttggttagtcttgaggatccagatgtgatcctgtgtgagcagcgtaggctctggttggttagtcttgaggatccagatgtgattctgtgagcagtgtaggctctggttggttagtcttaggtatccagatgtgatcctgtgtgagcagcgtaggctctggttggttagtcttgaggatccagatgtgatcctgtgtgagcagcgtaggctctggttggttagtgttgaggatccagatgtgattctgtgagcagtgtaggctctggttggttagtcttgaggatccagatgtgatcctgtgtgagcagtgtaggctctggttggttagtcttaagtatccagatgggatcctgtatgagcagcgtaggctctggttggttagtcatgctcttaggcatgacccacctgtagggtcccacactggccaatgttggggcataacacagctctacattttatgaaaatgcccttgttcctctcccatacctgatcccttcagataaaacaccagggtgcaaggaggggcagagtggagaggggcgaggtctgtaccctgagatgcccccgtttcatggccgtggagggagaaccaccaccccccacgtggggaggagggaattcctgtaccttaggcagtgccggacgggtgagagccctgagtgtccttgttgacctccagatcctcttcacagcatgcagagcggtcctggcagctgctgcaatctggcactcctggggcagctgctgcgatccggcactgatgaggcagctgctgtgatccggcattcatggggcagctgctgcgacccggcactcctggggcagctgctgcttgtgtgtgtgctgctcctttgtgtaccatgaaaacagaccagggacacggctggtcctgatgttctgtggcgcttggccctgtcactggcgcttcttggatgaggcccttaaacacacacagtggcagagcaagacttcatgtgagtgacacgaatgtgtgtcctctggctgcagcaatcctgggttatgttttttgtggccatcagggcagcagctgcttggtgactgtttctgtggtgttgaatccccacggtataaaggtaatctacaacgaggtgaacaataaatcctggatggacagacccgtgcaccttcatattacgtgtttgaaatcctggatggacagacccgtccaccttcatgtcacgtgtttgaaattctggatggacagacccatgcaccttcatgttacgtgtttaaaattctggatggacagacccgtgcaccttcctgtcacatgtttgaaatcctggatggacagacctgtgcaccttcatgtcacgtgtttgaaattctggatggacagagccatgcaccttcatgttacgtgtttgttgtggagaggagtgggttgtgccatgtttctcttgtgggattgagtgtggctatttagctcatctgttgccacctttaattgttggcattgacactaaaggtcatcagattagcgggaaccagcttgtggggttgtagcggctcctggactggtctcaggtgacatcctgattggctgaaataagtcctgcaggtctctgctagaactgactcacagttgcctgagtccagaacttgtgggtcacaggtgacgccaggactgcatcatcctggtgctcggactcctagtgacagcatcctgagcaggcggtagcccagacaccaccctgcctgatatgcccactgttggtggagacatcaccccagcacagacctcaattaagacgactacccctccgacgactccccctcccttcactggaggtgacttcacgcacttcttcagaacctcctcagcagcgatgcccatggactggggttcctaaggcacaaatttgatatttgagattctgtgatgagctgagcttgctgtccgctaacccgtgatcctggtgtaatctcaaccaaaacccacagccctgcaccccttgcctgtaggaaaatctggtaggagttagtagtgtctgtgaagtctcaataattgataccaaaatgttttgtttcaccaggaggtgcccgcctcctatcagcctctgggaaggccactgtctccccagtgccttctcctccgctgcagctttccatctcatctccttactcccttgacttggcttcacacagagcctcttctttacacatactaactgtttgcttcataccctcctgcagcagaactacagacctgccatcctgataattgtcaaactcatccctttatcacctttataactcctcaaggatattatcattggacccccaacatttcaaagtgattttcttgagtaataccatatgctgtgatgtggatgtgattggtttgccctcatcaagtctcatgttgagctttgaccctcagtgtggcagtgctgggagggggcctggtgggggtttgggtcatgggggcaccctcctgaatggttggataccattcattcttgctgtgtcaagcctggattggtttgtaggggaatgcactagttactgggagcatggttgtgataaagccaagccgtccctcgggtttggctcactgcccttgaccttctctgccctgtttgacacagcaaatagtcctcaccagaagcaggtcagatgccagtgctatgcttgcacagcctgctgaaccatgagccaaataagcctctttctaagttacccacagcctcagatatgtagcaacacagacagactaagacaccaagcatgatggaaaactgggttatgggcaggactgcaagtactggttaggcagatacctgtatttctcttcctaactctcagaacgtgttctgtgtcacttagggcaacttatgccctcctgtgtgaaaatctccactcccaatgtctgagggttcctcagagtaagataaaatattaaaggaccaattgtattaattatgttttttttttttttgttagggtacattttcatcctggggtcttgctgtgggggctagaccgtccctctcaggctagatcattcctaaagatggtaaacaacttgctggaaacatgcactgcatatacaaatcaactcactgcatatgcacatcaactcactgcatatgcaactcaactcacaccgtatatgcaactcaactcacaccgtgtatgcaaatcaactcgcactgcgtatgcaactcaactcgcactgcgtatgcaactcaactcgcactgcgtatgcgaatccactcactgcctatgcaactcagctcgctctgcgtatgcaactgagctcgctctgcgtatgcaacccagctcgctctgcgtatgcaactcaagtcgcactgcgtatgcaactcagctcgctctgcgtatgcaactcagctcgcactgcgtatgcaactcagctcgcactgcgtatgcaagtcagctcgctctgcgtatgcaactcagctcgctctgcgtatgcaactcagctcgcactgcgtatgcaactcagctcgcactgcgtatgcaactcagctcgctctgcgtatgcaactcagctcgctctgcgtatgcaactcagctcgctctgcgtatgcaactcagctcgcactgcgtatgcaactcagctcgctctgcgtatgcaactcagctcgctctgcgtatgcaactcagctcgcactgcgtatgcaactcgcactgcgtatgcaactcaactcgcactgcgtatgcaactcaactcgcactgcgtatgcaactcaactcgcactgcgtgtgcaactcaactcgcactgcgtgtgcaactcaactcacactgcgtatgcaactcagcttgctctgtgtatgcaactcaactcgcactgcgtatgcaaatcaactcactgcatatgcaactcagctcgcactgcatatgcaacgcaactcaactcatactgcatatgcaactcaactcacactgtatgcaactcagctcgctctgcatatgcaattcaactcgcactgcgtatgcaaatcaacttactgcatatgcaactcaactcactgcgtatgcaactcaactcgcactgcatatgcaactcaactcgcactgcgtatgcaactcaactcgcactgcgtatgcaactcagctcgcactgcgtatgcaactcaactgttgcaagtacttatttccggccacttcctttttctaactaccacaccaagccagtatttctcctccctgaagtcagcccaggatgaggcactagacagcaggacatgctgtatgcccttgggcctgctggaagtatgcagactagccagccccagacttcatcctgccctgtcctgcctttcctgtgaaaaccctgtggcctctgcctcccctggctctgacttctgcctcctgcccagctctgcagctccccttgggccctgcctggagtgatgtgccgccttctcttgacactgtgagtgataaactttccatgtcaggaacctgtgtgtgtcactcactcaccttgacgagtccgcgtctaggccccaccagtggtgtggttttcctcatagtctctctacctaagcacatgtctgtgacaaggtcttacccagcccagggattcttgaactatctgtaggaactgccatgttgactcctgggcagttttattctttctctctactcgttcaaccttcttagggagtgacgttttttccaaagtggttgtgaaacagcatctccttggggtgttggtttgcacttctcttcattactgatagtatgaacatggttttgcttacgctggctattttcctttttggatgaagtacctggtcttgttttttcctggtttgtttgatctttgttcttttttagaaatagtgaggctgttgtgaggtgagtcaccacttgtgacttagaagattgcagtggtttccacttcacctgtttccacttttgtgatgatgccttaaggaaaaagattgtgccaggtgtggtggctcaggcctgtaatcccaacactttgggaggccgaggtgggtggatcacaaggtcaggagatcaagaccatcctggccaacatggtgaaacgccatctctactaaaaatagaaaaattggctagatgtggtggtgcacgcctgtaatcccagctccttgggaggctgaggcaggagaattgcttgaagatgggaagcacagattgcagtgaaccgagatcgcgccactgcactccagcctggcaacagagtgagactctgtctcaaaaaaaaaggaaaaatatttcttaattttggcatactcaaatttatacaacctttcctttatcttcatcagaaatttcttttctcctaaggccttaaatatgctgtactattttggcttccacagtttctatgttttatcccaagttgcttaatccatttggagttgatttttgttgaccgtatctgtagagtgtaatgtcatttttcccactatggacataaaaatttttgcaaggcctcttttttttaatgaagaaaagaggtttattttgttcacaattctgaaggcctggagggtcccagaagcttggcaccagcacccactaggctccagatcggggcctcatgctgacttccgttttcacacaacgagtgggaaacaggtgtcctaacactgtgagagaaaaaatccgaaagtttagtttttcccattcgcttgccctggcctccaggcagtcctgcagcagcaaacacatcatcagccttaggagctggcctgtgaggttgaccactctgtaggtggacgagcctcgcccgagaagagacatgagcagttctgcgtaggctttaagacagaatcaacatggaaagcacgacccacatggtttcaatagaacttgcctcctgaacctgactaggttactcgcctgatgaaccagtatctccatcacccgtgggactgacagacccagagtgtcataacctaaaattcagaagtgtagactataatcttaaattattcagcatatgtgcaacagccttggggagcagtgttatgataccaaatggctaacattcatgacctcagtatcctggaagaaaaggagaaagtgtgatgtagtaaaaccacttgaaaaaataatgatgaaacatttctcatatttggtgtaagataaaaacttaagtttgaagaggttccatgagccccagacaggataaacctaaagaaaaccaagcccaggccgggggcggtggctcacacctgtaatcccagcactttgggaggccgaggtgggcggatcacaaggtcaggagatcatgaccatcctggccaacacagtgaaacctcgtctctagtaaaaaaaaaaaaaaaaaagaaaaatacaaaaatttagttgggcgtggtggcgggcgactgcagtcccagctactggggaggctgaggcaggagaatggcgtgaacccgggaggcagagcatgcagtgagctgagattgcaccactgcactccagcctgggcaacagagcgagactctgtctcaaaaaagaagaaagaaaagaaaaccaagcccctgccaccacgaagctgccgaaagctacagagtgaaagtcttggaaggaggctgagaaagtggacacagtgcttccagaagaacaattcaattgaccgggtttctcgtcggaagccatagaggccaacaggaaatgtaggagcatttttcaagttctgaaataaaaagaaatgccaacccagattgctatatccaacaaaatatcctttaggaatgaaacagaagtaacgatgaggcaatacaaagaattgcctgcagacctggtttaaataaatggttacagaaaactcttaaggaaacctggaacaaaggaaaagcaatagaagagtaaatacctgagtaaatagatcagatcattctactcttgagttctttaaaatatatattattgtcaaaagcaaaaattatcacatggggtttcaactgatgtatatttaatacataagacaactacaacatgaaggtgaggggcaacgtggctggacggcgtggaggttccgtgctccatttcagtggcaaaataccattccagaaggactggaaaagctaagtctgtatattttaattactaaagaagtgtacagctgggtgtggtggctcacgcctgtaatcccaccactttgggagagtgaggtgggtggatcacttgaggtcaggagtttgagaccagcttggccaacatggtgaaaccccatctctactaagaaatacaaaaattagctgtgtgtggttgggggcacctgtaatctcagcttctcaggaggctgaggcaggagaatcacttgaacccaggaggtggaggttgcagtcagtcgagattgtgccacggcactccagcctgggtgacagagcaagactctgtct

SEQ ID NO: 203782 - DNA, 3674 bp, Homo sapiens
  Payload ID: 20194
  Gene Name: zinc finger protein 780A
  Uniprot ID: O75290
  ENST ID: ENST00000340963
  CDS Start-End: 226-2151
aaggtcttcacgtctgaggaagagatctgtggctgcgggagatctctgcggattggggctccagcctgactgacccgacagtgcgggtggcctagggggaggcgctcagatcgtatttttatccaaaagaaggacctggaggaggatgagagcgttactgctgcacacctaaagtcaagggggagaagcccgaggaagattgaccagttttgtaattctagcaacatggtccatggatcagtgacattcagggatgtggccattgacttctctcaggaggagtgggagtgcctgcagcctgatcagaggaccttgtacagggatgtgatgttggagaactacagccacctgatctcactgggaagttccatttctaaaccagatgtaattacgttactagagcaagagaaagagccctggatggttgtaaggaaagaaacaagcagacggtatccagatttggagttaaaatatggacctgagaaagtatctccagaaaatgatacctctgaagtaaatttacccaaacaggttataaagcaaataagtacaactcttggcattgaggccttttattttagaaatgactcagaatatagacaatttgagggactacagggatatcaagaaggaaatatcaatcaaaagatgatcagctatgaaaaactgcctactcatactcctcatgcttctcttatttgcaatacacataaaccgtatgaatgtaaggaatgtgggaaatactttagtcgtagtgcaaatcttattcagcatcagagtattcatactggagagaaaccctttgaatgtaaggagtgtgggaaagcctttcgacttcacatacaatttactcgacatcagaaatttcatactggtgagaaaccttttgaatgtaacgaatgtggaaaggcctttagtcttcttaccctgcttaatcgccataagaacattcacacaggtgagaaactgtttgaatgtaaggaatgtgggaagtcctttaatcgtagctcaaaccttgttcaacatcagagtattcattctggtgtaaaaccatatgaatgtaaggagtgtgggaaaggctttaatcgtggtgcacaccttattcagcatcagaaaattcattccaatgagaaaccctttgtatgtaaggaatgtgggatggcctttcgatatcattaccaacttattgaacattgccaaattcatactggtgagaaaccctttgaatgtaaagaatgtggaaaggcgtttactcttctgacaaagcttgttcgacatcagaagattcatactggtgagaaaccctttgaatgcagggaatgtgggaaggcctttagtcttctcaaccagcttaatcgccataagaacattcacacaggtgaaaaaccgtttgaatgtaaggaatgtgggaagtcctttaatcgtagctcaaaccttgttcaacatcagagtattcatgctggtataaaaccatatgaatgtaaggagtgtgggaaaggctttaatcgtggtgcacaccttattcagcatcagaaaattcattccaatgagaaaccttttgtatgtagggaatgtgagatggcctttagatatcattgccaacttattgaacattctcgaattcatactggtgacaagccatttgaatgtcaagactgtgggaaggccttcaatcgtggctcaagccttgttcaacatcagagtattcacactggtgagaagccctatgaatgtaaggagtgtgggaaggcttttagactttacctacaactttcccaacatcagaaaactcacacaggtgaaaaaccatttgaatgtaaggaatgtgggaaattctttcgtcgtggttcaaatcttaatcaacatcgaagtattcatactggaaagaaaccctttgaatgtaaggaatgtgggaaagcctttcgacttcatatgcaccttattcgacatcagaaattgcatactggtgagaaaccctttgaatgtaaggagtgtgggaaagcctttcgacttcatatgcaacttattcgacatcagaaattgcatactggtgagaaaccctttgaatgtaaggaatgtggaaaggtttttagtcttcccacccagcttaatcgccataagaacattcacacaggtgagaaggcatcttgaatgtaaggaatgtggaaagtcctttaatcgtgtctcaaaccatgttcaacatcagagtattcgtgctggtgtaaaaccatgtgaatgtaaggggtgtgggaaaggcttcatttgtggttcaaacgttattcagcatcagaaaattcattccagtgagaaactctttgtatgcaaggagtggaggacgacctttagatatcattaccacttatttaacattaccaaattcacactggtaaaaaaccctttgaatgtaaagaatgtggaaaggccttcagttttctgacacagcttgctggacttcaggtcattcatactggcgagaagccatttgaatttgagaaatgtgggaaggccttcaatagtggctcaaaccttgttcaacatcagagtattcatactggtgagaaactctatgaatgtaaggagtgtgggaaaactttcagatttagtttggtcctgactgcacatcaaagaattcatactggtatgaaaccctgtgaatgtacagaatgtgggaagacctttagttgtagctcaaacattgttcaacatgttaaaattcatactggtgagaaacgctataatgtaaggaatatgggaaagcatttgctgtggatgatcagctgtctcaacatcagaaaattcagaatagttagaaattttgtgacaataaggagtgtggacaagccttcactgtgtacgaaaaatttactcaacaccagagagctcatattgatgagaaatcttgtgaacataaaagaatgtgtgaagaactttcatcatggcctgggatttgctcaacttctgagtattcatacttctgagaaatctttgagtgtaaggaatgtggggcgttttatagccacactaaataccttagagttcggagaagataattcttgtgagaaagtctttgaatgaggaatatagggtagttgtcatgttcacaatgtactccctatgaaataatttaccagatacaggcatacctcgctgaattgtgcattgcagttattgtgttttatacaaactgaaggtttgtggcaaccctgtggtgagcaagacgatcaggtccattttcccaacgtcaggtgtgcatttcatgtctttatgtcacattttggtaattctcagaatatttcaaactatttcattgttatatatctatcatggtgatcaatgaccagtgatttttgatgttgctattgtaattgctttgggataccacaaattctgcccataaaagatggtaaacctagttgatacttgttgtgggttttgaaagaatagtcaaatatacaatcatataccccaacctagattcaaaattgttaacaatttgcacgtttattttttgtatatttgttgtaccattgagaataagttttagacatcatgacactttaccctttatttaatcaacgtgtgtatcaaccaaacatgaagacaatatagacaatatcatatagccattgtaccataattaccgttaaggaaagtattcataattctgtaatatc

SEQ ID NO: 203783 - DNA, 7500 bp, Homo sapiens
  Payload ID: 20194
  Gene Name: zinc finger protein 780A
  ENST ID: ENST00000450241
  CDS Start-End: 313-2136
gaggaagagatctgtggctgcgggagatctctgcggattggggctccagcctgactgacccgacagtgcgggtggcctagggggaggcgctcagatcgtatttttatccaaaagaaggacctggaggaggatgagagcgttactgctgcacacctaaagtcaagggggagaagcccgaggaagattgaccagttttgtaattctagcaacatggtccatggatcagtgacattcagggatgtggccattgacttctctcaggaggagtgggagtgcctgcagcctgatcagaggaccttgtacagggatgtgatgttggagaactacagccacctgatctcactgggaagttccatttctaaaccagatgtaattacgttactagagcaagagaaagagccctggatggttgtaaggaaagaaacaagcagacggtatccagatttggagttaaaatatggacctgagaaagtatctccagaaaatgatacctctgaagtaaatttacccaaacaggttataaagcaaataagtacaactcttggcattgaggccttttattttagaaatgactcagaatatagacaatttgagggactacagggatatcaagaaggaaatatcaatcaaaagatgatcagctatgaaaaactgcctactcatactcctcatgcttctcttatttgcaatacacataaaccgtatgaatgtaaggaatgtgggaaatactttagtcgtagtgcaaatcttattcagcatcagagtattcatactggagagaaaccctttgaatgtaaggagtgtgggaaagcctttcgacttcacatacaatttactcgacatcagaaatttcatactggtgagaaaccttttgaatgtaacgaatgtggaaaggcctttagtcttcttaccctgcttaatcgccataagaacattcacacaggtgagaaactgtttgaatgtaaggaatgtgggaagtcctttaatcgtagctcaaaccttgttcaacatcagagtattcattctggtgtaaaaccatatgaatgtaaggagtgtgggaaaggctttaatcgtggtgcacaccttattcagcatcagaaaattcattccaatgagaaaccctttgtatgtaaggaatgtgggatggcctttcgatatcattaccaacttattgaacattgccaaattcatactggtgagaaaccctttgaatgtaaagaatgtggaaaggcgtttactcttctgacaaagcttgttcgacatcagaagattcatactggtgagaaaccctttgaatgcagggaatgtgggaaggcctttagtcttctcaaccagcttaatcgccataagaacattcacacaggtgaaaaaccgtttgaatgtaaggaatgtgggaagtcctttaatcgtagctcaaaccttgttcaacatcagagtattcatgctggtataaaaccatatgaatgtaaggagtgtgggaaaggctttaatcgtggtgcacaccttattcagcatcagaaaattcattccaatgagaaaccttttgtatgtagggaatgtgagatggcctttagatatcattgccaacttattgaacattctcgaattcatactggtgacaagccatttgaatgtcaagactgtgggaaggccttcaatcgtggctcaagccttgttcaacatcagagtattcacactggtgagaagccctatgaatgtaaggagtgtgggaaggcttttagactttacctacaactttcccaacatcagaaaactcacacaggtgaaaaaccatttgaatgtaaggaatgtgggaaattctttcgtcgtggttcaaatcttaatcaacatcgaagtattcatactggaaagaaaccctttgaatgtaaggaatgtgggaaagcctttcgacttcatatgcaccttattcgacatcagaaattgcatactggtgagaaaccctttgaatgtaaggagtgtgggaaagcctttcgacttcatatgcaacttattcgacatcagaaattgcatactggtgagaaaccctttgaatgtaaggaatgtggaaaggtttttagtcttcccacccagcttaatcgccataagaacattcacacaggtgagaaggcatcttgaatgtaaggaatgtggaaagtcctttaatcgtgtctcaaaccatgttcaacatcagagtattcgtgctggtgtaaaaccatgtgaatgtaaggggtgtgggaaaggcttcatttgtggttcaaacgttattcagcatcagaaaattcattccagtgagaaactctttgtatgcaaggagtggaggacgacctttagatatcattaccacttatttaacattaccaaattcacactggtaaaaaaccctttgaatgtaaagaatgtggaaaggccttcagttttctgacacagcttgctggacttcaggtcattcatactggcgagaagccatttgaatttgagaaatgtgggaaggccttcaatagtggctcaaaccttgttcaacatcagagtattcatactggtgagaaactctatgaatgtaaggagtgtgggaaaactttcagatttagtttggtcctgactgcacatcaaagaattcatactggtatgaaaccctgtgaatgtacagaatgtgggaagacctttagttgtagctcaaacattgttcaacatgttaaaattcatactggtgagaaacgctataatgtaaggaatatgggaaagcatttgctgtggatgatcagctgtctcaacatcagaaaattcagaatagttagaaattttgtgacaataaggagtgtggacaagccttcactgtgtacgaaaaatttactcaacaccagagagctcatattgatgagaaatcttgtgaacataaaagaatgtgtgaagaactttcatcatggcctgggatttgctcaacttctgagtattcatacttctgagaaatctttgagtgtaaggaatgtggggcgttttatagccacactaaataccttagagttcggagaagataattcttgtgagaaagtctttgaatgaggaatatagggtagttgtcatgttcacaatgtactccctatgaaataatttaccagatacaggcatacctcgctgaattgtgcattgcagttattgtgttttatacaaactgaaggtttgtggcaaccctgtggtgagcaagacgatcaggtccattttcccaacgtcaggtgtgcatttcatgtctttatgtcacattttggtaattctcagaatatttcaaactatttcattgttatatatctatcatggtgatcaatgaccagtgatttttgatgttgctattgtaattgctttgggataccacaaattctgcccataaaagatggtaaacctagttgatacttgttgtgggttttgaaagaatagtcaaatatacaatcatataccccaacctagattcaaaattgttaacaatttgcacgtttattttttgtatatttgttgtaccattgagaataagttttagacatcatgacactttaccctttatttaatcaacgtgtgtatcaaccaaacatgaagacaatatagacaatatcatatagccattgtaccataattaccgttaaggaaagtattcataattctgtaatatcattccattttcagatttcttcattggcttccaaaccatcttttacagctattcatattcaaaggagaatccattgcagaatctgcattgcatttggttatctctctttagtgtattgtagcctggaaatcctatgaatgtaggcgctcaaattttggtaggtattagaatcaacagtggcacttagtaaagctacagaggcttaagccctagcttataattctgggcctctatgttttttattatttctccaggtgattgtgataccaaccagagttagagagccactgacctagaacatttctcctttctcctcattcttctttttttttttttttttgcagttgcaagatttaatagagtgaaaacagagctcccatacaaagggaggggacccaaagagggtagtcgttgccggctcgaatgcctgggtttatatcctgatcattgtccctcccgctgtgctctcaggcaatagatgattggctatttctttacctcctgtttttgcctaattagcattttagcgggctctctttcttacctgatgggtcgggtgtgagctgagttgcaagccccgtgtttaaaggtggatgtggtcaacttcccatctaggcttagggattcttaatcggcctaggaaatcctgctagtcctgtttctcagtaccccctctcaacaggaaaacccaagtgctgttggggaggttggccaacaactgctctaattgcttcctgctgaattggggtgtagtaggggttgtgcagttgagatttcctctggaggggtgccttcgatgtcattaacattggagcatgggctagcaggccggtccaggggtccgcggtagattttagtcatggactgcatctggggctccatttgaagaatgagttgtggctttacagcttcgattctggaaaagacaaacttaacaaggaggttaaagatacagagattgaaatgtatggcctgcagtgcaggggattatttctttggcacacttcacaggccctgactatctgcttgatagttttgaaaaggcctggtccatctcctcattcttaaaaaatgagattgaattttgattagcccaggaaaattgtctatgtgtttagatttctttctttatagtgtcatttagtgttgttctctttgttgcatattctgtacaagggaatttgagtccagaggctctgttaggtcagattaaacattttggggaagaatactttgtaggctatttgtatggcatatttcactgtcagaaaacatttaagtacaggtccttgcattagtgaaactaagtttgatcatttgggtaagctggtaaccgccataagtccattgtaaagatctaatttgtagtgcataaataatctatggagagactttgacctctgaatatttataatcatgtgtattttagctgtggattgaatacaaaatgaaaattgaaatagactattcaaaaatgaatgccattaaggttgtcaacataagtcaacttgtgtgataaggctgacagtatattcagtacaaaattagcaccctctagtttattcagggagccaagattattttgtctggaaccttgtttttgttcagcatttatcatcagcacctatacatcatggctggtatgtgagctgttgataaactttgaaaaaaattaagcctttaaatcaagctataaaacatgataccattgtggcatcatgaattagagagattaacttttttaaagatcaataataatcctttgtgattttattccagtgcatttaaaaatctataaaatgataatttatattgatagctttcttctttttgtgaatatatccttatcagattattatgcttttgatagactacttaattctatttcttaacatttaattgtatctataatcataggtaaagttataattttctaaacatttttcaggttttgttaatgcagtgatcttataaatcttacaaaacgaggctatttaaaacctggctttctagtctcatgttcctattttttatttccactttcatctttttcatattgattctctttgactttcttttttgaactcaacagattccctgggtattaacccagcacaactcctttatgggtcattgcacattctggtatctcattaagaattgtcataaaaaagagatcccaggaggccttccagtgaaactctatcatcatgcaatcttgggatttctaagttggaagtcacagtccctttgcaaacataataaaacactttaaaatatttgctaaagttacaaaccaattatgtaaaaatttaaaaatcacctactacttttaaaagcagagaaggcatccatagactatttccttgcttacaagctcagtgaacatactgaattcacttataaaaagaattttctcaattttagttgcttttcaaaaaattcttattccttttatttgtaattctttgacattgttgctgcttcacagttttggtaattggacagtttggtctttattatgatattaacatttttacctgtcctgaaacaaggaaatacaatcaaagaaacagaagattggtggaccttgaaccacattatgatatcagatgacccagagtcatggttactaagttgcttaaatttttagtaacaaagatgtattagaaagtgacaggtcaattcaataatggtttttttggatacatttaattatataatccccttaagttgtgcttagtcagcagtatttaatctgttgtctattatatatctaactggtctgttatgtttattatatatttatatattgcttattcatatcttattggagtaactcatttttaaaacaatatatttcatctcctaggagaagaggatcgagtatgtgtttttattctttttcattaggacattggggtattttcttattgtgaaatgtattgaatatttcatttatttggtttgtgagtctgaccttcactccctagcactgatttttatttggccctccttttacctgattcataggagttacgagtagccgttaatatggatacatttttcccatttctagtacactgccccttccaaaagtgtctggcttactcaaacttttctgtatttgttccatcttgcttttacagatcaatacaaataggtaactataccttctaaacaaacatcaagttggtggaaaaaaggcatatgaacagttctttctcacctactatcaacaaacagtaaattaaacattcctaactgcagcctccttttgtaaaatttataaccatttatcttttgagtgtgacatgatactagatgtatgataattacatgttttgtgtatcagtatgaacatgatttttaacagacttgttccaatgaactattatagagatggtccccaacaatgtcaactaacaatttctcagctttatgatggtacaaaagtgatatgttgctatagtttggatatttgtccctccaaatctcatgttgaagtttgatctcagtgttggaggtggggcctaatggaaggtgtttgggtcatggtggaagatccctcatgaataaattaatgccctctctggattgaggggtgagtgagctatcgctctgttaatttttgtgagagctggttgttcaaaagaacctggcacctcctccctcaccctcttgttttctctcttgccatgtgatgtctgcatacactggctctcccttcatcatctgccatgagtggaagcagcctgagacccttagcagaagcagatgctgcaccatgattcttgtacattctgcagaacagtgagccaaataaacctctttattaatca

SEQ ID NO: 203784 - DNA, 3600 bp, Homo sapiens
  Payload ID: 20194
  Gene Name: zinc finger protein 780A
  Uniprot ID: O75290
  ENST ID: ENST00000455521
  CDS Start-End: 149-2077
acttccggtctccggggtcgacgacatagcgggtcgtatttttatccaaaagaaggacctggaggaggatgagagcgttactgctgcacacctaaagtcaagggggagaagcccgaggaagattgaccagttttgtaattctagcaacatggtccatggatcagtgacattcagggatgtggccattgacttctctcaggaggagtgggagtgcctgcagcctgatcagaggaccttgtacagggatgtgatgttggagaactacagccacctgatctcactggcaggaagttccatttctaaaccagatgtaattacgttactagagcaagagaaagagccctggatggttgtaaggaaagaaacaagcagacggtatccagatttggagttaaaatatggacctgagaaagtatctccagaaaatgatacctctgaagtaaatttacccaaacaggttataaagcaaataagtacaactcttggcattgaggccttttattttagaaatgactcagaatatagacaatttgagggactacagggatatcaagaaggaaatatcaatcaaaagatgatcagctatgaaaaactgcctactcatactcctcatgcttctcttatttgcaatacacataaaccgtatgaatgtaaggaatgtgggaaatactttagtcgtagtgcaaatcttattcagcatcagagtattcatactggagagaaaccctttgaatgtaaggagtgtgggaaagcctttcgacttcacatacaatttactcgacatcagaaatttcatactggtgagaaaccttttgaatgtaacgaatgtggaaaggcctttagtcttcttaccctgcttaatcgccataagaacattcacacaggtgagaaactgtttgaatgtaaggaatgtgggaagtcctttaatcgtagctcaaaccttgttcaacatcagagtattcattctggtgtaaaaccatatgaatgtaaggagtgtgggaaaggctttaatcgtggtgcacaccttattcagcatcagaaaattcattccaatgagaaaccctttgtatgtaaggaatgtgggatggcctttcgatatcattaccaacttattgaacattgccaaattcatactggtgagaaaccctttgaatgtaaagaatgtggaaaggcgtttactcttctgacaaagcttgttcgacatcagaagattcatactggtgagaaaccctttgaatgcagggaatgtgggaaggcctttagtcttctcaaccagcttaatcgccataagaacattcacacaggtgaaaaaccgtttgaatgtaaggaatgtgggaagtcctttaatcgtagctcaaaccttgttcaacatcagagtattcatgctggtataaaaccatatgaatgtaaggagtgtgggaaaggctttaatcgtggtgcacaccttattcagcatcagaaaattcattccaatgagaaaccttttgtatgtagggaatgtgagatggcctttagatatcattgccaacttattgaacattctcgaattcatactggtgacaagccatttgaatgtcaagactgtgggaaggccttcaatcgtggctcaagccttgttcaacatcagagtattcacactggtgagaagccctatgaatgtaaggagtgtgggaaggcttttagactttacctacaactttcccaacatcagaaaactcacacaggtgaaaaaccatttgaatgtaaggaatgtgggaaattctttcgtcgtggttcaaatcttaatcaacatcgaagtattcatactggaaagaaaccctttgaatgtaaggaatgtgggaaagcctttcgacttcatatgcaccttattcgacatcagaaattgcatactggtgagaaaccctttgaatgtaaggagtgtgggaaagcctttcgacttcatatgcaacttattcgacatcagaaattgcatactggtgagaaaccctttgaatgtaaggaatgtggaaaggtttttagtcttcccacccagcttaatcgccataagaacattcacacaggtgagaaggcatcttgaatgtaaggaatgtggaaagtcctttaatcgtgtctcaaaccatgttcaacatcagagtattcgtgctggtgtaaaaccatgtgaatgtaaggggtgtgggaaaggcttcatttgtggttcaaacgttattcagcatcagaaaattcattccagtgagaaactctttgtatgcaaggagtggaggacgacctttagatatcattaccacttatttaacattaccaaattcacactggtaaaaaaccctttgaatgtaaagaatgtggaaaggccttcagttttctgacacagcttgctggacttcaggtcattcatactggcgagaagccatttgaatttgagaaatgtgggaaggccttcaatagtggctcaaaccttgttcaacatcagagtattcatactggtgagaaactctatgaatgtaaggagtgtgggaaaactttcagatttagtttggtcctgactgcacatcaaagaattcatactggtatgaaaccctgtgaatgtacagaatgtgggaagacctttagttgtagctcaaacattgttcaacatgttaaaattcatactggtgagaaacgctataatgtaaggaatatgggaaagcatttgctgtggatgatcagctgtctcaacatcagaaaattcagaatagttagaaattttgtgacaataaggagtgtggacaagccttcactgtgtacgaaaaatttactcaacaccagagagctcatattgatgagaaatcttgtgaacataaaagaatgtgtgaagaactttcatcatggcctgggatttgctcaacttctgagtattcatacttctgagaaatctttgagtgtaaggaatgtggggcgttttatagccacactaaataccttagagttcggagaagataattcttgtgagaaagtctttgaatgaggaatatagggtagttgtcatgttcacaatgtactccctatgaaataatttaccagatacaggcatacctcgctgaattgtgcattgcagttattgtgttttatacaaactgaaggtttgtggcaaccctgtggtgagcaagacgatcaggtccattttcccaacgtcaggtgtgcatttcatgtctttatgtcacattttggtaattctcagaatatttcaaactatttcattgttatatatctatcatggtgatcaatgaccagtgatttttgatgttgctattgtaattgctttgggataccacaaattctgcccataaaagatggtaaacctagttgatacttgttgtgggttttgaaagaatagtcaaatatacaatcatataccccaacctagattcaaaattgttaacaatttgcacgtttattttttgtatatttgttgtaccattgagaataagttttagacatcatgacactttaccctttatttaatcaacgtgtgtatcaaccaaacatgaagacaatatagacaatatcatatagccattgtaccataattaccgttaaggaaagtattcataattctgtaatatc

SEQ ID NO: 203785 - DNA, 2396 bp, Homo sapiens
  Payload ID: 20194
  Gene Name: zinc finger protein 780A
  Uniprot ID: O75290
  ENST ID: ENST00000414720
  CDS Start-End: 256-732
acttccggtctccggggtcgacgacatagcgggtcgtatttttatccaaaagaaggacctggaggaggatgagagcgttactgctgcacacctaaagtcaaggaacaggagcattgggaatatgtgattcattgcgactgctggttgtatattaagaaaatgagtgaggggctcaaatgatctaggacagaaattctttctttttaaatcgacagatataattgtatgtatttatcatgtgcaacatgaagttttatggggagaagcccgaggaagattgaccagttttgtaattctagcaacatggtccatggatcagtgacattcagggatgtggccattgacttctctcaggaggagtgggagtgcctgcagcctgatcagaggaccttgtacagggatgtgatgttggagaactacagccacctgatctcactgggaagttccatttctaaaccagatgtaattacgttactagagcaagagaaagagccctggatggttgtaaggaaagaaacaagcagacggtatccagatttggagttaaaatatggacctgagaaagtatctccagaaaatgatacctctgaagtaaatttacccaaacagatttcttcattggcttccaaaccatcttttacagctattcatattcaaaggagaatccattgcagaatctgcattgcatttggttatctctctttagtgtattgtagcctggaaatcctatgaatgtaggcgctcaaattttgttgcaagatttaatagagtgaaaacagagctcccatacaaagggaggggacccaaagagggtagtcgttgccggctcgaatgcctgggtttatatcctgatcattgtccctcccgctgtgctctcaggcaatagatgattggctatttctttacctcctgtttttgcctaattagcattttagcgggctctctttcttacctgatgggtcgggtgtgagctgagttgcaagccccgtgtttaaaggtggatgtggtcaacttcccatctaggcttagggattcttaatcggcctaggaaatcctgctagtcctgtttctcagtaccccctctcaacaggaaaacccaagtgctgttggggaggttggccaacaactgctctaattgcttcctgctgaattggggtgtagtaggggttgtgcagttgagatttcctctggaggggtgccttcgatgtcattaacattggagcatgggctagcaggccggtccaggggtccgcggtagattttagtcatggactgcatctggggctccatttgaagaatgagttgtggctttacagcttcgattctggaaaagacaaacttaacaaggaggttaaagatacagagattgaaatgtatggcctgcagtgcaggggattatttctttggcacacttcacaggccctgactatctgcttgatagttttgaaaaggcctggtccatctcctcattcttaaaaaatgagattgaattttgattagcccaggaaaattgtctatgtgtttagatttctttctttatagtgtcatttagtgttgttctctttgttgcatattctgtacaagggaatttgagtccagaggctctgttaggtcagattaaacattttggggaagaatactttgtaggctatttgtatggcatatttcactgtcagaaaacatttaagtacaggtccttgcattagtgaaactaagtttgatcatttgggtaagctggtaaccgccataagtccattgtaaagatctaatttgtagtgcataaataatctatggagagactttgacctctgaatatttataatcatgtgtattttagctgtggattgaatacaaaatgaaaattgaaatagactattcaaaaatgaatgccattaaggttgtcaacataagtcaacttgtgtgataaggctgacagtatattcagtacaaaattagcaccctctagtttattcagggagccaagattattttgtctggaaccttgtttttgttcagcatttatcatcagcacctatacatcatggctggtatgtgagctgttgataaactttgaaaaaaattaagcctttaaatcaagctataaaacatgataccattgtggcatcatgaattagagagattaacttttttaaagatcaataataatcctttgtgattttattccagtgcatttaaaaatctataaaatgataatttatattgatagctttcttctttttgtgaatatatccttatcagattattatgcttttgatagactacttaattctatttcttaacatttaattgtatctataatcataggtaaagttataattttctaaacatttttcaggttttgttaatgcagtgatcttataaatcttacaaaacga

SEQ ID NO: 203786 - DNA, 546 bp, Homo sapiens
  Payload ID: 20194
  Gene Name: zinc finger protein 780A
  ENST ID: ENST00000595773
  CDS Start-End: 79-546
acttccggtctccggggtcgacgacatagcggggggagaagcccgaggaagattgaccagttttgtaattctagcaacatggtccatggatcagtgacattcagggatgtggccattgacttctctcaggaggagtgggagtgcctgcagcctgatcagaggaccttgtacagggatgtgatgttggagaactacagccacctgatctcactgggaagttccatttctaaaccagatgtaattacgttactagagcaagagaaagagccctggatggttgtaaggaaagaaacaagcagacggtatccagatttggagttaaaatatggacctgagaaagtatctccagaaaatgatacctctgaagtaaatttacccaaacaggttataaagcaaataagtacaactcttggcattgaggccttttattttagaaatgactcagaatatagacaatttgagggactacagggatatcaagaaggaaatatcaatcaaaagatgatcagctatgaaaaactgcctactcatactcctcatgcttct

SEQ ID NO: 203787 - DNA, 665 bp, Homo sapiens
  Payload ID: 20194
  Gene Name: zinc finger protein 780A
  ENST ID: ENST00000599368
  CDS Start-End: 338-665
ggggggcagctacatgttgagaaccacagcgtcctcagagctctgtccccagaaaccagctccaaactggttgtactggttgaatcgattcctcttccttttacttccttcctatttcgtgtgaagtgagggaaattgtggctatggagggagggtgttttcaaacttagtctgcgctccaagaaatgcctggagtctcacgcttgccgtatccttctccagtcgtatttttatccaaaagaaggacctggaggaggatgagagcgttactgctgcacacctaaagtcaagggggagaagcccgaggaagattgaccagttttgtaattctagcaacatggtccatggatcagtgacattcagggatgtggccattgacttctctcaggaggagtgggagtgcctgcagcctgatcagaggaccttgtacagggatgtgatgttggagaactacagccacctgatctcactgggaagttccatttctaaaccagatgtaattacgttactagagcaagagaaagagccctggatggttgtaaggaaagaaacaagcagacggtatccagatttggagttaaaatatggacctgagaaagtatctccagaaaatgatacctctgaagtaaatttacccaaacaggttataaagcaaataagtacaa

SEQ ID NO: 203788 - DNA, 2044 bp, Homo sapiens
  Payload ID: 20194
  Gene Name: zinc finger protein 780A
  Uniprot ID: O75290
  ENST ID: ENST00000594395
  CDS Start-End: 116-2044
tcgtatttttatccaaaagaaggacctggaggaggatgagagcgttactgctgcacacctaaagtcaagggggagaagcccgaggaagattgaccagttttgtaattctagcaacatggtccatggatcagtgacattcagggatgtggccattgacttctctcaggaggagtgggagtgcctgcagcctgatcagaggaccttgtacagggatgtgatgttggagaactacagccacctgatctcactggcaggaagttccatttctaaaccagatgtaattacgttactagagcaagagaaagagccctggatggttgtaaggaaagaaacaagcagacggtatccagatttggagttaaaatatggacctgagaaagtatctccagaaaatgatacctctgaagtaaatttacccaaacaggttataaagcaaataagtacaactcttggcattgaggccttttattttagaaatgactcagaatatagacaatttgagggactacagggatatcaagaaggaaatatcaatcaaaagatgatcagctatgaaaaactgcctactcatactcctcatgcttctcttatttgcaatacacataaaccgtatgaatgtaaggaatgtgggaaatactttagtcgtagtgcaaatcttattcagcatcagagtattcatactggagagaaaccctttgaatgtaaggagtgtgggaaagcctttcgacttcacatacaatttactcgacatcagaaatttcatactggtgagaaaccttttgaatgtaacgaatgtggaaaggcctttagtcttcttaccctgcttaatcgccataagaacattcacacaggtgagaaactgtttgaatgtaaggaatgtgggaagtcctttaatcgtagctcaaaccttgttcaacatcagagtattcattctggtgtaaaaccatatgaatgtaaggagtgtgggaaaggctttaatcgtggtgcacaccttattcagcatcagaaaattcattccaatgagaaaccctttgtatgtaaggaatgtgggatggcctttcgatatcattaccaacttattgaacattgccaaattcatactggtgagaaaccctttgaatgtaaagaatgtggaaaggcgtttactcttctgacaaagcttgttcgacatcagaagattcatactggtgagaaaccctttgaatgcagggaatgtgggaaggcctttagtcttctcaaccagcttaatcgccataagaacattcacacaggtgaaaaaccgtttgaatgtaaggaatgtgggaagtcctttaatcgtagctcaaaccttgttcaacatcagagtattcatgctggtataaaaccatatgaatgtaaggagtgtgggaaaggctttaatcgtggtgcacaccttattcagcatcagaaaattcattccaatgagaaaccttttgtatgtagggaatgtgagatggcctttagatatcattgccaacttattgaacattctcgaattcatactggtgacaagccatttgaatgtcaagactgtgggaaggccttcaatcgtggctcaagccttgttcaacatcagagtattcacactggtgagaagccctatgaatgtaaggagtgtgggaaggcttttagactttacctacaactttcccaacatcagaaaactcacacaggtgaaaaaccatttgaatgtaaggaatgtgggaaattctttcgtcgtggttcaaatcttaatcaacatcgaagtattcatactggaaagaaaccctttgaatgtaaggaatgtgggaaagcctttcgacttcatatgcaccttattcgacatcagaaattgcatactggtgagaaaccctttgaatgtaaggagtgtgggaaagcctttcgacttcatatgcaacttattcgacatcagaaattgcatactggtgagaaaccctttgaatgtaaggaatgtggaaaggtttttagtcttcccacccagcttaatcgccataagaacattcacacaggtgagaaggcatcttga

SEQ ID NO: 203789 - DNA, 498 bp, Homo sapiens
  Payload ID: 20194
  Gene Name: zinc finger protein 780A
  ENST ID: ENST00000599972
  CDS Start-End: 227-498
ctctgcggattggggctccagcctgactgacccgacagtgcgggtggcctagggggaggcgctcagagtaggaacccgggggtgcagacgggatctgccggatccccaggctcgtatttttatccaaaagaaggacctggaggaggatgagagcgttactgctgcacacctaaagtcaagggggagaagcccgaggaagattgaccagttttgtaattctagcaacatggtccatggatcagtgacattcagggatgtggccattgacttctctcaggaggagtgggagtgcctgcagcctgatcagaggaccttgtacagggatgtgatgttggagaactacagccacctgatctcactgggaagttccatttctaaaccagatgtaattacgttactagagcaagagaaagagccctggatggttgtaaggaaagaaacaagcagacggtatccagatttggagttaaaatatggacctgagaaagtatctccaga

SEQ ID NO: 203790 - DNA, 446 bp, Homo sapiens
  Payload ID: 20194
  Gene Name: zinc finger protein 780A
  ENST ID: ENST00000601715
  CDS Start-End: 116-446
tcgtatttttatccaaaagaaggacctggaggaggatgagagcgttactgctgcacacctaaagtcaagggggagaagcccgaggaagattgaccagttttgtaattctagcaacatggtccatggatcagtgacattcagggatgtggccattgacttctctcaggaggagtgggagtgcctgcagcctgatcagaggaccttgtacagggatgtgatgttggagaactacagccacctgatctcactggcaggaagttccatttctaaaccagatgtaattacgttactagagcaagagaaagagccctggatggttgtaaggaaagaaacaagcagacggtatccagatttggagttaaaatatggacctgagaaagtatctccagaaaatgatacctctgaagtaaatttacccaaacaggttataaagcaaataagtacaa

SEQ ID NO: 203791 - DNA, 3472 bp, Homo sapiens
  Payload ID: 20194
  Gene Name: zinc finger protein 780A
  Uniprot ID: O75290
  ENST ID: ENST00000595687
  CDS Start-End: 211-2136
gaggaagagatctgtggctgcgggagatctctgcggattggggctccagcctgactgacccgacagtgcgggtggcctagggggaggcgctcagatcgtatttttatccaaaagaaggacctggaggaggatgagagcgttactgctgcacacctaaagtcaagggggagaagcccgaggaagattgaccagttttgtaattctagcaacatggtccatggatcagtgacattcagggatgtggccattgacttctctcaggaggagtgggagtgcctgcagcctgatcagaggaccttgtacagggatgtgatgttggagaactacagccacctgatctcactgggaagttccatttctaaaccagatgtaattacgttactagagcaagagaaagagccctggatggttgtaaggaaagaaacaagcagacggtatccagatttggagttaaaatatggacctgagaaagtatctccagaaaatgatacctctgaagtaaatttacccaaacaggttataaagcaaataagtacaactcttggcattgaggccttttattttagaaatgactcagaatatagacaatttgagggactacagggatatcaagaaggaaatatcaatcaaaagatgatcagctatgaaaaactgcctactcatactcctcatgcttctcttatttgcaatacacataaaccgtatgaatgtaaggaatgtgggaaatactttagtcgtagtgcaaatcttattcagcatcagagtattcatactggagagaaaccctttgaatgtaaggagtgtgggaaagcctttcgacttcacatacaatttactcgacatcagaaatttcatactggtgagaaaccttttgaatgtaacgaatgtggaaaggcctttagtcttcttaccctgcttaatcgccataagaacattcacacaggtgagaaactgtttgaatgtaaggaatgtgggaagtcctttaatcgtagctcaaaccttgttcaacatcagagtattcattctggtgtaaaaccatatgaatgtaaggagtgtgggaaaggctttaatcgtggtgcacaccttattcagcatcagaaaattcattccaatgagaaaccctttgtatgtaaggaatgtgggatggcctttcgatatcattaccaacttattgaacattgccaaattcatactggtgagaaaccctttgaatgtaaagaatgtggaaaggcgtttactcttctgacaaagcttgttcgacatcagaagattcatactggtgagaaaccctttgaatgcagggaatgtgggaaggcctttagtcttctcaaccagcttaatcgccataagaacattcacacaggtgaaaaaccgtttgaatgtaaggaatgtgggaagtcctttaatcgtagctcaaaccttgttcaacatcagagtattcatgctggtataaaaccatatgaatgtaaggagtgtgggaaaggctttaatcgtggtgcacaccttattcagcatcagaaaattcattccaatgagaaaccttttgtatgtagggaatgtgagatggcctttagatatcattgccaacttattgaacattctcgaattcatactggtgacaagccatttgaatgtcaagactgtgggaaggccttcaatcgtggctcaagccttgttcaacatcagagtattcacactggtgagaagccctatgaatgtaaggagtgtgggaaggcttttagactttacctacaactttcccaacatcagaaaactcacacaggtgaaaaaccatttgaatgtaaggaatgtgggaaattctttcgtcgtggttcaaatcttaatcaacatcgaagtattcatactggaaagaaaccctttgaatgtaaggaatgtgggaaagcctttcgacttcatatgcaccttattcgacatcagaaattgcatactggtgagaaaccctttgaatgtaaggagtgtgggaaagcctttcgacttcatatgcaacttattcgacatcagaaattgcatactggtgagaaaccctttgaatgtaaggaatgtggaaaggtttttagtcttcccacccagcttaatcgccataagaacattcacacaggtgagaaggcatcttgaatgtaaggaatgtggaaagtcctttaatcgtgtctcaaaccatgttcaacatcagagtattcgtgctggtgtaaaaccatgtgaatgtaaggggtgtgggaaaggcttcatttgtggttcaaacgttattcagcatcagaaaattcattccagtgagaaactctttgtatgcaaggagtggaggacgacctttagatatcattaccacttatttaacattaccaaattcacactggtaaaaaaccctttgaatgtaaagaatgtggaaaggccttcagttttctgacacagcttgctggacttcaggtcattcatactggcgagaagccatttgaatttgagaaatgtgggaaggccttcaatagtggctcaaaccttgttcaacatcagagtattcatactggtgagaaactctatgaatgtaaggagtgtgggaaaactttcagatttagtttggtcctgactgcacatcaaagaattcatactggtatgaaaccctgtgaatgtacagaatgtgggaagacctttagttgtagctcaaacattgttcaacatgttaaaattcatactggtgagaaacgctataatgtaaggaatatgggaaagcatttgctgtggatgatcagctgtctcaacatcagaaaattcagaatagttagaaattttgtgacaataaggagtgtggacaagccttcactgtgtacgaaaaatttactcaacaccagagagctcatattgatgagaaatcttgtgaacataaaagaatgtgtgaagaactttcatcatggcctgggatttgctcaacttctgagtattcatacttctgagaaatctttgagtgtaaggaatgtggggcgttttatagccacactaaataccttagagttcggagaagataattcttgtgagaaagtctttgaatgaggaatatagggtagttgtcatgttcacaatgtactccctatgaaataatttaccagatacaggcatacctcgctgaattgtgcattgcagttattgtgttttatacaaactgaaggtttgtggcaaccctgtggtgagcaagacgatcaggtccattttcccaacgtcaggtgtgcatttcatgtctttatgtcacattttggtaattctcagaatatttcaaactatttcattgttatatatctatcatggtgatcaatgaccagtgatttttgatgttgctattgtaattgctttgggataccacaaattctgcccataaaagatggtaaacctagttgatacttgttgtgggttttgaaagaatagtcaaatatacaatcatataccccaacctagattcaaaattgtt

SEQ ID NO: 203792 - DNA, 467 bp, Homo sapiens
  Payload ID: 20194
  Gene Name: zinc finger protein 780A
  ENST ID: ENST00000601688
  CDS Start-End: 149-467
acttccggtctccggggtcgacgacatagcgggtcgtatttttatccaaaagaaggacctggaggaggatgagagcgttactgctgcacacctaaagtcaagggggagaagcccgaggaagattgaccagttttgtaattctagcaacatggtccatggatcagtgacattcagggatgtggccattgacttctctcaggaggagtgggagtgcctgcagcctgatcagaggaccttgtacagggatgtgatgttggagaactacagccacctgatctcactgggaagttccatttctaaaccagatgtaattacgttactagagcaagagaaagagccctggatggttgtaaggaaagaaacaagcagacggtatccagatttggagttaaaatatggacctgagaaagtatctccagaaaatgatacctctgaagtaaatttacccaaacaggttataaagcaaa

SEQ ID NO: 203793 - DNA, 498 bp, Homo sapiens; identical to SEQ ID NO: 203789
  Payload ID: 20194
  Gene Name: Zinc finger protein 780A
  ENST ID: ENST00000627069
  CDS Start-End: 227-498

SEQ ID NO: 203794 - DNA, 665 bp, Homo sapiens; identical to SEQ ID NO: 203787
  Payload ID: 20194
  Gene Name: Zinc finger protein 780A
  ENST ID: ENST00000628727
  CDS Start-End: 338-665

SEQ ID NO: 203795 - DNA, 3600 bp, Homo sapiens; identical to SEQ ID NO: 203784
  Payload ID: 20194
  Gene Name: Zinc finger protein 780A
  ENST ID: ENST00000630528
  CDS Start-End: 149-2077

SEQ ID NO: 203796 - DNA, 2396 bp, Homo sapiens; identical to SEQ ID NO: 203785
  Payload ID: 20194
  Gene Name: Zinc finger protein 780A
  ENST ID: ENST00000630440
  CDS Start-End: 256-732

SEQ ID NO: 203797 - DNA, 467 bp, Homo sapiens; identical to SEQ ID NO: 203792
  Payload ID: 20194
  Gene Name: Zinc finger protein 780A
  ENST ID: ENST00000626417
  CDS Start-End: 149-467

SEQ ID NO: 203798 - DNA, 7500 bp, Homo sapiens; identical to SEQ ID NO: 203783
  Payload ID: 20194
  Gene Name: Zinc finger protein 780A
  ENST ID: ENST00000629480
  CDS Start-End: 313-2136

SEQ ID NO: 203799 - DNA, 446 bp, Homo sapiens; identical to SEQ ID NO: 203790
  Payload ID: 20194
  Gene Name: Zinc finger protein 780A
  ENST ID: ENST00000630978
  CDS Start-End: 116-446

SEQ ID NO: 203800 - DNA, 3472 bp, Homo sapiens; identical to SEQ ID NO: 203791
  Payload ID: 20194
  Gene Name: Zinc finger protein 780A
  ENST ID: ENST00000626829
  CDS Start-End: 211-2136

SEQ ID NO: 203801 - DNA, 2044 bp, Homo sapiens; identical to SEQ ID NO: 203788
  Payload ID: 20194
  Gene Name: Zinc finger protein 780A
  ENST ID: ENST00000626168
  CDS Start-End: 116-2044

SEQ ID NO: 203802 - DNA, 546 bp, Homo sapiens; identical to SEQ ID NO: 203786
  Payload ID: 20194
  Gene Name: Zinc finger protein 780A
  ENST ID: ENST00000625733
  CDS Start-End: 79-546

SEQ ID NO: 203803 - DNA, 3674 bp, Homo sapiens; identical to SEQ ID NO: 203782
  Payload ID: 20194
  Gene Name: Zinc finger protein 780A
  ENST ID: ENST00000628273
  CDS Start-End: 226-2151

SEQ ID NO: 203804 - DNA, 3538 bp, Homo sapiens
  Payload ID: 20195
  Gene Name: zinc finger protein 780B
  ENST ID: ENST00000221355
  CDS Start-End: 703-2760
gttgacgacctagctgggtaaggtcttcacgtcctaggaagaaatcggtggctgcgggaggtcttcgtggactgggactcgaacctgaccgacccggcagtgcgggggagaagcccgaggaagattgaccaattttgtaattctagaaacatggtccatggagtgcatctcgttatgttgcccaggctgtttgccaactcctgggctcaagcagtccttccaccttggtctcccaaagtgctggtataacaggcatgagccaccacaccaggccagcagcaggattcttgaagaatgtggatcagtgacattcagggatgtggccattgacttctctcaggaggagtgggagtgcctgcagcctgatcagaggaccttgtacagggatgtgatgttggagaactacagccacctgatatcactgggaagttccatttctaagccagatgtgattacattactagagcaagagaaagagccctggattgttatttggagtcaaaatatggacctgagaaaatatctccagaaaatgatatttttgaaataaatttacccaaacatgttataaagcaaataagtaaaacacttggcctcgaggccttttattttagaaatgactcagaatatagaagtagatttgagggacgacagggacatcaagaaggatatatcaaccagaagatcatcagctatgaagaaatgcctgcttatactcatgcttctcctattcataatacacataaaccatatgaatgtaaggaatgtgggaaatactttagttgtggttcaaatcttattcagcatcagagtattcatactggagagaaaccctataaatgcaaagaatgtgggaaagcctttcaacttcacatacaacttactcgacatcagaaatttcatactggtgagaaaacttttgaatgtaaggaatgtggaaaagcctttaatcttcccacccagcttaatcgccataagaacattcacacagttaagaaactgtttgaatgtaaggaatgtgggaagtcttttaatcgtagctcaaaccttactcagcatcaaagtattcatgctggtgtaaaaccatatcaatgtaaggagtgtgggaaagcctttaatcgtggttcaaatcttattcagcatcaaaaaattcattccaatgagaaaccctttgtatgtagggaatgtgagatggcctttcgatatcattaccaactcattgaacattgccgaattcatactggcgagaaaccctttgaatgtaaagaatgcagaaaggcctttactcttctgacaaagcttgttcgacatcagaagattcatatgggtgagaagccctttgaatgcagggaatgcgggaaggcctttagtctcctcaatcagcttaatcgccataagaatattcacacaggtgaaaaaccatttgaatgtaaagaatgtgggaagtcctttaatcgtagttcaaaccttattcaacaccagagtattcatgctgatgtaaaaccatatgaatgtaaggagtgtgggaaaggctttaatcgtggtgcaaatcttattcagcatcaaaaaattcattccaatgagaaaccctttgtatgtagggaatgtgagatggcctttcgatatcattaccaacttattcaacattgccaaattcatactggtgggaaaccctttgaatgtaaagaatgtggaaaggcctttagtcttctgacacagcttgctcgacataagaacattcatactggtgagaaaccatttgaatgtaaagactgtgggaaggccttcaatcgtggctcgaaccttgttcaacatcagagtattcacactggtgagaagccctatgaatgtaaggagtgtgggaaggcttttagacttcacctacaactttctcaacatgagaaaactcatacaggtgagaaaccctttgaatgtaaggaatgtgggaaattctttcgtcgtggttcaaatcttaatcaacatcgaagtattcataccggaaagaaaccctttgaatgtaaggaatgtgggaaagcctttcgacttcatatgcaccttattcgacatcagaaatttcatactggtgagaagccctttgaatgtaaggaatgtggcaaggccttcagtcttcacacccagcttaatcaccataagaacattcacacaggtgagaagccatttaaatgtaaagaatgtgggaagtcctttaatcgtgtctcaaaccttgttcaacatcagagtattcatgctggtgtaaaaccatatgaatgtaaggagtgtgggaaaggctttagtcgtgtttcaaaccttattcagcatcagaaaactcattccagtgcgaaaccctttgtatgtaaggagtgtaggaagacctttagatatcattaccagcttactgaacattaccgaattcatactggtgagaaaccctttgaatgtaaagaatgcggaaaggcctttggtcttctgacacagcttgctcaacatcagatcattcatactggtgagaagccatttaaatgtaaggagtgtgggaaggcctttaatcgtggctcaaaccttgttcaacctcagagtattcatactggtgagaaaccctatgaatgtaaggagtgtgggaaggcttttagacttcacctacaactttctctgcatcaaaaacttgtacaggtgagaaaccctttgaatgtaagaaatgtgggacagccttcagacatcagtagcaacttactgaacatcagaaaattcatacttgggtgaaaacctttgaatgtaaggaatgtgggaaggcctttcaatatcattaccaatttcatggacattatagatttcatattcgtgagaacccttatgaatgtcaaggatgtgggaaatgctttaccagtggtagaaaccttagagtacatcagagaattcatactggtgagaaaccatatcaatgtgaagaatgtgggaaagcctttagtcatagttcaaacctgttaaacatgttaaaattcatactgatgagaaaccctatgaatgtaaggaatgtgaaaaggcctttagcagtaattatgatcttactgtacatctgagaatccgtactgctgagaaaccctgtgagtgtaaagaatgtggaaaacttttggatttagcttagtctttactgcacatcaaagaattcatactggtatgaaccgtatgaatgtaaagaatgtggaaagacctttacttgtagctcgagccttgttcaacatgttaaaattcatactggtgagcaaccctgtgaatgtaaaggatgtgggaagacctttagacttagttcagtcctttctgcacatcacagaattcatactggcatgaaaccctatgaatgtaaagaatgtgagcaaacccttactgtgaatgatctgcttacgcaacatcagaaaattcattatagttagaagttttatgaatataaggagtgtagacaagccttcactgtgtatgaaaaatttactcaacaccagagaattcatattgatgagaaatcctgtgaacataaaagaatgtg

SEQ ID NO: 203805 - DNA, 8665 bp, Homo sapiens
  Payload ID: 20195
  Gene Name: zinc finger protein 780B
  Uniprot ID: Q9Y6R6
  ENST ID: ENST00000434248
  CDS Start-End: 67-2568
tggggttgacgacctagctgggggagaagcccgaggaagattgaccaattttgtaattctagaaacatggtccatggatcagtgacattcagggatgtggccattgacttctctcaggaggagtgggagtgcctgcagcctgatcagaggaccttgtacagggatgtgatgttggagaactacagccacctgatatcactgggaagttccatttctaagccagatgtgattacattactagagcaagagaaagagccctggattgttgtaagtaaagaaacaagcagatggtatccagatttggagtcaaaatatggacctgagaaaatatctccagaaaatgatatttttgaaataaatttacccaaacatgttataaagcaaataagtaaaacacttggcctcgaggccttttattttagaaatgactcagaatatagaagtagatttgagggacgacagggacatcaagaaggatatatcaaccagaagatcatcagctatgaagaaatgcctgcttatactcatgcttctcctattcataatacacataaaccatatgaatgtaaggaatgtgggaaatactttagttgtggttcaaatcttattcagcatcagagtattcatactggagagaaaccctataaatgcaaagaatgtgggaaagcctttcaacttcacatacaacttactcgacatcagaaatttcatactggtgagaaaacttttgaatgtaaggaatgtggaaaagcctttaatcttcccacccagcttaatcgccataagaacattcacacagttaagaaactgtttgaatgtaaggaatgtgggaagtcttttaatcgtagctcaaaccttactcagcatcaaagtattcatgctggtgtaaaaccatatcaatgtaaggagtgtgggaaagcctttaatcgtggttcaaatcttattcagcatcaaaaaattcattccaatgagaaaccctttgtatgtagggaatgtgagatggcctttcgatatcattaccaactcattgaacattgccgaattcatactggcgagaaaccctttgaatgtaaagaatgcagaaaggcctttactcttctgacaaagcttgttcgacatcagaagattcatatgggtgagaagccctttgaatgcagggaatgcgggaaggcctttagtctcctcaatcagcttaatcgccataagaatattcacacaggtgaaaaaccatttgaatgtaaagaatgtgggaagtcctttaatcgtagttcaaaccttattcaacaccagagtattcatgctgatgtaaaaccatatgaatgtaaggagtgtgggaaaggctttaatcgtggtgcaaatcttattcagcatcaaaaaattcattccaatgagaaaccctttgtatgtagggaatgtgagatggcctttcgatatcattaccaacttattcaacattgccaaattcatactggtgggaaaccctttgaatgtaaagaatgtggaaaggcctttagtcttctgacacagcttgctcgacataagaacattcatactggtgagaaaccatttgaatgtaaagactgtgggaaggccttcaatcgtggctcgaaccttgttcaacatcagagtattcacactggtgagaagccctatgaatgtaaggagtgtgggaaggcttttagacttcacctacaactttctcaacatgagaaaactcatacaggtgagaaaccctttgaatgtaaggaatgtgggaaattctttcgtcgtggttcaaatcttaatcaacatcgaagtattcataccggaaagaaaccctttgaatgtaaggaatgtgggaaagcctttcgacttcatatgcaccttattcgacatcagaaatttcatactggtgagaagccctttgaatgtaaggaatgtggcaaggccttcagtcttcacacccagcttaatcaccataagaacattcacacaggtgagaagccatttaaatgtaaagaatgtgggaagtcctttaatcgtgtctcaaaccttgttcaacatcagagtattcatgctggtgtaaaaccatatgaatgtaaggagtgtgggaaaggctttagtcgtgtttcaaaccttattcagcatcagaaaactcattccagtgcgaaaccctttgtatgtaaggagtgtaggaagacctttagatatcattaccagcttactgaacattaccgaattcatactggtgagaaaccctttgaatgtaaagaatgcggaaaggcctttggtcttctgacacagcttgctcaacatcagatcattcatactggtgagaagccatttaaatgtaaggagtgtgggaaggcctttaatcgtggctcaaaccttgttcaacctcagagtattcatactggtgagaaaccctatgaatgtaaggagtgtgggaaggcttttagacttcacctacaactttctctgcatcaaaaacttgtacaggtgagaaaccctttgaatgtaagaaatgtgggacagccttcagacatcagtagcaacttactgaacatcagaaaattcatacttgggtgaaaacctttgaatgtaaggaatgtgggaaggcctttcaatatcattaccaatttcatggacattatagatttcatattcgtgagaacccttatgaatgtcaaggatgtgggaaatgctttaccagtggtagaaaccttagagtacatcagagaattcatactggtgagaaaccatatcaatgtgaagaatgtgggaaagcctttagtcatagttcaaacctgttaaacatgttaaaattcatactgatgagaaaccctatgaatgtaaggaatgtgaaaaggcctttagcagtaattatgatcttactgtacatctgagaatccgtactgctgagaaaccctgtgagtgtaaagaatgtggaaaacttttggatttagcttagtctttactgcacatcaaagaattcatactggtatgaaccgtatgaatgtaaagaatgtggaaagacctttacttgtagctcgagccttgttcaacatgttaaaattcatactggtgagcaaccctgtgaatgtaaaggatgtgggaagacctttagacttagttcagtcctttctgcacatcacagaattcatactggcatgaaaccctatgaatgtaaagaatgtgagcaaacccttactgtgaatgatctgcttacgcaacatcagaaaattcattatagttagaagttttatgaatataaggagtgtagacaagccttcactgtgtatgaaaaatttactcaacaccagagaattcatattgatgagaaatcctgtgaacataaaagaatgtgtgaagaactttcatcgtggcctgggatttgctcaacatcagagtattcatactgctgagaactcctttgagtgtaaagaatgtgggatattttatagccacactaaatgccttagagttcagagaagataattttggtgagaaagttactgatgtgaggaatgtagagtagctgccatgttcacagtttactgcccgtgaaatattttactggatacaggcgtaccttgcttaattgtgcattgcagttactgcattttatacacactgaaggtttgcagcaaccttgcagtgaataagtctatcagcaccattttccaaacagcatatgcacatttcatgtctttgtgtcacactttgctagttttcataatatttcaaactttttcattgttaaatctgttatggtgatctgtgaccagtgttttttgattactagtgtaattgttactagtgtaattgtttggggataccacaaatcctgcccataaaagatggtgaacctagttgataattgttgtgggttttgaaagaatagtaaaatatatacacatatcccccccacctagattcaaaattgttaacaatttgccacatttattttttgtatatttgttgtaccattgagaataagttttagaccattgagaataagttttagatatcatgacactttactccttgttacatcagcatgtgtgttacccaaacataaagacaatatcatataaccatagtaccataattacccttaaggaaaatattcataattctgtaatatcattccatcttcagatttcttccttggcctgcaaaccatcttttacagctattcattttctctttttttttttttttttttgagatggagtctcgctctgtcgcccagactggagtgcagtggtgcgatctgggctcactgcaagctctgcctcctgggttcacgccattctcccgcctcagcctcctgagtagctgggactagaggcacccgccaccatgcccagctaattttttgtatttttagtagagacagggtttcactctgttagccaggatggtctcgatctcctgacctcgtgatccacccgccttggcctcccaaagtgctgggattacaggcatgagccagcatgcctggcctacagctattcattttctaaggagagtccattgcagattctgcattgcatttggttatctctctttagtgtattgtagcatggaaaccccatgaaagtatgctctcaaattatggtgggtatcagaatcccctgtggaacttagtaaacctacagaagtgtagccctagtttataagcctgggcctctgttttttattatttctccaggttttgtgtctgtgataccaaccagagttagagagccactggtctagaacatttctcattttaaaaaaatgacattgaattttgagtagcccagaaatgttgttggctatgtgtttagatttctttctttatagtgtcatttagccttgttcttggttgtattttctttacaagggaaagtaagtccagaggctttcttaggtctagattaaacgttttggggaagaatactttgtaggttatttctatgtcatattgtactgtcagaaaacatttaagtacaggtccttgcattagtgaaactaaggatgatcatttgggtaagctggtaaccgccgtaagtccattgtaaagatttagtttgtagtgggtaagtaatctatggagagacgttgtcatctctgaaaagttatagtcacgtgtacttaagccctggattgaatacaaaatgaaaattgaaatagactattgagaaatgaatgccattaaagcgtcaacataattcaacttgtgtgatatggctgacactgtactcagtacaaaactggcaccctttggattgtatagggagccaagattgtccggaacctcttttttgttcagcatttatcaccagcacctataccatggctggtacatgagctgttgataaaaatttgaaaaaatattaaccctttaaatcaagctgtaaaacatgataccattaagccgggagcagtggcctcatgcctgtaatcccagcactttgggaggccaaggtgggcagatcacctgaggtcaggagtttgagaccaacttggccaacatggcaaaactccatctctcctaaaaataaaaaaattagctggacatggtggtgcattcctgtaatcccagctacttgggaggctgaggcaggagaatcactcgaaattggaaggtggaggtggcagtgagccaagatcgtgccactgcactccagcctgggcgacaaagtgagacttcatctcaaaaaaaccccaaaacaaaacatgataccgatgtggcatcatgaattagattaaattttttttaagattaagaataatcctttgtgattttattccattgtgttgaaaaatctataaagtgataatttatattgatagctttcttctttttatgaatataccctggtcagatgattattctttcaatagactacttaattctatcttttaccatttaattgcatctataatcataagtaaagttataattttccaagtatttttcaggtattgatattgcaatgatgttatacaacttataaaacaagattatataaaacttggctttcaaatcttatgttcctattttttatttccagtttcatcttttttctatccattctcttgaactttcttctttgaaatcagcagagtccctgggtattaacctagcacaactcctttctgggtcattgcacatcccggtagtatcattaagagttgtcagaaagatccctggcagcctttcggtgaaactctatcatcatgcaatcatggcagtactatgttggaagtcagagtccctttgcaaacataataaaacactttaatatatttgttaaagttacaaaccaagtatgtacaaatttaaaaatcacggccaggcacggtggctcacgcctgtaatccccaacttaaaatggtttgacttataattttcagctttataatagtacaaaagtgatatgctgctatagtttggatatttatcccctccaaatctcatattgaagtttgatcccaatgttggaggtggggcctaatgggaggtgtgtgggtcatgggagaagatccctcatgaataaattaatgtcctctctggattggggggtgaattatcactctgttagttcctatgagagctggttgtacaaaagagcctggcacctccttcctcaccctcttgcttcctctcttgccatgtgatgtctgcatacactgccccctttcatctgccatgagtggaagcagcctgaggcccttaccagaagcagatgttgcaccatgattcttgtaaatcctacagaacactgagccaaataaacctctttctttattaataacccaacctcagacattcctttatagcaacacaaaactaagacatactcagtcagagtatgctccttgacttaaaatggggctatatctagataaacccattgttaaattgaaaatattgtagaccataaatgcacatatggtgtatgatgttttcaatttatgatgggtttatttggacataactccccgtaagttgagaagcacctgtagtaattattattatttatgctcaaattgacataatgtggccagtaggaatccatttacattttttttttactacttatttttttcttttgatgttttaaaggaatattgttttcaggccgtaagaggatgtttaagactgaccctgtttgttggttcatgtcccccatgcctcttgtcctgagtcatggaatcaactcatgatttaataccctcttatcttagggagtcctggttccttttagaggaaaaaagaattagagaccaaaaaatctggctgctgtgagtgcacatggcagttacaggtatggaaaaaaagatgctgcttttgttagaattcttttaatagtttcagagttgaaaatgtcatcctaaggtcagaagttccctctgaattttctcaacttacatttctatgatctgctcttgtttgcatttggtattttattgaattatgttttatgtatggtgatagctgagaagtttatctccttttaaggcctggctgaaatgatacattaatctgcctcccatttttggagatattgctctgatttaaatttgtcatggtgtttctgagcagcgttgtaaagaaacttgttttagaatattcagtcatggatgttatcttgaatgttcatagactccccagaaaagaagaaaaagtagacacaagatttctgtcatccttttacagggtattgtgatcatccagcttggggtatgagggataacggacctgtgtgtcttaatttccagaataccattccatttcaatgagtcttctgcacaagttgtggtctcagggattcactgtcttcatttgtaattgatcaaaatgaaaccatctccaggattcctcagtgggtcaggatctgttatttattaggcccgcatatccattctaccctgctttcatgattatagaaccagtaatttttattgatagttggctgtgactatctagaataaggactgcagttatttctccaaggtgttgtcatgtgacataacttatggcaagtaggatgtaagtgaatattttggcaattctggaaacctcttaaaacaaactagcttaatatattaatatttgagaaatctgggtgaagggtaaccagaattatttactattcttccaagttctgtataagtctgagtgctcattccattctgatgccagaatggtaaaattcatgattggtttagagcaaggccacagtatcaggcttacatccatattatatgacagagaaattaacttttattatattttatccactttaatttggggcagttttactattttactcacaaccaaatttaatcttaaacgctacaactagattgtcacatgtaaaaagtaataaccatcattatatcttttatgttctgtaattccaaagcacggatctgtagagaacagagtgtctatcccatgcatgttgtcatgtacttatcccacaccctattgaaatcacagtacccataagggagacattttttttcttcaagaatatgtatttctgccacatctatgattctccagaatgagatgacagaaaatgctaaactattgttaaatgactatatgtagttccacttctggatggtagatgggggggctctgcaaactcattttctaataaaactggcaaaaaaaaatgta

SEQ ID NO: 203806 - DNA, 509 bp, Homo sapiens
  Payload ID: 20195
  Gene Name: zinc finger protein 780B
  ENST ID: ENST00000593605
  CDS Start-End: 282-509
gtcctaggaagaaatcggtggctgcgggaggtcttcgtggactgggactcgaacctgaccgacccggcagtgcggtgagggaagttgtggccatggagggtgctttcaaacttagtctgcgctccaagaaaagcctggagtctcacgcttgccgtatccttctccagtcgtattattatccaaaagaaggaccgagaggaggatgagagcgttattgttgcacacttaagtcaagggggagaagcccgaggaagattgaccaattttgtaattctagaaacatggtccatggatcagtgacattcagggatgtggccattgacttctctcaggaggagtgggagtgcctgcagcctgatcagaggaccttgtacagggatgtgatgttggagaactacagccacctgatatcactgggaagttccatttctaagccagatgtgattacattactagagcaagagaaagagccctggattgttgtaagtaaagaaacaagcagatggtat

SEQ ID NO: 203807 - DNA, 401 bp, Homo sapiens
  Payload ID: 20195
  Gene Name: zinc finger protein 780B
  ENST ID: ENST00000598845
  CDS Start-End: 102-365
ggctgcgggaggtcttcgtggactgggactcgaacctgaccgacccggcagtgcgggggagaagcccgaggaagattgaccaattttgtaattctagaaacatggtccatggatcagtgacattcagggatgtggccattgacttctctcaggaggagtgggagtgcctgcagcctgatcagaggaccttgtacagggatgtgatgttggagaactacagccacctgatatcactggcaggaagttccatttctaagccagatgtgattacattactagagcaagagaaagagccctggattgttatttggagtcaaaatatggacctgagaaaatatctccagaaaatgatatttttgaaataaatttacccaaacatgttataaagcaaataagtaaaa

SEQ ID NO: 203808 - DNA, 393 bp, Homo sapiens
  Payload ID: 20195
  Gene Name: zinc finger protein 780B
  ENST ID: ENST00000595995
  CDS Start-End: 66-393
ggggttgacgacctagctgggggagaagcccgaggaagattgaccaattttgtaattctagaaacatggtccatggatcagtgacattcagggatgtggccattgacttctctcaggaggagtgggagtgcctgcagcctgatcagaggaccttgtacagggatgtgatgttggagaactacagccacctgatatcactgggaagttccatttctaagccagatgtgattacattactagagcaagagaaagagccctggattgttgtaagtaaagaaacaagcagatggtatccagatttggagtcaaaatatggacctgagaaaatatctccagaaaatgatatttttgaaataaatttacccaaacatgttataaagcaaataagtaaaa

SEQ ID NO: 203809 - DNA, 8664 bp, Homo sapiens
  Payload ID: 20195
  Gene Name: zinc finger protein 780B
  Uniprot ID: Q9Y6R6
  ENST ID: ENST00000617676
  CDS Start-End: 66-2567
ggggttgacgacctagctgggggagaagcccgaggaagattgaccaattttgtaattctagaaacatggtccatggatcagtgacattcagggatgtggccattgacttctctcaggaggagtgggagtgcctgcagcctgatcagaggaccttgtacagggatgtgatgttggagaactacagccacctgatatcactgggaagttccatttctaagccagatgtgattacattactagagcaagagaaagagccctggattgttgtaagtaaagaaacaagcagatggtatccagatttggagtcaaaatatggacctgagaaaatatctccagaaaatgatatttttgaaataaatttacccaaacatgttataaagcaaataagtaaaacacttggcctcgaggccttttattttagaaatgactcagaatatagaagtagatttgagggacgacagggacatcaagaaggatatatcaaccagaagatcatcagctatgaagaaatgcctgcttatactcatgcttctcctattcataatacacataaaccatatgaatgtaaggaatgtgggaaatactttagttgtggttcaaatcttattcagcatcagagtattcatactggagagaaaccctataaatgcaaagaatgtgggaaagcctttcaacttcacatacaacttactcgacatcagaaatttcatactggtgagaaaacttttgaatgtaaggaatgtggaaaagcctttaatcttcccacccagcttaatcgccataagaacattcacacagttaagaaactgtttgaatgtaaggaatgtgggaagtcttttaatcgtagctcaaaccttactcagcatcaaagtattcatgctggtgtaaaaccatatcaatgtaaggagtgtgggaaagcctttaatcgtggttcaaatcttattcagcatcaaaaaattcattccaatgagaaaccctttgtatgtagggaatgtgagatggcctttcgatatcattaccaactcattgaacattgccgaattcatactggcgagaaaccctttgaatgtaaagaatgcagaaaggcctttactcttctgacaaagcttgttcgacatcagaagattcatatgggtgagaagccctttgaatgcagggaatgcgggaaggcctttagtctcctcaatcagcttaatcgccataagaatattcacacaggtgaaaaaccatttgaatgtaaagaatgtgggaagtcctttaatcgtagttcaaaccttattcaacaccagagtattcatgctgatgtaaaaccatatgaatgtaaggagtgtgggaaaggctttaatcgtggtgcaaatcttattcagcatcaaaaaattcattccaatgagaaaccctttgtatgtagggaatgtgagatggcctttcgatatcattaccaacttattcaacattgccaaattcatactggtgggaaaccctttgaatgtaaagaatgtggaaaggcctttagtcttctgacacagcttgctcgacataagaacattcatactggtgagaaaccatttgaatgtaaagactgtgggaaggccttcaatcgtggctcgaaccttgttcaacatcagagtattcacactggtgagaagccctatgaatgtaaggagtgtgggaaggcttttagacttcacctacaactttctcaacatgagaaaactcatacaggtgagaaaccctttgaatgtaaggaatgtgggaaattctttcgtcgtggttcaaatcttaatcaacatcgaagtattcataccggaaagaaaccctttgaatgtaaggaatgtgggaaagcctttcgacttcatatgcaccttattcgacatcagaaatttcatactggtgagaagccctttgaatgtaaggaatgtggcaaggccttcagtcttcacacccagcttaatcaccataagaacattcacacaggtgagaagccatttaaatgtaaagaatgtgggaagtcctttaatcgtgtctcaaaccttgttcaacatcagagtattcatgctggtgtaaaaccatatgaatgtaaggagtgtgggaaaggctttagtcgtgtttcaaaccttattcagcatcagaaaactcattccagtgcgaaaccctttgtatgtaaggagtgtaggaagacctttagatatcattaccagcttactgaacattaccgaattcatactggtgagaaaccctttgaatgtaaagaatgcggaaaggcctttggtcttctgacacagcttgctcaacatcagatcattcatactggtgagaagccatttaaatgtaaggagtgtgggaaggcctttaatcgtggctcaaaccttgttcaacctcagagtattcatactggtgagaaaccctatgaatgtaaggagtgtgggaaggcttttagacttcacctacaactttctctgcatcaaaaacttgtacaggtgagaaaccctttgaatgtaagaaatgtgggacagccttcagacatcagtagcaacttactgaacatcagaaaattcatacttgggtgaaaacctttgaatgtaaggaatgtgggaaggcctttcaatatcattaccaatttcatggacattatagatttcatattcgtgagaacccttatgaatgtcaaggatgtgggaaatgctttaccagtggtagaaaccttagagtacatcagagaattcatactggtgagaaaccatatcaatgtgaagaatgtgggaaagcctttagtcatagttcaaacctgttaaacatgttaaaattcatactgatgagaaaccctatgaatgtaaggaatgtgaaaaggcctttagcagtaattatgatcttactgtacatctgagaatccgtactgctgagaaaccctgtgagtgtaaagaatgtggaaaacttttggatttagcttagtctttactgcacatcaaagaattcatactggtatgaaccgtatgaatgtaaagaatgtggaaagacctttacttgtagctcgagccttgttcaacatgttaaaattcatactggtgagcaaccctgtgaatgtaaaggatgtgggaagacctttagacttagttcagtcctttctgcacatcacagaattcatactggcatgaaaccctatgaatgtaaagaatgtgagcaaacccttactgtgaatgatctgcttacgcaacatcagaaaattcattatagttagaagttttatgaatataaggagtgtagacaagccttcactgtgtatgaaaaatttactcaacaccagagaattcatattgatgagaaatcctgtgaacataaaagaatgtgtgaagaactttcatcgtggcctgggatttgctcaacatcagagtattcatactgctgagaactcctttgagtgtaaagaatgtgggatattttatagccacactaaatgccttagagttcagagaagataattttggtgagaaagttactgatgtgaggaatgtagagtagctgccatgttcacagtttactgcccgtgaaatattttactggatacaggcgtaccttgcttaattgtgcattgcagttactgcattttatacacactgaaggtttgcagcaaccttgcagtgaataagtctatcagcaccattttccaaacagcatatgcacatttcatgtctttgtgtcacactttgctagttttcataatatttcaaactttttcattgttaaatctgttatggtgatctgtgaccagtgttttttgattactagtgtaattgttactagtgtaattgtttggggataccacaaatcctgcccataaaagatggtgaacctagttgataattgttgtgggttttgaaagaatagtaaaatatatacacatatcccccccacctagattcaaaattgttaacaatttgccacatttattttttgtatatttgttgtaccattgagaataagttttagaccattgagaataagttttagatatcatgacactttactccttgttacatcagcatgtgtgttacccaaacataaagacaatatcatataaccatagtaccataattacccttaaggaaaatattcataattctgtaatatcattccatcttcagatttcttccttggcctgcaaaccatcttttacagctattcattttctctttttttttttttttttttgagatggagtctcgctctgtcgcccagactggagtgcagtggtgcgatctgggctcactgcaagctctgcctcctgggttcacgccattctcccgcctcagcctcctgagtagctgggactagaggcacccgccaccatgcccagctaattttttgtatttttagtagagacagggtttcactctgttagccaggatggtctcgatctcctgacctcgtgatccacccgccttggcctcccaaagtgctgggattacaggcatgagccagcatgcctggcctacagctattcattttctaaggagagtccattgcagattctgcattgcatttggttatctctctttagtgtattgtagcatggaaaccccatgaaagtatgctctcaaattatggtgggtatcagaatcccctgtggaacttagtaaacctacagaagtgtagccctagtttataagcctgggcctctgttttttattatttctccaggttttgtgtctgtgataccaaccagagttagagagccactggtctagaacatttctcattttaaaaaaatgacattgaattttgagtagcccagaaatgttgttggctatgtgtttagatttctttctttatagtgtcatttagccttgttcttggttgtattttctttacaagggaaagtaagtccagaggctttcttaggtctagattaaacgttttggggaagaatactttgtaggttatttctatgtcatattgtactgtcagaaaacatttaagtacaggtccttgcattagtgaaactaaggatgatcatttgggtaagctggtaaccgccgtaagtccattgtaaagatttagtttgtagtgggtaagtaatctatggagagacgttgtcatctctgaaaagttatagtcacgtgtacttaagccctggattgaatacaaaatgaaaattgaaatagactattgagaaatgaatgccattaaagcgtcaacataattcaacttgtgtgatatggctgacactgtactcagtacaaaactggcaccctttggattgtatagggagccaagattgtccggaacctcttttttgttcagcatttatcaccagcacctataccatggctggtacatgagctgttgataaaaatttgaaaaaatattaaccctttaaatcaagctgtaaaacatgataccattaagccgggagcagtggcctcatgcctgtaatcccagcactttgggaggccaaggtgggcagatcacctgaggtcaggagtttgagaccaacttggccaacatggcaaaactccatctctcctaaaaataaaaaaattagctggacatggtggtgcattcctgtaatcccagctacttgggaggctgaggcaggagaatcactcgaaattggaaggtggaggtggcagtgagccaagatcgtgccactgcactccagcctgggcgacaaagtgagacttcatctcaaaaaaaccccaaaacaaaacatgataccgatgtggcatcatgaattagattaaattttttttaagattaagaataatcctttgtgattttattccattgtgttgaaaaatctataaagtgataatttatattgatagctttcttctttttatgaatataccctggtcagatgattattctttcaatagactacttaattctatcttttaccatttaattgcatctataatcataagtaaagttataattttccaagtatttttcaggtattgatattgcaatgatgttatacaacttataaaacaagattatataaaacttggctttcaaatcttatgttcctattttttatttccagtttcatcttttttctatccattctcttgaactttcttctttgaaatcagcagagtccctgggtattaacctagcacaactcctttctgggtcattgcacatcccggtagtatcattaagagttgtcagaaagatccctggcagcctttcggtgaaactctatcatcatgcaatcatggcagtactatgttggaagtcagagtccctttgcaaacataataaaacactttaatatatttgttaaagttacaaaccaagtatgtacaaatttaaaaatcacggccaggcacggtggctcacgcctgtaatccccaacttaaaatggtttgacttataattttcagctttataatagtacaaaagtgatatgctgctatagtttggatatttatcccctccaaatctcatattgaagtttgatcccaatgttggaggtggggcctaatgggaggtgtgtgggtcatgggagaagatccctcatgaataaattaatgtcctctctggattggggggtgaattatcactctgttagttcctatgagagctggttgtacaaaagagcctggcacctccttcctcaccctcttgcttcctctcttgccatgtgatgtctgcatacactgccccctttcatctgccatgagtggaagcagcctgaggcccttaccagaagcagatgttgcaccatgattcttgtaaatcctacagaacactgagccaaataaacctctttctttattaataacccaacctcagacattcctttatagcaacacaaaactaagacatactcagtcagagtatgctccttgacttaaaatggggctatatctagataaacccattgttaaattgaaaatattgtagaccataaatgcacatatggtgtatgatgttttcaatttatgatgggtttatttggacataactccccgtaagttgagaagcacctgtagtaattattattatttatgctcaaattgacataatgtggccagtaggaatccatttacattttttttttactacttatttttttcttttgatgttttaaaggaatattgttttcaggccgtaagaggatgtttaagactgaccctgtttgttggttcatgtcccccatgcctcttgtcctgagtcatggaatcaactcatgatttaataccctcttatcttagggagtcctggttccttttagaggaaaaaagaattagagaccaaaaaatctggctgctgtgagtgcacatggcagttacaggtatggaaaaaaagatgctgcttttgttagaattcttttaatagtttcagagttgaaaatgtcatcctaaggtcagaagttccctctgaattttctcaacttacatttctatgatctgctcttgtttgcatttggtattttattgaattatgttttatgtatggtgatagctgagaagtttatctccttttaaggcctggctgaaatgatacattaatctgcctcccatttttggagatattgctctgatttaaatttgtcatggtgtttctgagcagcgttgtaaagaaacttgttttagaatattcagtcatggatgttatcttgaatgttcatagactccccagaaaagaagaaaaagtagacacaagatttctgtcatccttttacagggtattgtgatcatccagcttggggtatgagggataacggacctgtgtgtcttaatttccagaataccattccatttcaatgagtcttctgcacaagttgtggtctcagggattcactgtcttcatttgtaattgatcaaaatgaaaccatctccaggattcctcagtgggtcaggatctgttatttattaggcccgcatatccattctaccctgctttcatgattatagaaccagtaatttttattgatagttggctgtgactatctagaataaggactgcagttatttctccaaggtgttgtcatgtgacataacttatggcaagtaggatgtaagtgaatattttggcaattctggaaacctcttaaaacaaactagcttaatatattaatatttgagaaatctgggtgaagggtaaccagaattatttactattcttccaagttctgtataagtctgagtgctcattccattctgatgccagaatggtaaaattcatgattggtttagagcaaggccacagtatcaggcttacatccatattatatgacagagaaattaacttttattatattttatccactttaatttggggcagttttactattttactcacaaccaaatttaatcttaaacgctacaactagattgtcacatgtaaaaagtaataaccatcattatatcttttatgttctgtaattccaaagcacggatctgtagagaacagagtgtctatcccatgcatgttgtcatgtacttatcccacaccctattgaaatcacagtacccataagggagacattttttttcttcaagaatatgtatttctgccacatctatgattctccagaatgagatgacagaaaatgctaaactattgttaaatgactatatgtagttccacttctggatggtagatgggggggctctgcaaactcattttctaataaaactggcaaaaaaaaatgta

SEQ ID NO: 203810 - DNA, 3538 bp, Homo sapiens; identical to SEQ ID NO: 203804
  Payload ID: 20195
  Gene Name: Zinc finger protein 780B
  ENST ID: ENST00000630970
  CDS Start-End: 703-2760

SEQ ID NO: 203811 - DNA, 393 bp, Homo sapiens; identical to SEQ ID NO: 203808
  Payload ID: 20195
  Gene Name: Zinc finger protein 780B
  ENST ID: ENST00000626348
  CDS Start-End: 66-393

SEQ ID NO: 203812 - DNA, 401 bp, Homo sapiens; identical to SEQ ID NO: 203807
  Payload ID: 20195
  Gene Name: Zinc finger protein 780B
  ENST ID: ENST00000628151
  CDS Start-End: 102-365

SEQ ID NO: 203813 - DNA, 509 bp, Homo sapiens; identical to SEQ ID NO: 203806
  Payload ID: 20195
  Gene Name: Zinc finger protein 780B
  ENST ID: ENST00000627835
  CDS Start-End: 282-509

SEQ ID NO: 203814 - DNA, 8664 bp, Homo sapiens; identical to SEQ ID NO: 203809
  Payload ID: 20195
  Gene Name: Zinc finger protein 780B
  ENST ID: ENST00000627167
  CDS Start-End: 66-2567

SEQ ID NO: 203815 - DNA, 8665 bp, Homo sapiens; identical to SEQ ID NO: 203805
  Payload ID: 20195
  Gene Name: Zinc finger protein 780B
  ENST ID: ENST00000625684
  CDS Start-End: 67-2568

SEQ ID NO: 203816 - DNA, 3147 bp, Homo sapiens
  Payload ID: 20196
  Gene Name: zinc finger protein 781
  Uniprot ID: Q8N8C0
  ENST ID: ENST00000358582
  CDS Start-End: 750-1733
ccagcccacaaacgcggcggaaccggttgcggggaggttgcttgaattctctcagctgcgccccctgacctagtagtcgctggcacaagctgcgcccggagacgtgggagcgttctcttgttttccgagtgcgcggactcatcgggtcacagtttatgcttttatgacgcgggaacacaacagatttgagaagcctcggattaaggaataatttatgaagctccgttgactaccgtggagagatcataatttggggttcaagattccagtctgtgtttttccagaggtgccctgaggagcagggaagcatggctattgtggatgtaaaagccatgttcaagatatgctgtctagatatgagaccaaggagttaactcttaagaatggcacttttgaaaaggaatcattaaaatggaaaataatagaaagtgtcagaagttcttgccttgaggaatcttttttgggaaatgattggaaatgcaaaggactctttgagagacaacaggaaactacagaggaatatttcaggcatgtaactgtgccatttgaaaaaatatccgaattcatccagcctacatattttcttctaaatcaaataattcatactggaaagaaactctatgaacaaaaaaaaaaatgagaaaatgttactcaacagggaagaattcatatcagtgacaagcttgacgaaatgtgtgggaacacctctgtattttgcacaaatcatatgaaacatcagacaaattttaatgcaaagaaatgcaatgtatttaaagaatgtggcagagactgcttgtaactttcaactaactcaatatcaaataagtcatgctaatcagaaaccctatgaatgtcagatatgtggaaagccctttagaaagcgtgcccaccttacccaacataatcgaattcacactggtgggaaaccatatgaatgcaaagaatgtgggaaagtgtttatctgttgttcaacattgattcaacataagagaactcacactagtgagaaaccctatgaatgtctggaatgtagaaagacgtttaggcggagtgcacatcttattcgacatcaaagaattcatactggtgagaaaccttataaatgtaagcaatgttggaaggcctttgcttctgtttctgatttaatagacatcggaaaattcacactgatgagagactttacgaatgtacagaatgtgggaaggcatttaacaatcgctcaactcttattcagcatcagagaattcacactggtgagaagtcctttgaatgtaaggaatgtggcaaagcattcaataattgctcaacacttactcaacaccagagaactcatactaatgagaaatcttatgaatgtcaggaatgtaaaaaggcttttaggcaaagtgcacatcttactcaacatcaaagaattcatactggtgagaaaccatatgagtgtaagtaatgtgggaaggctttcacttgtgtttctgattttaatagacatcagagaattcacactggtgaaaaaccctatgaatgtaaagaatgtggtagagcttttaacaattgttcagctcttattcaacaccagagaattcacactggtgagaaggcttatgaatataagcagtgtgggaaggtttttgtctcctgtccaacacttgttcaacatcagagaacacatactaatgaaaaaccttatgaatgtcagtaatgcaagaaggccttcaagcataatgcacatctaatgagacatcagagaattcacagtggggagaaaccctatgaatgtaatgaatgtgggaatgccttcatttgtttttttgattttaatagacatcagagaattcacaaaggagagaaaccctatcagtgtaaagaatgtgggaaggtttttaataattatccaactcttactcaacatcaaagaattcataccagtgtgaaaccctatgaatgtaaggaatgtgtaaagacctttacttggctttcaaacttgaataaacatcagacaattcacactggtgacaaaccctatgaatgtaaagattgtaaaaaagcttttctttgttattcaacatttattcaacactatagaactcatactaatgagaaacctatgaatgtcaggaatgcagcaaggcctttaagcagagagcccatcttagtcaacatcaaaatattcatactggtgagaaaccctatgagtttaaggaatgtgggaaggcctttgcttgtttcctaccttaatagaaatcagagaattcacactagtgagaaaccgtatcagtgtaaaaaatgtagaaaatcctttattgattgttcaactcttaacaccagagaattcacactggtgagaaaccctttgaatgtcaggaatgtaggaaggcctttaggcagagggcgcatcttactcaacatcaaagaattcctactggtgagaaaccctatgaatgtaatgaatgtgagaaggcctcttcttgtctttcataggtgaaaaagcaccagagaatacatacatgaagggacaaatcttatgtatttgaatagcgtctttttatttaacaatccttatctaacatcaccaaattcacattgcagagaaacttcagaaatataagaaatgtgggaaacacttttacctgtccctcagctatactttttcataacagaatttgtacaggtgagaagcctaatgaaagcccgatatgtgtaaagatctactctcacaatatactcaacattatataatgtatagtgtgattaatataggaaatccttgattttgaaattatcaattatggaatagcaaacaatttgtaagtgaagaaaatccagtgactgtaaatttttttacctcataattcacaatttattaagcatcagaatttatatggaaaaaatagaatatcaattattaataaaaacattaccactaaaattttatttgacttatagagaatagcatatagagaataatcatgttgactttgtgaatgtagaaaagcttttatctattacacgaatctttttcagcatcattatactttcaccagtttccacgtctgttttattaccaagtaatttaaactgtatacttcagattacaaatttcttacattgtgataaggttattgtgaagattaaatgagtttatccaaa

SEQ ID NO: 203817 - DNA, 2148 bp, Homo sapiens
  Payload ID: 20196
  Gene Name: zinc finger protein 781
  Uniprot ID: Q8N8C0
  ENST ID: ENST00000590008
  CDS Start-End: 854-1837
ccggttgcggggaggttgcttgaattctctcagctgcgccccctgacctagtagtcgctggcacaagctgcgcccggagacgtgggagcgttctcttgttttccgagtgcgcggactcatcgggtcacagtttatgcttttatgacgcgggaacacaacagatttgagaagcctcggattaaggaataatttatgaagctccgttgactaccgtggagagatcataatttggggttcaagattccagtctgtgtttttccagaggtgccctgaggagcagggaagcatggctattgtggatgtaaaagccatgttcaaggattggtgacattcagggatgtggctatagatttctctaagggagagtgggaatgcctgggccctgctcagagagacttgtacagagatgtcatgttggagaactacagcaactttgtgtcaccggatatgctgtctagatatgagaccaaggagttaactcttaagaatggcacttttgaaaaggaatcattaaaatggaaaataatagaaagtgtcagaagttcttgccttgaggaatcttttttgggaaatgattggaaatgcaaaggactctttgagagacaacaggaaactacagaggaatatttcaggcatgtaactgtgccatttgaaaaaatatccgaattcatccagcctacatattttcttctaaatcaaataattcatactggaaagaaactctatgaacaaaaaaaaaaatgagaaaatgttactcaacagggaagaattcatatcagtgacaagcttgacgaaatgtgtgggaacacctctgtattttgcacaaatcatatgaaacatcagacaaattttaatgcaaagaaatgcaatgtatttaaagaatgtggcagagactgcttgtaactttcaactaactcaatatcaaataagtcatgctaatcagaaaccctatgaatgtcagatatgtggaaagccctttagaaagcgtgcccaccttacccaacataatcgaattcacactggtgggaaaccatatgaatgcaaagaatgtgggaaagtgtttatctgttgttcaacattgattcaacataagagaactcacactagtgagaaaccctatgaatgtctggaatgtagaaagacgtttaggcggagtgcacatcttattcgacatcaaagaattcatactggtgagaaaccttataaatgtaagcaatgttggaaggcctttgcttctgtttctgatttaatagacatcggaaaattcacactgatgagagactttacgaatgtacagaatgtgggaaggcatttaacaatcgctcaactcttattcagcatcagagaattcacactggtgagaagtcctttgaatgtaaggaatgtggcaaagcattcaataattgctcaacacttactcaacaccagagaactcatactaatgagaaatcttatgaatgtcaggaatgtaaaaaggcttttaggcaaagtgcacatcttactcaacatcaaagaattcatactggtgagaaaccatatgagtgtaagtaatgtgggaaggctttcacttgtgtttctgattttaatagacatcagagaattcacactggtgaaaaaccctatgaatgtaaagaatgtggtagagcttttaacaattgttcagctcttattcaacaccagagaattcacactggtgagaaggcttatgaatataagcagtgtgggaaggtttttgtctcctgtccaacacttgttcaacatcagagaacacatactaatgaaaaaccttatgaatgtcagtaatgcaagaaggccttcaagcataatgcacatctaatgagacatcagagaattcacagtggggagaaaccctatgaatgtaatgaatgtgggaatgccttcatttgtttttttgattttaatagacatcagagaattcacaaaggagagaaaccctatcagtgtaaagaatgtgggaaggtttttaataattatccaactcttactcaacatcaaagaattcataccagtgtgaaaccctatgaatgtaaggaatgtgtaaagacctttacttggctttcaaacttgaataaacatcagacaattcacactggtgacaaaccctatgaatgtaaagattgtaaaaaa

SEQ ID NO: 203818 - DNA, 932 bp, Homo sapiens
  Payload ID: 20197
  Gene Name: zinc finger protein 782
  ENST ID: ENST00000478850
  CDS Start-End: 318-932
ccgccccctgtgtcagtggatgcgaccgggcgggccctcggccttcccggccgctggagagggacttcggccgctggctcccggggcggctgaggctgagcgttggtccggagcaggtgccgggtgcgggccgcggtgtgcgggaccggagcccggcgcgagcggcggcgggggtggggaaagcgcatttgtaacgcgggcgacaacgtgcccgaaatccccggacggtgggtctgcatcgagaccccgagctctggagctggaaaaacccggctgaggctttacagttctctatactctcccaagagccacagaaaatgaacacatttcaggcatcagtgtcattccaggacgtgactgtggaattcagccaggaggagtggcagcacatgggccctgttgagaggaccctgtacagagatgtgatgctggagaactacagccacctcgtctcagtgggctactgctttacaaaaccagaactgatcttcacattggaacaaggagaagatccatggttattagagaaagagaaaggatttctaagcaggaactccccagaagactcccaacctgatgaaatctcagagaagagcccagaaaatcaaggcaaacatttgttgcaagttttattcaccaataaattattgactacagagcaagaaatttcaggaaaaccacataatcgagacataaacatttttcgtgcaagaatgatgccttgtaaatgtgacattgcggggtctgcttgccaggggctcagcctgatggccccacactgtcagtattcaaaagaaaaggctcatgagcgtaatgtttgtgacaaatggctcatcagtattaaggatggcagaactaacactcaagagaaatctttcgcttatagtaaaattgtgaaaaccctccatcataaggaggaagttattcaacat

SEQ ID NO: 203819 - DNA, 2355 bp, Homo sapiens
  Payload ID: 20197
  Gene Name: zinc finger protein 782
  ENST ID: ENST00000289032
  CDS Start-End: 1-2065
gtttataaacgttgaccaaagtgccagaactcgtgggcgctgtgtctgtggcaagaccccgagctgtggagaccgaaagagctgcataaattccagctttattacctgctactgctttacaaaaccagaactgatcttcacattggaacaaggagaagatccatggttattagagaaagagaaaggatttctaagcaggaactccccagaagactcccaacctgatgaaatctcagagaagagcccagaaaatcaaggcaaacatttgttgcaagttttattcaccaataaattattgactacagagcaagaaatttcaggaaaaccacataatcgagacataaacatttttcgtgcaagaatgatgccttgtaaatgtgacattgcggggtctgcttgccaggggctcagcctgatggccccacactgtcagtattcaaaagaaaaggctcatgagcgtaatgtttgtgacaaatggctcatcagtattaaggatggcagaactaacactcaagagaaatctttcgcttatagtaaaattgtgaaaaccctccatcataaggaggaagttattcaacatcagacaattcagactctggggcaagattttgaatataatgaaagtagaaaagcttttcttgaaaaggctgcccttgttacatctaacagtacccacccaaaaggaaaatcttacaatttcaataaatttggggaaaacaaatatgataaatcaacctttattattcctcagaacatgaatccagagaagagtcactatgagtttaatgatactggaaattgtttctgtagaatcactcacaaaactctcacaggagggaaatccttcagccaaaagtcacacattagagaacatcatagagttcatataggggtgaaaccctttgaatatggaaaaagtttcaaccgtaattcaaccctcccagtgcatcagagaactcatgcaacagataaatactctgattatcacccatgtacagagacattcagctaccagtcaactttcagtgtacatcagaaggttcacataagggcaaaaccctatgagtataatgaatgtgggaaatcctgctctatgaattcacacttgatttggcctcagaaaagtcacacaggggagaaaccctatgaatgtcctgagtgcgggaaagccttcagtgagaagtcacgcctaagaaaacatcagagaactcacacgggagagaaaccatacaaatgtgatggatgtgataaagctttcagtgcaaagtcaggcctaagaatacaccagagaacccacacaggggagaaaccattcgaatgtcatgaatgtgggaaatcttttaactataagtcaatcctcatagtgcatcagagaactcacacaggggagaaaccttttgaatgtaatgaatgcgggaaatctttcagccatatgtcaggcctaaggaatcaccgaagaactcacacaggggaaagaccatataaatgtgatgaatgtgggaaagctttcaaactgaagtcaggcctgaggaaacatcatagaacacacacaggggagaagccctacaaatgtaatcagtgtggaaaagctttcggtcagaaatcacaactcagaggacatcatagaattcacacaggggaaaaaccctataaatgtaatcattgtggggaagctttcagtcagaaatcaaacctcagagtacatcacagaactcatactggggagaaaccctatcaatgtgaggagtgtggaaaaacattcaggcagaaatcaaatctcagagggcatcagagaactcacactggggagaagccctatgaatgtaatgaatgtggaaaagctttcagtgagaagtcagtcctaagaaaacatcagcgaactcacaccggggagaaaccatataattgtaatcagtgtggggaagctttcagtcagaaatccaatctcagagtacatcagagaactcacacaggggagaaaccctataaatgtgataaatgtgggagaactttcagtcaaaaatcaagccttagagaacatcagaaagcccacccaggggattaaatgtatgcatataaagaatacgaaaaaactctgagctggaaatcaaacctcacaatacataaatgaacacacaggagagaactgttaacatagtgagcactggaatttcctctacaatttcagcctccaccaaatatcaaagaatagaagataaattgttgaaatctattttatatgggcattctttcagccagagcccagtcttctatggatatacagaactcacacagcaaagaaaccctataaacataatgaatatggaaaatactcttgcgaactcactcctcaga

SEQ ID NO: 203820 - DNA, 4213 bp, Homo sapiens
  Payload ID: 20197
  Gene Name: zinc finger protein 782
  Uniprot ID: Q6ZMW2
  ENST ID: ENST00000481138
  CDS Start-End: 663-2762
tcgagactcccgggaagcggtttgggaagctcgggggtcggctcggaaagtagagggggcgcagctggggcgggaggacagcgtttgtgcccggaagcgggagaggaagcgggaagtttgtgggatccccgccccctgtgtcagtggatgcgaccgggcgggccctcggccttcccggccgctggagagggacttcggccgctggctcccggggcggctgaggctgagcgttggtccggagcaggtgccgggtgcgggccgcggtgtgcgggaccggagcccggcgcgagcggcggcgggggtggggaaagcgcatttgtaacgcgggcgacaacgtgcccgaaatccccggacggtgggtctgcatcgagaccccgagctctggagctggaaaaacccggatgccatactgctgttaacatatgtgacactggagactttgtccctacctcatagaatcccatgcatgatgatacatgaagggttttccgtggctatctacttctgattcttttgaaagctttaaagacattgggcatgaaaggttcagtgagtttccggggatccctcgtttgtggtagagccaggaggaaaacagttccgttcattctttcacagctgaggctttacagttctctatactctcccaagagccacagaaaatgaacacatttcaggcatcagtgtcattccaggacgtgactgtggaattcagccaggaggagtggcagcacatgggccctgttgagaggaccctgtacagagatgtgatgctggagaactacagccacctcgtctcagtgggctactgctttacaaaaccagaactgatcttcacattggaacaaggagaagatccatggttattagagaaagagaaaggatttctaagcaggaactccccagaagactcccaacctgatgaaatctcagagaagagcccagaaaatcaaggcaaacatttgttgcaagttttattcaccaataaattattgactacagagcaagaaatttcaggaaaaccacataatcgagacataaacatttttcgtgcaagaatgatgccttgtaaatgtgacattgcggggtctgcttgccaggggctcagcctgatggccccacactgtcagtattcaaaagaaaaggctcatgagcgtaatgtttgtgacaaatggctcatcagtattaaggatggcagaactaacactcaagagaaatctttcgcttatagtaaaattgtgaaaaccctccatcataaggaggaagttattcaacatcagacaattcagactctggggcaagattttgaatataatgaaagtagaaaagcttttcttgaaaaggctgcccttgttacatctaacagtacccacccaaaaggaaaatcttacaatttcaataaatttggggaaaacaaatatgataaatcaacctttattattcctcagaacatgaatccagagaagagtcactatgagtttaatgatactggaaattgtttctgtagaatcactcacaaaactctcacaggagggaaatccttcagccaaaagtcacacattagagaacatcatagagttcatataggggtgaaaccctttgaatatggaaaaagtttcaaccgtaattcaaccctcccagtgcatcagagaactcatgcaacagataaatactctgattatcacccatgtacagagacattcagctaccagtcaactttcagtgtacatcagaaggttcacataagggcaaaaccctatgagtataatgaatgtgggaaatcctgctctatgaattcacacttgatttggcctcagaaaagtcacacaggggagaaaccctatgaatgtcctgagtgcgggaaagccttcagtgagaagtcacgcctaagaaaacatcagagaactcacacgggagagaaaccatacaaatgtgatggatgtgataaagctttcagtgcaaagtcaggcctaagaatacaccagagaacccacacaggggagaaaccattcgaatgtcatgaatgtgggaaatcttttaactataagtcaatcctcatagtgcatcagagaactcacacaggggagaaaccttttgaatgtaatgaatgcgggaaatctttcagccatatgtcaggcctaaggaatcaccgaagaactcacacaggggaaagaccatataaatgtgatgaatgtgggaaagctttcaaactgaagtcaggcctgaggaaacatcatagaacacacacaggggagaagccctacaaatgtaatcagtgtggaaaagctttcggtcagaaatcacaactcagaggacatcatagaattcacacaggggaaaaaccctataaatgtaatcattgtggggaagctttcagtcagaaatcaaacctcagagtacatcacagaactcatactggggagaaaccctatcaatgtgaggagtgtggaaaaacattcaggcagaaatcaaatctcagagggcatcagagaactcacactggggagaagccctatgaatgtaatgaatgtggaaaagctttcagtgagaagtcagtcctaagaaaacatcagcgaactcacaccggggagaaaccatataattgtaatcagtgtggggaagctttcagtcagaaatccaatctcagagtacatcagagaactcacacaggggagaaaccctataaatgtgataaatgtgggagaactttcagtcaaaaatcaagccttagagaacatcagaaagcccacccaggggattaaatgtatgcatataaagaatacgaaaaaactctgagctggaaatcaaacctcacaatacataaatgaacacacaggagagaactgttaacatagtgagcactggaatttcctctacaatttcagcctccaccaaatatcaaagaatagaagataaattgttgaaatctattttatatgggcattctttcagccagagcccagtcttctatggatatacagaactcacacagcaaagaaaccctataaacataatgaatatggaaaatactcttgcgaactcactcctcagaaaactcacgctgcagaaaagctctgagaaagtaataaaaatgtgaaaactttgtgccaacaatcaaaactcattcaccatcagagaaatcacacaatgacaaaagctagaatataataagtgtgtgataaactttaatgaaaagtcagtacagcagaaaatacattcaagatagagacctcatagtatattaaaacaaacaagaaatgaagttaatggatgtgggaaattcttctgccatgtcaaccctcattttaacctacacagaggtaatccctatatgtcgtataataactattgaaatgttcactagtaatcattttcacttctccctcatgccacacctggcctaaatttctcaaccactctctcatctaaacggggtcatattgttaccctctagctagtggaatatggggtcagtgacaggtcttaaatacatcagtcaaattctcaatattttcttctatccctcattagaatggaatggaggaaaaccttgggactcaggctctgatgatggaaagtacaagatggtaggaacccgggtcagagaaggatcctgtggcatggagttttctcctccctgtacacagttggacttcttgcagtgaggaaataaatgtgttccctgctgaacttctaaaggtttgggtatacttgatactgacagaaactcaacaaccctcacataataaaacttaggagtatgatttttcaggacatctgaactcagtgtatgtcagaaaagtcacataggacaaatctcggacagcatcctgaatgaccatggcttttatccccaaagtcttcctcatcagacaggtaatatcataagaaatctgacattttaacaaatataggaaattcttcacacacacagacacacactcacacatacacacccaaagtctcattaaatatatgataatttagttttgaatgtgtaaaagttttcaacaaattatcatattttatatcagagcttgttacaaggagaaaatctatcaatttgagaaaggtaagtaatagcctttatctagatattgctttatcagaactgttgtttcacatataatatcaaaacttttaatgaaatataagacattcactataataaaaagcttaaaaagaacaaaaaataaactgcataaactgaaaa

SEQ ID NO: 203821 - DNA, 698 bp, Homo sapiens
  Payload ID: 20197
  Gene Name: zinc finger protein 782
  ENST ID: ENST00000498811
  CDS Start-End: 24-158
agtgcgaaccttggggaaagcgcatgcccgcggcggcagaggagagcccgtttataaacgttgaccaaagtgccagaactcgtgggcgctgtgtctgtggcaagaccccgagctgtggagaccgaaagagctgcataaattccagctttattacctgatctcactttgtcactcaggttggagtgcagtggcacaatcacagttcattgcagcctcaacctcctgggctcaggctgcctggagttgggagaggagcaatacaacacccctgtagccaccaccactgggacagcactgggtcagacctgaagccggcacagcgctgtgactgcccaagacccccactgtaacaacaacccagctgccacctatttcactcaaggccccagggctctccaattagcagaatcccatgcatgatgatacatgaagggttttccgtggctatctacttctgattcttttgaaagctttaaagacattgggcatgaaaggttcagtgagtttccggggatccctcgtttgtggtagagccaggaggaaaacagttccgttcattctttcacagctgaggctttacagttctctatactctcccaagagccacagaaaatgaacacatttcaggcatcagtgtcattccaggacgtgactgtggaattcagccaggaggagtggcagcacatgggccctgttga

SEQ ID NO: 203822 - DNA, 3296 bp, Homo sapiens
  Payload ID: 20197
  Gene Name: zinc finger protein 782
  Uniprot ID: Q6ZMW2
  ENST ID: ENST00000535338
  CDS Start-End: 265-2364
cagatgccatactgctgttaacatatgtgacactggagactttgtccctacctcatagaatcccatgcatgatgatacatgaagggttttccgtggctatctacttctgattcttttgaaagctttaaagacattgggcatgaaaggttcagtgagtttccggggatccctcgtttgtggtagagccaggaggaaaacagttccgttcattctttcacagctgaggctttacagttctctatactctcccaagagccacagaaaatgaacacatttcaggcatcagtgtcattccaggacgtgactgtggaattcagccaggaggagtggcagcacatgggccctgttgagaggaccctgtacagagatgtgatgctggagaactacagccacctcgtctcagtgggctactgctttacaaaaccagaactgatcttcacattggaacaaggagaagatccatggttattagagaaagagaaaggatttctaagcaggaactccccagaagactcccaacctgatgaaatctcagagaagagcccagaaaatcaaggcaaacatttgttgcaagttttattcaccaataaattattgactacagagcaagaaatttcaggaaaaccacataatcgagacataaacatttttcgtgcaagaatgatgccttgtaaatgtgacattgcggggtctgcttgccaggggctcagcctgatggccccacactgtcagtattcaaaagaaaaggctcatgagcgtaatgtttgtgacaaatggctcatcagtattaaggatggcagaactaacactcaagagaaatctttcgcttatagtaaaattgtgaaaaccctccatcataaggaggaagttattcaacatcagacaattcagactctggggcaagattttgaatataatgaaagtagaaaagcttttcttgaaaaggctgcccttgttacatctaacagtacccacccaaaaggaaaatcttacaatttcaataaatttggggaaaacaaatatgataaatcaacctttattattcctcagaacatgaatccagagaagagtcactatgagtttaatgatactggaaattgtttctgtagaatcactcacaaaactctcacaggagggaaatccttcagccaaaagtcacacattagagaacatcatagagttcatataggggtgaaaccctttgaatatggaaaaagtttcaaccgtaattcaaccctcccagtgcatcagagaactcatgcaacagataaatactctgattatcacccatgtacagagacattcagctaccagtcaactttcagtgtacatcagaaggttcacataagggcaaaaccctatgagtataatgaatgtgggaaatcctgctctatgaattcacacttgatttggcctcagaaaagtcacacaggggagaaaccctatgaatgtcctgagtgcgggaaagccttcagtgagaagtcacgcctaagaaaacatcagagaactcacacgggagagaaaccatacaaatgtgatggatgtgataaagctttcagtgcaaagtcaggcctaagaatacaccagagaacccacacaggggagaaaccattcgaatgtcatgaatgtgggaaatcttttaactataagtcaatcctcatagtgcatcagagaactcacacaggggagaaaccttttgaatgtaatgaatgcgggaaatctttcagccatatgtcaggcctaaggaatcaccgaagaactcacacaggggaaagaccatataaatgtgatgaatgtgggaaagctttcaaactgaagtcaggcctgaggaaacatcatagaacacacacaggggagaagccctacaaatgtaatcagtgtggaaaagctttcggtcagaaatcacaactcagaggacatcatagaattcacacaggggaaaaaccctataaatgtaatcattgtggggaagctttcagtcagaaatcaaacctcagagtacatcacagaactcatactggggagaaaccctatcaatgtgaggagtgtggaaaaacattcaggcagaaatcaaatctcagagggcatcagagaactcacactggggagaagccctatgaatgtaatgaatgtggaaaagctttcagtgagaagtcagtcctaagaaaacatcagcgaactcacaccggggagaaaccatataattgtaatcagtgtggggaagctttcagtcagaaatccaatctcagagtacatcagagaactcacacaggggagaaaccctataaatgtgataaatgtgggagaactttcagtcaaaaatcaagccttagagaacatcagaaagcccacccaggggattaaatgtatgcatataaagaatacgaaaaaactctgagctggaaatcaaacctcacaatacataaatgaacacacaggagagaactgttaacatagtgagcactggaatttcctctacaatttcagcctccaccaaatatcaaagaatagaagataaattgttgaaatctattttatatgggcattctttcagccagagcccagtcttctatggatatacagaactcacacagcaaagaaaccctataaacataatgaatatggaaaatactcttgcgaactcactcctcagaaaactcacgctgcagaaaagctctgagaaagtaataaaaatgtgaaaactttgtgccaacaatcaaaactcattcaccatcagagaaatcacacaatgacaaaagctagaatataataagtgtgtgataaactttaatgaaaagtcagtacagcagaaaatacattcaagatagagacctcatagtatattaaaacaaacaagaaatgaagttaatggatgtgggaaattcttctgccatgtcaaccctcattttaacctacacagaggtaatccctatatgtcgtataataactattgaaatgttcactagtaatcattttcacttctccctcatgccacacctggcctaaatttctcaaccactctctcatctaaacggggtcatattgttaccctctagctagtggaatatggggtcagtgacaggtcttaaatacatcagtcaaattctcaatattttcttctatccctcattagaatggaatggaggaaaaccttgggactcaggctctgatgatggaaagtacaagatggtaggaacccgggtcagagaaggatcctgtggcatggagttttctcctccctgtacacagttggacttcttgcagtgaggaaataaatgtgttccctgctgaacttc

SEQ ID NO: 203823 - DNA, 2021 bp, Homo sapiens
  Payload ID: 20198
  Gene Name: zinc finger protein 784
  Uniprot ID: Q8NCA9
  ENST ID: ENST00000325351
  CDS Start-End: 41-1012
agagcgaacattggccttgggggcggggcttgggcacaagatggccgctgcgcgcccagaggcccagagtcggagctcaccgactccggagtcgcgatcccaggagccactggacctggtcctggtgcctgatgactgccggcctggcacacccccgagtgacctcatcgagatccaggtggtgaaggtgacggacaccacgctggtccctgagcccccggagccaggttctttccactgtgccttgtgccctgctgccttccggctggtttccgagctgctgttccacgaacatggccacttggctggggccgagggaggcgggcagggtggggacccgagccggtgccacgtgtgcggccacagctgcccgggccccgccagcctgcgcgcgcactacagcttgcacacgggggagcggccctaccgctgcgcgctctgcccccgcgccttcaaggccttggcgcccctgctccggcaccagcaccggcacggggtggagccgggcacctctcggaggcctccggacacagcggccgttgcagaacagaggcccggggtggccccggagagggcggaggtggtgatggcggcggcggcggcgggcgcagcggtggggaagccttttgcctgcaggttctgcgccaagcccttccgccgctcctcagacatgcgagaccacgagcgcgtgcacactggcgagcggccataccattgcggcatctgcggcaagggcttcacccagtcctcggtgcttagcggccacgcccgcatccacactggcgagcgcccgttccgctgcacgctctgcgaccgcaccttcaacaactcctccaacttccgcaagcaccagcgcacccacttccacgggccggggccggggctgggagactctggaggccagctgggctcgtcggcggctgaggggtcggggagcgggtgtggggtaggggaccctgcggaggaggggcggggggagaccgcgaaggtgaaggtggaggccgaccagtaggctgcagaccagggacatgggttagttaaggcggaggtacgaggccgacccggggagggggacggggtggggaaacggaggcaggggacagaagaggggagattgggggagagatgacagctgcagggatggttgtgagccgctagtgatggagagcagagggagagggccaggctccagactcccacacgcccacacagcacctctgccaggcctaggagaggacaggtgcagctcttgcagctctgcgggtgtgcggccaaaggcaaggcccacgggctggatgtcacttccccgactgtctcttggttggcttgtccttgtgcaagacccagcctgtcacgacagagcctgggcacttcagaggaggagccaggatcgaatggaaggggggaattggggtccaccatagtcttctgctctggtcctccacgggtggaccaggatggagtctcctgcctacctcactgcattgcactggacctgggatgcctatccaccctctggcagaagacactcaccaggttatctgtgaagagactctgggatcccatcacctcaaagccagagggtccccaagtcaccgctgagagcacttgagcctcaaggatgtaagcctgaccataggatcttgactccaacagcggcaacccccacccccattgtggtccgtccttaacccatccactcttcttcggaggcaactgagaacacataaagcaagcagctacctagcatccccctcctaaagctttagactcagagcccagggtcccccacaagcctcaaggtagcctcaggtttctctaatttcctccactcccagttcgaagcaaacagcttactgcctagtccccgccaatcccaagggcgggctggctgatggcagcatggtgggctggcctgggtgtggagtgaaagagtcactgtggtgggggcgagaggaggacttgggagctggaggtgtgacaccttcagttctgttcctattaaaggaccttctgaaggg

SEQ ID NO: 203824 - DNA, 1559 bp, Homo sapiens
  Payload ID: 20198
  Gene Name: zinc finger protein 784
  ENST ID: ENST00000591479
  CDS Start-End: 6-134
acaagatggccgctgcgcgcccagaggcccagagtcggagctcaccgactccggagtcgcgatcccaggagccactggacctggtgcgggcaaggaaggggcctgggcgtggggctcgaggtcctggtgcctgatgactgccggcctggcacacccccgagtgacctcatcgagatccaggtggtgaaggtgacggacaccacgctggtccctgagcccccggagccaggttctttccactgtgccttgtgccctgctgccttccggctggtttccgagctgctgttccacgaacatggccacttggctggggccgagggaggcgggcagggtggggacccgagccggtgccacgtgtgcggccacagctgcccgggccccgccagcctgcgcgcgcactacagcttgcacacgggggagcggccctaccgctgcgcgctctgcccccgcgccttcaaggccttggcgcccctgctccggcaccagcaccggcacggggtggagccgggcacctctcggaggcctccggacacagcggccgttgcagaacagaggcccggggtggccccggagagggcggaggtggtgatggcggcggcggcggcgggcgcagcggtggggaagccttttgcctgcaggttctgcgccaagcccttccgccgctcctcagacatgcgagaccacgagcgcgtgcacactggcgagcggccataccattgcggcatctgcggcaagggcttcacccagtcctcggtgcttagcggccacgcccgcatccacactggcgagcgcccgttccgctgcacgctctgcgaccgcaccttcaacaactcctccaacttccgcaagcaccagcgcacccacttccacgggccggggccggggctgggagactctggaggccagctgggctcgtcggcggctgaggggtcggggagcgggtgtggggtaggggaccctgcggaggaggggcggggggagaccgcgaaggtgaaggtggaggccgaccagtaggctgcagaccagggacatgggttagttaaggcggaggtacgaggccgacccggggagggggacggggtggggaaacggaggcaggggacagaagaggggagattgggggagagatgacagctgcagggatggttgtgagccgctagtgatggagagcagagggagagggccaggctccagactcccacacgcccacacagcacctctgccaggcctaggagaggacaggtgcagctcttgcagctctgcgggtgtgcggccaaaggcaaggcccacgggctggatgtcacttccccgactgtctcttggttggcttgtccttgtgcaagacccagcctgtcacgacagagcctgggcacttcagaggaggagccaggatcgaatggaaggggggaattggggtccaccatagtcttctgctctggtcctccacgggtggaccaggatggagtctcctgcctacctcactgcattgcactggacctgggatgcctatccaccctctggcagaagacactcaccaggttatctgtgaagagactctg

SEQ ID NO: 203825 - DNA, 3282 bp, Homo sapiens
  Payload ID: 20199
  Gene Name: zinc finger protein 785
  Uniprot ID: A8K8V0
  ENST ID: ENST00000395216
  CDS Start-End: 161-1378
gtaaaggcagagaggaaaggcgaggggtgttgacgccaggaaggttccatcttggttaagggcaggagtcccttacggacttgtctgaggaaagacaggaaagcgccagcatctccaccttccccggaagcctccctttgccaggcagaaagggtttcccatggggccgcccctggcgccgcgcccggcccacgtacccggggaggccgggccccggaggacgagggaaagcaggccgggcgccgtgagcttcgcggacgtggccgtgtacttctctcccgaggagtgggaatgcctgcggccagcgcagagggccctgtaccgggacgtgatgcgggagaccttcggccacctgggcgcgctgggattttcagttcccaaacccgcttttatctcgtgggtggaaggagaagtggaggcgtggagcccggaggcccaggatcccgacggtgagagctctgcagctttcagcaggggccaaggacaggaagcaggatccagggatgggaatgaggagaaggaaaggctgaagaagtgtccaaaacaaaaagaggtggcgcatgaagtggctgtcaaggagtggtggcccagcgtcgcctgcccagagttctgcaaccctaggcagagccccatgaatccctggctcaaggacactctgacccgaagactgccccactcttgcccagactgtggccgcaacttcagctacccttccctcctggccagccaccagcgggtccactccggggagcggcccttctcctgcggccagtgtcaggcgcgtttctcccagcgcaggtacctgctccagcatcagttcatccacaccggcgagaagccctacccctgccccgactgcgggcgccgcttccgccagaggggttccctggctatccacaggcgggctcacaccggggagaagccttacgcgtgctcagactgcaagagtcgcttcacttacccctacctgctggccatccaccagcgcaagcacacgggcgagaagccctacagctgccccgattgcagcctccgtttcgcctacacctccctgctggccatccacaggcgcatacacaccggcgagaagccctacccctgtcctgactgcggccgccgcttcacctattcttccctcctcctcagtcaccggcgcattcactccgacagccggcccttcccctgcgtggagtgtgggaaaggcttcaagcgcaagaccgccctggaagcccatcggtggatccaccgctcctgcagcgagaggcgcgcgtggcagcaggccgtggtggggcgttcagagcccatccctgttttgggaggcaaggatcccccagttcacttccggcactttccagatatatttcaagagtgtgggtgatggcgttcacacaaactggtcagcgtttccctggagaggaagaggcaaggtttgtgtatttgggggataaggaaaggaagtgggcgtttgaggaaaacaaagttctgccttaggtaaaaagcagaggtaggggcacagagggctgtggggaggaggcaggaatctgaaaaggtgcctgggggttgaccccattttctgaagctccagcacacagggccccgtgttcacgtcccatccttcactgaaaaccattcacctaactggcttttccttcatgattgttctctcccttgtagctctctgctttttggcctgtatctctcctactcctctgagatggggtcccctacattccagtgcctattaaaggagcctgcacccactctggaccccccagaatagaggggatacctcaggcctgtccctcggctggtggggggggcggagctcatcccaggattcttttcttttttttgagatggagtcatgctctgtcgcccaggctggagtgcagtggcgtgatctcggctcactgcaacctctgcctcctgggttcaagccattctctgcctcagccttcccattagctgggattacaggcatgcgccaccaggcccagctaatttttgtgctgttagtagagacggggttccaccatcttggccaggctggtcttgaattcctgacctcgtgatccacccgcctcggcgtctcaaagtgctgggattacaagcgtgagccaccgacccctgccgaggattctgccttttaccaatgcaggtgaaacatctggcaaggagacacctggagtgtaggtgttccttggtcttgaagacctagaggtggccatagagaggacagtggcctcaggtggggaactccccccccactctcattctgcaagtgcacaaactatcaaacatagcggactctggaactgggccaactcttcactgtatgcattagtgattgcagtgtttttttcttcttcagatatttgcatgttccctggattttgtattttttgataaagatatattcttgggccacagtagctggagatataatgccggaggattcttttttttttttttttttttgagacagagtctgtctctattgcctgggctggagtgcagtggcccaagctacgctcactgcaagctccacctcctgggttcacaccattctcctgcttcagtctcccgagtagctggaattacaagcacccgccaccacgcccaactaatattttgtatttttagtagagacgggggtttcaccgtgttagccaggatggtctcgatctcctgacttcgtgatcctcccgcctcggcctcccaaagtgctgggattacaggcgtgagccactgcacccagcctctttttttttttgagatggagtttcgctcttgttgcccaggctagagtgcaatggcatgatcttggctcactgcaacctccgcctcctaggttcaagcgattctcctgccccagcctcttgagtagctgggattacaggcacccacgaccatgcctggctaattgcatttttactagagacaggtttcaccatgttggccaggctggtctccaattcctgacctcaggtgatccacccgacttggcctcccaaagttctgggattacattttttttttaaagaaagaataaattaattgtgattaaagttgaaatcaaggcatagtctttccagtctaatttttactgtaatgcttgtatgtcaacagttatgaaggccaggcgcggtggctcacgcctgtaatcctagcagtttgggaggctgaggagggtggatcacttaaggtcaagagttcaagaccagcctggccaatatggtgaaaccccatctctactaaaaataccaaaaaaaaaaaaaaaaa

SEQ ID NO: 203826 - DNA, 2867 bp, Homo sapiens
  Payload ID: 20199
  Gene Name: zinc finger protein 785
  Uniprot ID: A8K8V0
  ENST ID: ENST00000470110
  CDS Start-End: 159-1331
aaaggcagagaggaaaggcgaggggtgttgacgccaggaaggttccatcttggttaagggcaggagtcccttacggacttgtctgaggaaagacaggaaagcgccagcatctccaccttccccggaagcctccctttgccaggcagaaagggtttcccatggggccgcccctggcgccgcgcccggcccacgtacccggggaggccgggccccggaggacgagggaaagcaggccgggcgccgtgagcttcgcggacgtggccgtgtacttctctcccgaggagtgggaatgcctgcggccagcgcagagggccctgtaccgggacgtgatgcgggagaccttcggccacctgggcgcgctgggattttcagttcccaaacccgcttttatctcgtgggtggaaggagaagtggaggcgtggagcccggaggcccaggatcccgacggatccagggatgggaatgaggagaaggaaaggctgaagaagtgtccaaaacaaaaagaggtggcgcatgaagtggctgtcaaggagtggtggcccagcgtcgcctgcccagagttctgcaaccctaggcagagccccatgaatccctggctcaaggacactctgacccgaagactgccccactcttgcccagactgtggccgcaacttcagctacccttccctcctggccagccaccagcgggtccactccggggagcggcccttctcctgcggccagtgtcaggcgcgtttctcccagcgcaggtacctgctccagcatcagttcatccacaccggcgagaagccctacccctgccccgactgcgggcgccgcttccgccagaggggttccctggctatccacaggcgggctcacaccggggagaagccttacgcgtgctcagactgcaagagtcgcttcacttacccctacctgctggccatccaccagcgcaagcacacgggcgagaagccctacagctgccccgattgcagcctccgtttcgcctacacctccctgctggccatccacaggcgcatacacaccggcgagaagccctacccctgtcctgactgcggccgccgcttcacctattcttccctcctcctcagtcaccggcgcattcactccgacagccggcccttcccctgcgtggagtgtgggaaaggcttcaagcgcaagaccgccctggaagcccatcggtggatccaccgctcctgcagcgagaggcgcgcgtggcagcaggccgtggtggggcgttcagagcccatccctgttttgggaggcaaggatcccccagttcacttccggcactttccagatatatttcaagagtgtgggtgatggcgttcacacaaactggtcagcgtttccctggagaggaagaggcaagatctgctagccctacttttgaagaggaaacttttgaaggaatgaacaaaagaggtaggtgggactaagcatttctgcattccaggactggtggtcagtgactcaaatatctctttgaaaagactgcttctttgaatccttgggttccaagataattaatgggaactggtgccgggcacggtggctcacacctgtgatcccagcactgtgggaggctgaggctggttaatcacttgaggtcaggagtttgagaccagctgggcaatatagtgaaaccccatctctaccaaaaaattagccaggcgtggtggcacatgcctgtagtcccagctactcaggaggctaaggcaagaggatcacttgagcctgggagacagaggttgcagtaagctgagatggctccattgcactccagcctgggctacaaagcaggactctgtctcaaaacaaaaacagatacaaaaactgggaacggggtgttatctttacttcaccacatagcctctcctgaattggtggacctggattcctagcttggctcagtccccactggctgtgtggcctttagcatcacctagattctacaaataacatttttctctatttgttttacacatgtcaatctgcctatccatccctctatccattcatttatccattttattaatgtatttcaaagtaagttgcagacatcattacatttcacttctaaacacttcagcatacagctgagttttatgcaagaaacttaagctctcagctgggtacagtggctcacacctgtaatcccagcactttgggaggctgaggcaggaggattgcatgagattgggagtttgagacgagcctggaaaacagcaagacctcatttctactaaaaattttaaaaattagccgagcatggtgggggagggtgaagaaggaggatagcttgagcccaggagtttgaggctatagtgagctatgatggcgccacttcagtctgagtaacagcaagacactattaaaaaaaaaaaagagccaggcgcagtggctcacacctgtaatcccagcactttggtaggccaaggtgggcagatcacctgaggtcaggagtttgagaccagcctgacgaacatggagaaaccctgtctctactaaaaaaaaagaaatacaaaattagccaggcatggtggcacatgcctgtaatcacagctactcgggaggctgaggcaggagaatcgtttgaccccaggaggcggaggttgcagtgagccaagatcgtgccattgcactccagcctgggcaacaagagtggaactctgtttcaaaaaagaaagaaagaaattcagctcccacttaaagttcagttgtactctgttattgacaagtaaagtcgattgaagcccagtcatctcctgtatgttgtgtgacttctcataattatctgatcaagagtcttgaagaaacatttacaatttgatgggcaataaaataatttgaaagcaa

SEQ ID NO: 203827 - DNA, 499 bp, Homo sapiens
  Payload ID: 20199
  Gene Name: zinc finger protein 785
  ENST ID: ENST00000562128
  CDS Start-End: 1-245
ccctcctcctcagtcaccggcgcattcactccgacagccggcccttcccctgcgtggagtgtgggaaaggcttcaagcgcaagaccgccctggaagcccatcggtggatccaccgctcctgcagcgagaggcgcgcgtggcagcaggccgtggtggggcgttcagagcccatccctgttttgggaggcaaggatcccccagttcacttccggcactttccagatatatttcaagagtgtgggtgatggcgttcacacaaactggtcagcgtttccctggagaggaagaggcaagatctgctagccctacttttgaagaggaaacttttgaaggaatgaacaaaagagtattcaccacatggagtgcagtgaggcagttccagaactcaaggtaataatgtaagcatattaataatatttaattattaacaattaataattaatcaattaataacatatgcatatgagatcagcaggagtcacactaaaagccaaaaagc

SEQ ID NO: 203828 - DNA, 566 bp, Homo sapiens
  Payload ID: 20199
  Gene Name: zinc finger protein 785
  ENST ID: ENST00000567773
  CDS Start-End: 1-210
tctcccgaggagtgggaatgcctgcggccagcgcagagggccctgtaccgggacgtgatgcgggagaccttcggccacctgggcgcgctgggtgaggccgggccctccggccgggacccccagattttcagttcccaaacccgcttttatctcgtgggtggaaggagaagtggaggcgtggagcccggaggcccaggatcccgacggtgagagctctgcagctttcagcaggggccaaggacaggaagcaggatccagggatgggaatgaggagaaggaaaggctgaagaagtgtccaaaacaaaaagaggtggcgcatgaagtggctgtcaaggagtggtggcccagcgtcgcctgcccagagttctgcaaccctaggcagagccccatgaatccctggctcaaggacactctgacccgaagactgccccactcttgcccagactgtggccgcaacttcagctacccttccctcctggccagccaccagcgggtccactccggggagcggcccttctcctgcggccagtgtcaggcgcgtttctcccagcgcaggtacctgctcc

SEQ ID NO: 203829 - DNA, 3144 bp, Homo sapiens
  Payload ID: 20200
  Gene Name: zinc finger protein 786
  ENST ID: ENST00000316286
  CDS Start-End: 274-2364
gctgcgtttgggggccacccgggctgtgcgtgggagtcgggttggggcggagcggaggggagtcagtgcgcagcagggcaggttcctgcggagccgccggagacggtcgggtttgccagggccgggcgggaccgcggggaccatggcggagccgcctcggatgatggacttccaaaaccagaactaatatcctggattgaacacgggggagagcccttcaggaaatggagagaatcacagaaatcaggaaacataatttgctcctctgttgatatgcattttgatccaggttttgaggaacagctgttttggggaagccagcaggctatgaattcaggaaaaactaaaagccatttccaattagatcctgaaagccagtgttcctttggatcctttgtttccttcaggcctgaccaaggcatcaccctcgggagcccacagagacacgacgccagggctcctccaccactagcctgcggccccagtgaatctaccctaaaagaaggaatcccaggtcccagaaatctggatcttcctggtttgtgggacgtccccgcctgggagagcacccagcacccttggcctgtctgcggggaaagctgttgggagaacaaccatttagtaatgcaccagagaggccactcaaaggaccggacacgtagggcctgggagaaattcaacaagagggcggagacgcagatgccgtggagcagccctcgggtacagaggcacttccggtgtggcgtgtgcggtaagagcttccgccggaagctgtgtctgctgcgccatctggcggcccacacggggaggggccccttccggaacgctgacggtgaaatgtgcttccgacacgagctgacccatcccagccaccgcctcccgcagcagggggagaagcctgcccagtgcaccccatgcggcaagcgctccctcccagtggacagcacgcaggctcgccggtgccagcacagccgggaggggccggcctcttggagagaaggccgcggggcctccagcagtgtgcactcgggacagaaaccaggctcgcgcctgccccaggaggggaacagccaccaggaaggggacacggaggcgctgcagcatggcgcagaggggccctgctcctgctcggagtgtggcgagcgctcccctatgagcgccaggctcgccagcccctgcagggcgcatactggagaaaagcccttccagtgtgcgcattgcaccaagcgcttccgcctgcgccgcctgctgcaggtccaccagcacgcgcacggtggggagagaccgttctcctgcaggaagtgtggcaagggcttcgccaagcagtgtaaactcacggagcacattcgagtccacagcggagagaagcctttccggtgtgccaagtgtggcaggaacttccgtcagaggggacagctgctgcggcaccagcggctgcacacggacgagaagccctttcagtgcccagagtgtgggctgagcttccgcctggagagcatgctgagagcccaccggctccggcacggtggggagaggccgttctcctgtagcgagtgtggcagaggcttcacccaccagtgcaagctccgtgagcacctgagagtgcacagcggggagaggcccttccagtgcctgaagtgcgacaagcgcttccgcctgaagggcatcctgaaggcccaccagcacacgcacagcaaggagaggccgttctcgtgcggggagtgtggcaagggcttcaccagacaatccaagctcacggagcacttgcgcgtgcacagcggggagagacccttccagtgcccagagtgcaacaggagcttccgcctgaaggggcagctgctcagccatcagcgcctgcacacgggagagaggcccttccagtgtccggagtgcgacaagcgctatcgcgtgaaggccgacatgaaggcccaccagctgctgcacagcggggagatgcctttctcctgtgagtgcggcaagggctttgtgaaacactcaaagctcatcgagcacatcagaacgcacacgggagagaagccttttcagtgtcccaagtgtgacaagagtttccgcctgaaggcgcagctgctcagccatcagggcctgcacacaggggagaggccttttcactgccctgagtgtgacaagaacttccgggaaaggggacacatgctgaggcaccagcgcatccacaggcccgagaggccctttgcctgtggcgattgtgggaagggcttcatttacaagtctaagcttgcggagcacatcagagtacacacaaaatcctgtcctgctccaaatgaactggacattaagaaaaggctcagccaactgtttgcaatgatagaggccgattggagttgaggcagagtgggacatccaaagcgttgagcaggattggtattgcccaggaatccacagcaacagtagccagacccgctggtagacgggttttaggagcaggtatccttctttgagcaagagtgtcatgcaagttaggaatatgaagaaccacaaaggattttctcttcagaagcatcaccaattatatttctttcttttttttttttttttccaagatggagttttgctctgtcacccaggctggagtgcagtggcgtgatcccagctatattggaaaagacagcattataaaacaaggacataattttatgaaaaaggaggcatctgcaaacgaaaacaatttctacgaggttatatgtgattgttaacatttttaagaaaaggtgcacacagaaatccagataagatgtgattacctttgtgcatttgtataaaaatatatgtgtgtaattataaggaagttctgacattttaaaaagtaattgttataaaagtaaatttaggccaggcacagtggttcatgcctgtaatcccagcacttgggaggccgtggcaggaggatcacgagccaaggagtttgagaccagcttgggcaacatggcaaaaccctgtctctactaaaaatacaaaaattagccaggcatggtggtacacaccagtagtcccagctactcctgaagctgaggtgggaggatcgcctgagcccagggaggtcaaggctgcagtgagcaatgatggtgccactgcactccagtatggatgacatagtatgacactgtc

SEQ ID NO: 203830 - DNA, 2792 bp, Homo sapiens
  Payload ID: 20200
  Gene Name: zinc finger protein 786
  ENST ID: ENST00000451334
  CDS Start-End: 231-1286
ggggcggagcggaggggagtcagtgcgcagcagggcaggttcctgcggagccgccggagacggtcgggtttgccagggccgggcgggaccgcggggaccatggcggagccgcctcggatgatggacttccaaaaccagaactaatatcctggattgaacacgggggagagcccttcaggaaatggagagaatcacagaaatcaggaaacataatttgctcctctgttgatatgcattttgatccaggttttgaggaacagctgttttggggaagccagcaggctatgaattcaggaaaaactaaaagccatttccaattagatcctgaaagccagtgttcctttggatcctttgtttccttcaggcctgaccaaggcatcaccctcgggagcccacagagacacgacgccagggctcctccaccactagcctgcggccccagtgaatctaccctaaaagaaggaatcccaggtcccagaaatctggatcttcctggtttgtgggacgtccccgcctgggagagcacccagcacccttggcctgtctgcggggaaagctgttgggagaacaaccatttagtaatgcaccagagaggccactcaaaggaccggacacgtagggcctgggagaaattcaacaagagggcggagacgcagatgccgtggagcagccctcgggtacagaggcacttccggtgtggcgtgtgcggtaagagcttccgccggaagctgtgtctgctgcgccatctggcggcccacacggggaggggccccttccggaacgctgacggtgaaatgtgcttccgacacgagctgacccatcccagccaccgcctcccgcagcagggggagaagcctgcccagtgcaccccatgcggcaagcgctccctcccagtggacagcacgcaggctcgccggtgccagcacagccgggaggggccggcctcttggagagaaggccgcggggcctccagcagtgtgcactcgggacagaaaccaggctcgcgcctgccccaggaggggaacagccaccaggaaggggacacggaggcgctgcagcatggcgcagaggggccctgctcctgctcggagtgtggcgagcgctcccctatgagcgccaggctcgccagcccctgcagggcgcatactggagaaaagcccttccagtgtgcgcattgcaccaagcgcttccgcctgcgccgcctgctgcaggtccaccagcacgcgcacggtggggagaccgttctcctgcaggaagtgtggcaagggcttcgccaagcagtgtaaactcacggagcacattcgagtccacagcggagagaagcctttccggtgtgccaagtgtggcaggaacttccgtcagaggggacagctgctgcggcaccagcggctgcacacggacgagaagccctttcagtgcccagagtgtgggctgagcttccgcctggagagcatgctgagagcccaccggctccggcacggtggggagaggccgttctcctgtagcgagtgtggcagaggcttcacccaccagtgcaagctccgtgagcacctgagagtgcacagcggggagaggcccttccagtgcctgaagtgcgacaagcgcttccgcctgaagggcatcctgaaggcccaccagcacacgcacagcaaggagaggccgttctcgtgcggggagtgtggcaagggcttcaccagacaatccaagctcacggagcacttgcgcgtgcacagcggggagagacccttccagtgcccagagtgcaacaggagcttccgcctgaaggggcagctgctcagccatcagcgcctgcacacgggagagaggcccttccagtgtccggagtgcgacaagcgctatcgcgtgaaggccgacatgaaggcccaccagctgctgcacagcggggagatgcctttctcctgtgagtgcggcaagggctttgtgaaacactcaaagctcatcgagcacatcagaacgcacacgggagagaagccttttcagtgtcccaagtgtgacaagagtttccgcctgaaggcgcagctgctcagccatcagggcctgcacacaggggagaggccttttcactgccctgagtgtgacaagaacttccgggaaaggggacacatgctgaggcaccagcgcatccacaggcccgagaggccctttgcctgtggcgattgtgggaagggcttcatttacaagtctaagcttgcggagcacatcagagtacacacaaaatcctgtcctgctccaaatgaactggacattaagaaaaggctcagccaactgtttgcaatgatagaggccgattggagttgaggcagagtgggacatccaaagcgttgagcaggattggtattgcccaggaatccacagcaacagtagccagacccgctggtagacgggttttaggagcaggtatccttctttgagcaagagtgtcatgcaagttaggaatatgaagaaccacaaaggattttctcttcagaagcatcaccaattatatttctttcttttttttttttttttccaagatggagttttgctctgtcacccaggctggagtgcagtggcgtgatcccagctatattggaaaagacagcattataaaacaaggacataattttatgaaaaaggaggcatctgcaaacgaaaacaatttctacgaggttatatgtgattgttaacatttttaagaaaaggtgcacacagaaatccagataagatgtgattacctttgtgcatttgtataaaaatatatgtgtgtaattataaggaagttctgacatttt

SEQ ID NO: 203831 - DNA, 2874 bp, Homo sapiens
  Payload ID: 20200
  Gene Name: zinc finger protein 786
  Uniprot ID: Q8N393
  ENST ID: ENST00000491431
  CDS Start-End: 66-2414
gcaggttcctgcggagccgccggagacggtcgggtttgccagggccgggcgggaccgcggggaccatggcggagccgcctcggctacctctgacttttgaggatgttgctatttatttctccgagcaagaatggcaggatctagaggcatggcagaaggaactttacaagcatgtgatgagaagcaattatgagactctcgtctctctagatgatggacttccaaaaccagaactaatatcctggattgaacacgggggagagcccttcaggaaatggagagaatcacagaaatcaggaaacataatttgctcctctgttgatatgcattttgatccaggttttgaggaacagctgttttggggaagccagcaggctatgaattcaggaaaaactaaaagccatttccaattagatcctgaaagccagtgttcctttggatcctttgtttccttcaggcctgaccaaggcatcaccctcgggagcccacagagacacgacgccagggctcctccaccactagcctgcggccccagtgaatctaccctaaaagaaggaatcccaggtcccagaaatctggatcttcctggtttgtgggacgtccccgcctgggagagcacccagcacccttggcctgtctgcggggaaagctgttgggagaacaaccatttagtaatgcaccagagaggccactcaaaggaccggacacgtagggcctgggagaaattcaacaagagggcggagacgcagatgccgtggagcagccctcgggtacagaggcacttccggtgtggcgtgtgcggtaagagcttccgccggaagctgtgtctgctgcgccatctggcggcccacacggggaggggccccttccggaacgctgacggtgaaatgtgcttccgacacgagctgacccatcccagccaccgcctcccgcagcagggggagaagcctgcccagtgcaccccatgcggcaagcgctccctcccagtggacagcacgcaggctcgccggtgccagcacagccgggaggggccggcctcttggagagaaggccgcggggcctccagcagtgtgcactcgggacagaaaccaggctcgcgcctgccccaggaggggaacagccaccaggaaggggacacggaggcgctgcagcatggcgcagaggggccctgctcctgctcggagtgtggcgagcgctcccctatgagcgccaggctcgccagcccctgcagggcgcatactggagaaaagcccttccagtgtgcgcattgcaccaagcgcttccgcctgcgccgcctgctgcaggtccaccagcacgcgcacggtggggagagaccgttctcctgcaggaagtgtggcaagggcttcgccaagcagtgtaaactcacggagcacattcgagtccacagcggagagaagcctttccggtgtgccaagtgtggcaggaacttccgtcagaggggacagctgctgcggcaccagcggctgcacacggacgagaagccctttcagtgcccagagtgtgggctgagcttccgcctggagagcatgctgagagcccaccggctccggcacggtggggagaggccgttctcctgtagcgagtgtggcagaggcttcacccaccagtgcaagctccgtgagcacctgagagtgcacagcggggagaggcccttccagtgcctgaagtgcgacaagcgcttccgcctgaagggcatcctgaaggcccaccagcacacgcacagcaaggagaggccgttctcgtgcggggagtgtggcaagggcttcaccagacaatccaagctcacggagcacttgcgcgtgcacagcggggagagacccttccagtgcccagagtgcaacaggagcttccgcctgaaggggcagctgctcagccatcagcgcctgcacacgggagagaggcccttccagtgtccggagtgcgacaagcgctatcgcgtgaaggccgacatgaaggcccaccagctgctgcacagcggggagatgcctttctcctgtgagtgcggcaagggctttgtgaaacactcaaagctcatcgagcacatcagaacgcacacgggagagaagccttttcagtgtcccaagtgtgacaagagtttccgcctgaaggcgcagctgctcagccatcagggcctgcacacaggggagaggccttttcactgccctgagtgtgacaagaacttccgggaaaggggacacatgctgaggcaccagcgcatccacaggcccgagaggccctttgcctgtggcgattgtgggaagggcttcatttacaagtctaagcttgcggagcacatcagagtacacacaaaatcctgtcctgctccaaatgaactggacattaagaaaaggctcagccaactgtttgcaatgatagaggccgattggagttgaggcagagtgggacatccaaagcgttgagcaggattggtattgcccaggaatccacagcaacagtagccagacccgctggtagacgggttttaggagcaggtatccttctttgagcaagagtgtcatgcaagttaggaatatgaagaaccacaaaggattttctcttcagaagcatcaccaattatatttctttcttttttttttttttttccaagatggagttttgctctgtcacccaggctggagtgcagtggcgtgatcccagctatattggaaaagacagcattataaaacaaggacataattttatgaaaaaggaggcatctgcaaacgaaaacaatttctacgaggttatatgtgattgttaacatttttaagaaaaggtgcacacagaaatccagataagatgtgattacctttgtgcatttgtataaaaatatatgtgtgtaattataaggaa

SEQ ID NO: 203832 - DNA, 1657 bp, Homo sapiens
  Payload ID: 20201
  Gene Name: zinc finger protein 787
  ENST ID: ENST00000587279
  CDS Start-End: 90-470
gccgctgccgccgctgccaccatccgcgaggcaggagagaggaggaggagtgcggcgcggcggccccgggaccaaggagggacccagacatggagctgcgggaagaagcctggtctccggggccgctggattctgaggaccagcagatggccagtcacgagaacccaggtgagcagccagaggccttcccagccgaccccgctgcctcccacctgaccctggcttcctttgcctctgggtgggaggaaaccccccttccctgttttcccctcttggggccctgggaccacccgaccctggcctcccctcccgccctgggccttgcactcctggctgtagagggagggctagtgttgtggctccaagtttcctttctgctggatgatcttggggacccctgggggccaccttctctgcctgacttcctctgtccttgcccctccagcctgggcagcacccccgtctgttgagggtgcccccttcctctccccacagccccgcctccacatcctggaccctctgctatgattccaggcgggcctgtggccctccctggcaggaaactccttacaccaggggtggcccaggagcgcagggaacccgcaggctgatgccgacttttcagggaaagctcaggagtgcagggaacccgcaggctgacgcagacttttcagggaaagttgtcagtttgggtttttatgtgaaatccttcactttttggacattggcaatgtgttttgtttgtttaataaagcattattggggttgagcaaaactcatttgtgggctacgtggggcccaggtttgcttgcgaaggccccatggtgacctcactgtggcccctgacacctcatggcctccctcccctccacggaggccgcctccctgcctcagacctgaggaataaggtgcggcagcttctctccttgctgtgtctgcatgtcaggccccaggtcccaggcccacgctggccccacgctggccggggctcagcagaccttttctgcagagagccagagaggaaatactgttcatcttgcaggctgcgggcctcacagataccacgcagccacagtccacacggaaatgcgtgggcacacttgatgcagaaaggccggcagagcttgccagctcaggctggcatagctgagtcgtcccatacaaagaccggggtgaagtttgggatcgattttgtaaagcacctcagcccctttttgagtgatttctgagatctgtggatggagcatgaacagaagctccctgtgggcggggctgtggcagccttggtcccggggtagaaactatgatgggggttttgagtgcgttgccaggaccgcatgcccagggggcccacaccccggccccaggctgccccgcgtctcagtgggtggttgccatcccgcaccgccacagccctcgagggctgcccctgccttctccctcgcatacatccttggccttcgaaccttttcgaaaattaattctgtggaaatctcaagtgtgtggacgcagtgtgatgaatccctcttcctgcgccagcgattcgcggcactgctggtccctttctgcccactgtggttctctttccacagcgttttagagaaaatatccatcacatcattttgtctgtaaattctccaacatgtaaggactcctt

SEQ ID NO: 203833 - DNA, 386 bp, Homo sapiens
  Payload ID: 20201
  Gene Name: zinc finger protein 787
  ENST ID: ENST00000586787
  CDS Start-End: 268-386
aactggcggtggttgtagcccttgagggtccttgagtccttcctgcggctgtgtgaggccttggctggcccctgcagtggggagcggccaggctagctccaggccagttctcggtgtcctggggtaggtgctgtgtgccttgtctgccgggcgctgtgcctgtcacgccggggtctgcaggctgcctccctgcagggccctcggtgcagcctggcaccccataaactctgtccttctgtctcatccccttctaacagggacccagacatggagctgcgggaagaagcctggtctccggggccgctggattctgaggaccagcagatggccagtcacgagaacccagtggacatcctcatcatggatgatgacgacgtccccagctg

SEQ ID NO: 203834 - DNA, 1925 bp, Homo sapiens
  Payload ID: 20201
  Gene Name: zinc finger protein 787
  ENST ID: ENST00000610935
  CDS Start-End: 120-1268
gcccgtccccctgaccccagggtctgagtcgccgctgccgccgctgccaccatccgcgaggcaggagagaggaggaggagtgcggcgcggcggccccgggaccaaggagggacccagacatggagctgcgggaagaagcctggtctccggggccgctggattctgaggaccagcagatggccagtcacgagaacccagtggacatcctcatcatggatgatgacgacgtccccagctggcctcccaccaagctgtccccgccccagtctgcgcccccagccggcccgcctccccggccgcggccgcccgccccctacatctgcaacgagtgtggcaagagctttagccactggtccaagctgacgcggcaccagcgcacgcacaccggcgagcggcccaacgcctgcgccgactgcggcaagaccttctcgcagagctcgcacctggtgcagcaccggcgcatccacacgggcgagaagccctacgcctgcttggagtgcggcaagcgcttcagctggagctccaacctcatgcagcaccagcgcatccacacgggcgagaagccctacacctgccccgactgcggccgcagcttcactcagagcaagagcctggccaagcaccggcgctcgcacagcggcctcaagcccttcgtgtgcccgcgctgcggccgcggcttcagccagcccaagagcctcgcgcgtcacctgcggctgcacccggagctgtcggggcctggcgtggcggccaaggtgctggcggctagcgtccggcgggccaaggggcccgaagaggcggtggcggcggacggcgagatcgccatccccgtgggcgatggcgagggcatcatcgtggtgggcgcgccgggcgagggggccgcggccgcggcagccatggcgggcgcgggggcaaaggccgcggggccccggtcgcggcgcgccccggcccccaagccgtacgtgtgtctggagtgcgggaagggcttcgggcacggggccgggctcctggcgcaccagcgggcccagcacggggacgggctcggggcggcggggggcgaggagccggcccacatctgcgtggagtgcggggagggcttcgtgcagggcgccgcgctccggagacacaagaagatccacgcggtgggcgcgccctcggtctgcagcagctgcggacagagctactaccgcgcgggcggggaggaggaggacgacgacgacgaggccgcgggcgggcggtgccccgagtgccgcggtggggagggccggtaggggaggggcccgggggggggggcgggcagggcccctcgggcttggcgggagcgacgacgtgcaagaccaagagacccagggagaagcggacggggtgcgatggaccccgcggcatccccggctccccgccctcctctgtccctgcgccgtccgtgggggggcactggggcgtattagggcccgttcacttctccgcctcgagactctgccccctcagcctggcccgcccttcctaagttatcggcctgcgagccggagagacaatggagagaactgcagaggccgagtggcgaccaggccccaagcggaaggccattttccctgctcttcctcagttgtccggggcgggggtggggggtgctgcgaggaatggagaaaccaggccctttagaggatcccagagagggaagagaaccaggggcccttttctcttttagaattttcttttaatcagcccaccttttgactccccgcccgccccaatccattatttttttctgccttccgggtcccatccttagagctcgagtcgttccttcccctcctggattccgggtagcagaggcagcgccgcaggaggcgggtgcccgtttgtcccaggcctgggcgtggtggaggaaggggtgctggaacaataaacggcactatccaaatgtc

SEQ ID NO: 203835 - DNA, 1654 bp, Homo sapiens
  Payload ID: 20202
  Gene Name: zinc finger protein 789
  Uniprot ID: Q5FWF6
  ENST ID: ENST00000331410
  CDS Start-End: 271-1548
agaggggccgctggctgggacgcttcgctcggcgcgcgcaggtggagccagcgagaggctctgaggctgccagagtggttgtgtctgttcctccggtaaggggtgattcgccgaggggcgcggaccagacagacctcgggtcaggcccgggaaccccgagaggagagcccagcccctggtggaggcggcttggcggagattcggagccgtcagcagctcagccagacgtccaggatcccaccccttgcaaaagaccaggccgtggaagccatgttcccaccagccagggggaaggagctgctctcgtttgaggatgtggcgatgtacttcaccagagaggagtggggccacctcaactggggtcagaaggacctctaccgagatgtgatgttggagaactacaggaacatggtcttgctgggatttcagtttcccaaacctgagatgatctgtcagctggagaactgggacgagcagtggatcctggatctaccgagaactgggaataggaaggcttccggtagtgcttgcccaggttctgaagccagacacaagatgaaaaagctaactccaaaacagaaattttctgaagatttagagtcatataagatatcagtggtaatgcaggaatcagctgagaaactttcagaaaagttacataagtgtaaagaatttgtggacagttgcaggcttactttccctactagtggtgatgaatacagcaggggcttccttcaaaaccttaaccttattcaagatcagaatgcgcaaacaaggtggaagcagggcagatatgatgaggatggcaaacccttcaatcaaagatctttgcttttggggcatgagcgaattctcacaagagcaaagtcttatgaatgcagtgaatgtggaaaagtcattaggcgtaaggcatggtttgatcaacatcaaagaattcactttttagagaatccttttgagtgtaaggtctgtgggcaagccttcagacagcggtcagctcttacggtccataaacagtgtcacctgcaaaacaagccatacagatgtcatgactgtggaaagtgttttcggcagctcgcgtatcttgttgaacataagaggattcacaccaaagaaaaaccttataaatgtagcaaatgtgaaaaaacgtttagtcagaattcaacccttattcgacatcaggtgatccatagtggagaaaaacgccataaatgccttgagtgtggaaaagcctttggccggcattcaacccttctatgtcatcaacagattcacagtaaaccgaacacccataaatgcagtgaatgtggacagtcctttggtaggaatgtggatctcattcagcatcaaagaatccatacaaaggaggaattctttcaatgtggagaatgtgggaaaacgtttagttttaagaggaatctttttcgacatcaggtcattcacactggaagccaaccctaccaatgtgtcatatgtggaaaatctttcaagtggcacacaagctttattaagcaccagggcactcacaaaggacagatatccacatgatgttaattggaaagcagtcattggagaactagaacttataaacctctacttcaagtgtgtatcacgtaattgtttccatgaaaagcaataaatgtaacaaagggtt

SEQ ID NO: 203836 - DNA, 510 bp, Homo sapiens
  Payload ID: 20202
  Gene Name: zinc finger protein 789
  Uniprot ID: Q5FWF6
  ENST ID: ENST00000379724
  CDS Start-End: 200-388
agagtggttgtgtctgttcctccggtaaggggtgattcgccgaggggcgcggaccagacagacctcgggtcaggcccgggaaccccgagaggagagcccagcccctggtggaggcggcttggcggagattcggagccgtcagcagctcagccagacgtccaggatcccaccccttgcaaaagaccaggccgtggaagccatgttcccaccagccagggggaaggagctgctctcgtttgaggatgtggcgatgtacttcaccagagaggagtggggccacctcaactggggtcagaaggacctctaccgagatgtgatgttggagaactacaggaacatggtcttgctggtttatttccagtttgatgctgcaataccactgtgctgaacgtctctggcacattcatcttggttgcaattgtactttaggctatatttctaagagcgaaatgaccacagccaaaggtatgaacattgttcaggctttcaataaagactgccagatattta

SEQ ID NO: 203837 - DNA, 842 bp, Homo sapiens
  Payload ID: 20202
  Gene Name: zinc finger protein 789
  ENST ID: ENST00000447047
  CDS Start-End: 305-472
cagagtggttgtgtctgttcctccggtaaggggtgattcgccgaggggcgcggaccagacagacctcgggtcaggcccgggaaccccgagaggagagcccagcccctggtggaggcggcttggcggagattcggagccgtcagcagctcagccagacgtccaggatcccaccccttgcaaaagaccaggccgtggaagccatgttcccaccagccagggggaaggtgcgggaatgcagatggctgagtaggtcagattgaggacatggcagcgcagctctggtaaaagagtgacactctggataatggagctgctctcgtttgaggatgtggcgatgtacttcaccagagaggagtggggccacctcaactggggtcagaaggacctctaccgagatgtgatgttggagaactacaggaacatggtcttgctggtttatttccagtttgatgctgcaataccactgtgctgaacgtctctggcacattcatcttggttgcaattgtactttaggctatatttctaagagtgaaatgaccacagccaaaggatttcagtttcccaaacctgagatgatctgtcagctggagaactgggacgagcagtggatcctggatctaccgagaactgggaataggaaggcttccggtagtgcttgcccaggttctgaagccagacacaagatgaaaaagctaactccaaaacagaaattttctgaagatttagagtcatataagatatcagtggtaatgcaggaatcagctgagaaactttcagaaaagttacataagtgtaaagaatttgtggacagttgcaggcttactttccctactagtggtgat

SEQ ID NO: 203838 - DNA, 1055 bp, Homo sapiens
  Payload ID: 20202
  Gene Name: zinc finger protein 789
  ENST ID: ENST00000448667
  CDS Start-End: 326-682
agcgagaggctctgaggctgccagagtggttgtgtctgttcctccggtaaggggtgattcgccgaggggcgcggaccagacagacctcgggtcaggcccgggaaccccgagaggagagcccagcccctggtggaggcggcttggcggagattcggagccgtcagcagctcagccagacgtccaggatcccaccccttgcaaaagaccaggccgtggaagccatgttcccaccagccagggggaaggtgcgggaatgcagatggctgagtaggtcagattgaggacatggcagcgcagctctggtaaaagagtgacactctggataatggagctgctctcgtttgaggatgtggcgatgtacttcaccagagaggagtggggccacctcaactggggtcagaaggacctctaccgagatgtgatgttggagaactacaggaacatggtcttgctgggatttcagtttcccaaacctgagatgatctgtcagctggagaactgggacgagcagtggatcctggatctaccgagaactgggaataggaaggcttccggtagtgcttgcccagctgctcctgtttttcacatccaaggtttctcctccatggcactactgacgttttgggctgacgaattctttggggacaggatggggcatgtcctgtgcattttaggatgttgagtagcagccctggcctgcatccactagatgccagttgaacctccccaggttctgaagccagacacaagatgaaaaagctaactccaaaacagaaattttctgaagatttagagtcatataagatatcagtggtaatgcaggaatcagctgagaaactttcagaaaagttacataagtgtaaagaatttgtggacagttgcaggcttactttccctactagtggtgatgaatacagcaggggcttccttcaaaaccttaaccttattcaagatcagaatgcgcaaacaaggtggaagcagggcagatatgatgaggatggcaaacccttcaatcaaagatctttgcttttggggcatgagcgaattctcacaag

SEQ ID NO: 203839 - DNA, 2994 bp, Homo sapiens
  Payload ID: 20202
  Gene Name: zinc finger protein 789
  ENST ID: ENST00000483089
  CDS Start-End: 326-496
agcgagaggctctgaggctgccagagtggttgtgtctgttcctccggtaaggggtgattcgccgaggggcgcggaccagacagacctcgggtcaggcccgggaaccccgagaggagagcccagcccctggtggaggcggcttggcggagattcggagccgtcagcagctcagccagacgtccaggatcccaccccttgcaaaagaccaggccgtggaagccatgttcccaccagccagggggaaggtgcgggaatgcagatggctgagtaggtcagattgaggacatggcagcgcagctctggtaaaagagtgacactctggataatggagctgctctcgtttgaggatgtggcgatgtacttcaccagagaggagtggggccacctcaactggggtcagaaggacctctaccgagatgtgatgttggagaactacaggaacatggtcttgctgggtaggacacggcttgaagattgggctttgtctgtgttctgagtgtctgtgcaagcccttagtcccttatctgcaattccagaatcagaaaaagcggtgaaaaccgaaaggtttttttataactcgtgtggctacaagccctgaccagacatcaccacagtgaaacctgacttcatcctataggaaaccatttattgtctttatttttccaacttggtgtgcatatctgtatacccaacttcagaaataacagtgtaggccaggtgcggtggctcacacctgtaatcccagcactttgggattccgaggcgggtggatcacatgaggtcagtagtttgagaccagcctggccaatatggtgaaacccagctctacttaagatgcgaaaattagcctggtgtggtggtgcacgcttgtagtcccagttacttgggaggctgaggcaggagaatcgcttgaacccgggaggcagaggttgcattgagccgagatcatgccgctgcattccagcctgggtgacagagcgagactccgtctcaaaacaaaacaaaacaacaacaaaaataacagtgtatttgagggcaccactccaaaccctactggggatgatacgttatgtaaaatatttacaccaggtcacctttctgaaatgggaaaaattctgactcctgaaacacatctggtcctaagggtttcacataagggactggggacagtgaatagtcgtgttgtgttagggctcagaccgagacacttcatgcattcttcactctcacctcgtgttcctcatctgtaagacctccaggagttgagaattatggtagatttacattccaaaggctcacttcttatgctcttgaaagtctttttctttcttttctctggaaatgggtaacttcttggtgtgtaacattagtgggtgctcaggaaatgattttcaaccaacttcatttctgaaccttcactgcttccattcttttcaggagcctaccctgtcctagtccactgtagtctcccactgtgggagttgccttgctaaatagttttctttccggggtcacatgtttaacccttgcactgacactcttagcacagagtcttgaccacctctgtgggactgtccacccacctctggatttttataattttaattttccctttaaaagcattacaggagcatacataagtacatggaaggcatagaaaaggaggagaagaggaaagtgttcatgggtaacactgttaatattttggaaggtttcctgccagtctttttttcctatgcctttacaaaagtagctgagcatattctatgtgcaatcctgtaatctgttttaaatgtaacattattgtatcagcatttccccacataatcagtaaacgagcataatataattccattgtgtggtccataaaaatatttcattgttttcccatgtggggacattgagcttgcctttgtttgttcgttggtttgcttgtgtatttataatgtttgaatagatgtttgagtataaatctttgcatgaatttttgatcatttcccaagatactttcccaaaatcagaattttgaagttaaatgagatggcactttaatctttattgattactgaatgattcttcaacaaactttgtactgttttgcatatccaatagtaacattttagagtgcttctttttttttttgagacagagtttcgctcttgttgcccaggcaggagtacaatggcaggatctcagctcaccacaacctctgcctccccggttcaagtgattctcctgcctcagactcctgagtagctgggattacaggcatgtgccaccacacctagctaattttgtatttttagtagagacggggtttcgccatgttggtcaggctggtctcaaactcccgatctcgggtgacccgcccacctcagcctcccaaagtgctgggattacaggtgtgagccactgcacccagctgagagtgcttctttactatatcactgccttcttttatggattttactagttctaaaaataattttcattacagaaattttggaaaatacatcagtaaatagagtagataataaaaatcacctgcaggcctactttccagaagtaactcttgttattaacattttggtttactttttcccagtccgtctatgtgtctattacagggaaagaatcccttatccaaaatgctggggaccaaaagtgttttggatttcggatttttcttttttggattttggaatactcataaatatataataagataatttgaggatctgacaagaaattcacttatgtttcatatacaccttagacatgtagcttcttcaagctacgcttgatttaattgttcccttttgatattcagtttatttccagtttgatgctgcaataccactgtgctgaacgtctctggcacattcatcttggttgcaattgtactttaggctatatttctaagagcgaaatgaccacagccaaaggtatgaacattgttcaggctttcaataaagactgccagatatttacaaa

SEQ ID NO: 203840 - DNA, 556 bp, Homo sapiens
  Payload ID: 20202
  Gene Name: zinc finger protein 789
  ENST ID: ENST00000493485
  CDS Start-End: 323-493
gagaggctctgaggctgccagagtggttgtgtctgttcctccggtaaggggtgattcgccgaggggcgcggaccagacagacctcgggtcaggcccgggaaccccgagaggagagcccagcccctggtggaggcggcttggcggagattcggagccgtcagcagctcagccagacgtccaggatcccaccccttgcaaaagaccaggccgtggaagccatgttcccaccagccagggggaaggtgcgggaatgcagatggctgagtaggtcagattgaggacatggcagcgcagctctggtaaaagagtgacactctggataatggagctgctctcgtttgaggatgtggcgatgtacttcaccagagaggagtggggccacctcaactggggtcagaaggacctctaccgagatgtgatgttggagaactacaggaacatggtcttgctggatgctgcaatttcacagcagttccttccttcgcgcctgtaaaacagtggcaacagtaactcttctcctgcctgcccatcaactttgtaaactgcgcggggcgta

SEQ ID NO: 203841 - DNA, 2078 bp, Homo sapiens
  Payload ID: 20203
  Gene Name: zinc finger protein 79
  Uniprot ID: Q15937
  ENST ID: ENST00000342483
  CDS Start-End: 407-1903
aatcaggcgcgtccctctggcgctggagccaggacctggcgttgggcggtacttggacagcggttcttgagctctcgcggttgccggtagattgttgccagttgccagttgccagtcgtttttcggaaagctggcagcggctttttcaccgggttctgcttgaggccgagccaaagagtggctgtgactcgggagacggagtggaacacccggctgggcaggcccggacagctcccgcgacccagcaccgcaggatcagaccgtgcctctgcggggagaggctggagaggaagagtccggcctgggagccgtcagagcagccctgcagaacggggtgggggctgctgtagatagacccttacgcccagagaactgctgggaggctgtggcgcgaggcgggactcaaatgctggaggaaggagtactgccttccccaggccctgcccttccccaagaggaaaacacaggagaggaaggaatggctgctggtctcctcacagctgggccccggggatccacattcttcagcagtgtgacggtagcttttgcacaggaaaggtggaggtgcctcgtgtctactccacgggacaggttcaaggaggggataccaggaaagtccaggagccttgtcctactaggacttccagtttcccagcctggcatgaactcccagttggaacaaagggaaggcgcatggatgctggagggcgaagacctgcgaagtccctctccaggctggaagattatatctggatcaccaccagagcaagccctttctgaagcttcattccaagacccatgtgtagagatgccccctggggattcagaccacgggaccagtgaccttgagaagagcttcaatctgagaccagtcctctctccgcaacagagagtgcccgtggaagcgagacctcgcaaatgtgagacacacaccgagagcttcaagaactcggaaatcctgaaacctcacagagcaaaaccatatgcatgtaatgaatgtggcaaagccttcagttactgttcttccctttctcagcatcagaagagccacactggagagaagccctatgagtgcagtgaatgtgggaaggccttcagccagagctcatctctcattcagcaccagaggattcacactggagagaagccttacaagtgcagtgaatgtggaagagccttcagccagaacgccaacctcaccaaacaccagcgaacccacaccggagagaagccctacagatgcagcgagtgtgagaaagccttcagtgactgctcagctcttgttcagcatcagagaattcataccggagagaagccctacgaatgcagcgactgtgggaaggccttccgtcacagtgcaaacctcacgaaccatcagaggactcacaccggggagaagccctacaagtgcagcgagtgtgggaaggccttcagttactgcgcagcgttcattcagcaccagaggattcacaccggggagaagccctacagatgtgccgcgtgtgggaaggccttcagccagagtgcaaacctcacaaaccatcagaggactcacactggggagaaaccctacaagtgcagcgagtgtgggaaggccttcagccagagtaccaatctcataatccaccaaaagacccacaccggggagaagccatataaatgtaatgaatgtgggaaattcttcagtgagagctcagccctcattcggcatcatataatccacaccggagaaaaaccttatgagtgtaatgagtgtggtaaagcgtttaaccagagctcatcccttagtcagcatcagagaatccacacaggcgtgaaaccctacgaatgcagcgagtgtgggaaggccttccggtgcagctctgccttcgttagacatcagagactccacgccggagagtaactaggaacatggtagaagtggagagagtcccggacatgccgactcaggacaggtgggtgaggatctgagaaatgctaaaggcttgaaagcatctgaagacatctaacttagagtctgcagcccagagccacatgcaaaacaccttcaataaacagccactatttcacatgctgta

SEQ ID NO: 203842 - DNA, 2194 bp, Homo sapiens
  Payload ID: 20203
  Gene Name: zinc finger protein 79
  ENST ID: ENST00000543471
  CDS Start-End: 596-2020
gtggcgccaatcaggcgcgtccctctggcgctggagccaggacctggcgttgggcggtacttggacagcggttcttgagctctcgcggttgccggtagattgttgccagttgccagttgccagtcgtttttcggaaagctggcagcggctttttcaccgggttctgcttgaggccgagccaaagagtggctgtgactcgggagacggagtggaacacccggctgggcaggcccggacagctcccgcgacccagcaccgcaggatcagaccgtgcctctgcggggagaggctggagaggaagagtccggcctgggagccgtcagagcagccctgcagaacggggtgggggctgctgtagatagacccttacgcccagagaactgctgggaggctgtggcgcgaggcgggactcaaatgctggaggaaggagatgagaaaaatgagacttagagaggttacgtgatttgcacactgctgctgagtggtggatcatggatacttgagagtctgtgaacactctaatgcctccctacatctgatactgccttccccaggccctgcccttccccaagaggaaaacacaggagaggaaggaatggctgctggtctcctcacagctgggccccggggatccacattcttcagcagtgtgacggtagcttttgcacaggaaaggtggaggtgcctcgtgtctactccacgggacaggttcaaggaggggataccaggaaagtccaggagccttgtcctactaggacttccagtttcccagcctggcatgaactcccagttggaacaaagggaaggcgcatggatgctggagggcgaagacctgcgaagtccctctccaggctggaagattatatctggatcaccaccagagcaagccctttctgaagcttcattccaagacccatgtgtagagatgccccctggggattcagaccacgggaccagtgaccttgagaagagcttcaatctgagaccagtcctctctccgcaacagagagtgcccgtggaagcgagacctcgcaaatgtgagacacacaccgagagcttcaagaactcggaaatcctgaaacctcacagagcaaaaccatatgcatgtaatgaatgtggcaaagccttcagttactgttcttccctttctcagcatcagaagagccacactggagagaagccctatgagtgcagtgaatgtgggaaggccttcagccagagctcatctctcattcagcaccagaggattcacactggagagaagccttacaagtgcagtgaatgtggaagagccttcagccagaacgccaacctcaccaaacaccagcgaacccacaccggagagaagccctacagatgcagcgagtgtgagaaagccttcagtgactgctcagctcttgttcagcatcagagaattcataccggagagaagccctacgaatgcagcgactgtgggaaggccttccgtcacagtgcaaacctcacgaaccatcagaggactcacaccggggagaagccctacaagtgcagcgagtgtgggaaggccttcagttactgcgcagcgttcattcagcaccagaggattcacaccggggagaagccctacagatgtgccgcgtgtgggaaggccttcagccagagtgcaaacctcacaaaccatcagaggactcacactggggagaaaccctacaagtgcagcgagtgtgggaaggccttcagccagagtaccaatctcataatccaccaaaagacccacaccggggagaagccatataaatgtaatgaatgtgggaaattcttcagtgagagctcagccctcattcggcatcatataatccacaccggagaaaaaccttatgagtgtaatgagtgtggtaaagcgtttaaccagagctcatcccttagtcagcatcagagaatccacacaggcgtgaaaccctacgaatgcagcgagtgtgggaaggccttccggtgcagctctgccttcgttagacatcagagactccacgccggagagtaactaggaacatggtagaagtggagagagtcccggacatgccgactcaggacaggtgggtgaggatctgagaaatgctaaaggcttgaaagcatctgaagacatctaacttagagtctgcagcccagagccacatgcaaaacaccttcaataaacagccactatttcacatgctgt

SEQ ID NO: 203843 - DNA, 2192 bp, Homo sapiens
  Payload ID: 20203
  Gene Name: zinc finger protein 79
  ENST ID: ENST00000612342
  CDS Start-End: 594-2018
gtggcgccaatcaggcgcgtccctctggcgctggagccaggacctggcgttgggcggtacttggacagcggttcttgagctctcgcggttgccggtagattgttgccagttgccagttgccagtcgtttttcggaaagctggcagcggctttttcaccgggttctgcttgaggccgagccaaagagtggctgtgactcgggagacggagtggaacacccggctgggcaggcccggacagctcccgcgacccagcaccgcaggatcagaccgtgcctctgcggggagaggctggagaggaagagtccggcctgggagccgtcagagcagccctgcagaacggggtgggggctgctgtagatagacccttacgcccagagaactgctgggaggctgtggcgcgaggcgggactcaaatgctggaggaaggaggtgaggagtggtagagggagcgattgtcaagagatcggctgctgcttcgtttgcccacgactgccgctgtgtgagccgaatcagaactctctttatctctcctacagtactgccttccccaggccctgcccttccccaagaggaaaacacaggagaggaaggaatggctgctggtctcctcacagctgggccccggggatccacattcttcagcagtgtgacggtagcttttgcacaggaaaggtggaggtgcctcgtgtctactccacgggacaggttcaaggaggggataccaggaaagtccaggagccttgtcctactaggacttccagtttcccagcctggcatgaactcccagttggaacaaagggaaggcgcatggatgctggagggcgaagacctgcgaagtccctctccaggctggaagattatatctggatcaccaccagagcaagccctttctgaagcttcattccaagacccatgtgtagagatgccccctggggattcagaccacgggaccagtgaccttgagaagagcttcaatctgagaccagtcctctctccgcaacagagagtgcccgtggaagcgagacctcgcaaatgtgagacacacaccgagagcttcaagaactcggaaatcctgaaacctcacagagcaaaaccatatgcatgtaatgaatgtggcaaagccttcagttactgttcttccctttctcagcatcagaagagccacactggagagaagccctatgagtgcagtgaatgtgggaaggccttcagccagagctcatctctcattcagcaccagaggattcacactggagagaagccttacaagtgcagtgaatgtggaagagccttcagccagaacgccaacctcaccaaacaccagcgaacccacaccggagagaagccctacagatgcagcgagtgtgagaaagccttcagtgactgctcagctcttgttcagcatcagagaattcataccggagagaagccctacgaatgcagcgactgtgggaaggccttccgtcacagtgcaaacctcacgaaccatcagaggactcacaccggggagaagccctacaagtgcagcgagtgtgggaaggccttcagttactgcgcagcgttcattcagcaccagaggattcacaccggggagaagccctacagatgtgccgcgtgtgggaaggccttcagccagagtgcaaacctcacaaaccatcagaggactcacactggggagaaaccctacaagtgcagcgagtgtgggaaggccttcagccagagtaccaatctcataatccaccaaaagacccacaccggggagaagccatataaatgtaatgaatgtgggaaattcttcagtgagagctcagccctcattcggcatcatataatccacaccggagaaaaaccttatgagtgtaatgagtgtggtaaagcgtttaaccagagctcatcccttagtcagcatcagagaatccacacaggcgtgaaaccctacgaatgcagcgagtgtgggaaggccttccggtgcagctctgccttcgttagacatcagagactccacgccggagagtaactaggaacatggtagaagtggagagagtcccggacatgccgactcaggacaggtgggtgaggatctgagaaatgctaaaggcttgaaagcatctgaagacatctaacttagagtctgcagcccagagccacatgcaaaacaccttcaataaacagccactatttcacatgctgt

SEQ ID NO: 203844 - DNA, 1969 bp, Homo sapiens
  Payload ID: 20203
  Gene Name: zinc finger protein 79
  ENST ID: ENST00000617266
  CDS Start-End: 701-1795
gtggcgccaatcaggcgcgtccctctggcgctggagccaggacctggcgttgggcggtacttggacagcggttcttgagctctcgcggttgccggtagattgttgccagttgccagttgccagtcgtttttcggaaagctggcagcggctttttcaccgggttctgcttgaggccgagccaaagagtggctgtgactcgggagacggagtggaacacccggctgggcaggcccggacagctcccgcgacccagcaccgcaggatcagaccgtgcctctgcggggagaggctggagaggaagagtccggcctgggagccgtcagagcagccctgcagaacggggtgggggctgctgtagatagacccttacgcccagagaactgctgggaggctgtggcgcgaggcgggactcaaatgctggaggaaggaggtgaggagtggtagagggagcgattgtcaagagatcggctgctgcttcgtttgcccacgactgccgctgtgtgagccgaatcagaactctctttatctctcctacagtactgccttccccaggccctgcccttccccaagaggaaaacacaggagaggaaggaatggctgctggtctcctcacagctgggccccgggctggaagattatatctggatcaccaccagagcaagccctttctgaagcttcattccaagacccatgtgtagagatgccccctggggattcagaccacgggaccagtgaccttgagaagagcttcaatctgagaccagtcctctctccgcaacagagagtgcccgtggaagcgagacctcgcaaatgtgagacacacaccgagagcttcaagaactcggaaatcctgaaacctcacagagcaaaaccatatgcatgtaatgaatgtggcaaagccttcagttactgttcttccctttctcagcatcagaagagccacactggagagaagccctatgagtgcagtgaatgtgggaaggccttcagccagagctcatctctcattcagcaccagaggattcacactggagagaagccttacaagtgcagtgaatgtggaagagccttcagccagaacgccaacctcaccaaacaccagcgaacccacaccggagagaagccctacagatgcagcgagtgtgagaaagccttcagtgactgctcagctcttgttcagcatcagagaattcataccggagagaagccctacgaatgcagcgactgtgggaaggccttccgtcacagtgcaaacctcacgaaccatcagaggactcacaccggggagaagccctacaagtgcagcgagtgtgggaaggccttcagttactgcgcagcgttcattcagcaccagaggattcacaccggggagaagccctacagatgtgccgcgtgtgggaaggccttcagccagagtgcaaacctcacaaaccatcagaggactcacactggggagaaaccctacaagtgcagcgagtgtgggaaggccttcagccagagtaccaatctcataatccaccaaaagacccacaccggggagaagccatataaatgtaatgaatgtgggaaattcttcagtgagagctcagccctcattcggcatcatataatccacaccggagaaaaaccttatgagtgtaatgagtgtggtaaagcgtttaaccagagctcatcccttagtcagcatcagagaatccacacaggcgtgaaaccctacgaatgcagcgagtgtgggaaggccttccggtgcagctctgccttcgttagacatcagagactccacgccggagagtaactaggaacatggtagaagtggagagagtcccggacatgccgactcaggacaggtgggtgaggatctgagaaatgctaaaggcttgaaagcatctgaagacatctaacttagagtctgcagcccagagccacatgcaaaacaccttcaataaacagccactatttcacatgctgt

SEQ ID NO: 203845 - DNA, 3037 bp, Homo sapiens
  Payload ID: 20204
  Gene Name: zinc finger protein 790
  Uniprot ID: Q6PG37
  ENST ID: ENST00000356725
  CDS Start-End: 122-2032
aatagaaagatcgcggaaccttccaccatcaagggaccgcagggccggctctgctttcccagcacgctgcctcaccaagaaagaatccagagaaggactggtggacttggaatgttaagtcatggcccatttgatgatgttcagggatgtggctgtagatttctctcaggaggagtgggagtgcctggacctggaacagagggatttatatagagatgtgatgttggagaactacagcaacatggtctcactgggtttttgcatttatcagccagaagcgttctctttattggagaaagggaaagagccctggaagattttgagggatgagacaagaggaccttgcccagacatgcagtcgaggtgtcagaccaagaagttattaccaaaaaatggcatttttgagagagaaatagcccaattggaaataatgagaatttgtaaaaaccacagccttgactgtttatgttttagaggtgactgggaaggcaacactcagtttcaaacacttcaagataatcaagaggaatgcttcaagcaggtgatacgcacctgtgaaaaaaggcccacttttaaccagcatacagtgtttaatctacaccagagacttaatacaggagacaaactgaatgaatttaaagaactggggaaagcctttatttctggttcagatcatactcaacatcagttaattcacacaagtgagaaattctgtggagataaagaatgtgggaatacctttcttcctgattcagaagttattcaatatcagacagttcacactgttaagaaaacatatgaatgtaaagaatgtgggaagtcttttagtttacgttcgagtcttactggtcataagagaattcataccggtgagaaaccttttaaatgtaaggattgtgggaaagcctttagatttcattcacaacttagtgtccataagcgaattcatactggtgagaaatcttatgaatgtaaggaatgtgggaaggcctttagttgtggctcagatcttactcgacatcagagaattcatactggtgaaaaaccctatgaatgtaatgaatgtagaaaggcctttagtcagcgatcacatcttattaaacatcagagaattcacactggtgaaaaaccttatgaatgtaaggagtgtgggaaagcttttactcgtggatcacacctaactcagcatcagagaattcatactggtgagaaatctcatgagtgtaaggaatgtggaaaagcctttattcgtggttcaaatcttgctcaacatcagaatgttcatgttggtaggaaaccttataaatgtgagaaatgtgggaaagcctatatttggagctcacaccttgctcgacatcagcgaattcatactggcaggaaaccttatgaatgtaagcaatgcgggaagacttttacttgggcttcgtatcttgctcaacatgagaaaattcacaatgagaggaaatcctatgaatgtaaggaatgtggaaagacctttcttcatggctcagagtttaatcgacatcagaaaattcatactggtgagagaaactatgaatgtaaggaatgtggaaagaccttttttcgtggttcagaacttaatcgacaccagaaaattcatactggaaagaggccatatgaatgtgaagaatgtggaaaagcctttctctggggttcacaacttactcgacatcagagaatgcatactggtgaggaaccttacgtatgtaaagaatgtgggaaatcttttatctggggttcacagcttacacgacataagaaaattcatactgatgcagaaccttatggatgcaagaaaagtagccacatctttagtcaccattcatattttactgaacaaaaaattcataatagtgcaaatctctgtgaatggacagactatgggaacacctttagtcatgagtcaaactttgctcaacaccagaatatttacacttttgagaaatcctatgaatttaaagattttgagaaagcattttcttcaagctctcacttcatttcactcttgtgaaatattatataaaagtgtaggaagggctttattcatgactcattaattgatgtcatttatttttttctcttgaggaacaccacaaatgtaagtaatattggaaggcattttaacagagcacacatccagcagcagcagcagcagcagcagcagagaattcatcatgcaatcaatataggaaagaaattactgatcagttatcaattgcagaatatcagggtaaaattttatgagatagcatgaattctttttgaatcattctcaaaacattctcatcagagatgttgcataaagaatttatatataatttggccaagcatggtggctcacacctgttatcctagcactttgggaaacagaggtgggtggatcacctgaggtcaggggttcgagaccagcctgaccaacatggtgaaaccctgtctctactaaatatacaaaaattagccgggcgtggtagcacacgcctgtagtcccagctactcgggaggccgaggcatgagaattccttgaacctgggaggtggaggttgcagtgagccaagatcacatcactgcactccagcctgggtgatagaacaagactccatctcaaaaacaaaaacccacaagaatttatatataattcattttggaaatctttcatcattagcaaaattctgttgtatttccacaaaaatcatgtaattaatctagaaaagccttgaactatgtcatacaatttatttggcatgtcttgtttcaatacatcctgcctctattttttttttttggaaagtatcttaaatctatgtctgtttaatcgtattcattagattataagggttgaatgatttgagatttacatgacttagtgactgtcatttgtattggtattaagccattttatgagaggaggacttttaagactataatgattatagacaaatatgtcatctctatttatgtcttactgaacatcagaatgttaattctgaaaaaaaatcagtaaaatacaatgaagaaa

SEQ ID NO: 203846 - DNA, 538 bp, Homo sapiens
  Payload ID: 20204
  Gene Name: zinc finger protein 790
  ENST ID: ENST00000525288
  CDS Start-End: 132-538
acacgacgttgacaggcgctgtgtgtgaccctaatggactatttaaatgtgactgtatctctgctttcccagcacgctgcctcaccaagaaagaatccagagaaggactggtggacttggaatgttaagtcatggcccatttgatgatgttcagggatgtggctgtagatttctctcaggaggagtgggagtgcctggacctggaacagagggatttatatagagatgtgatgttggagaactacagcaacatggtctcactgggtttttgcatttatcagccagaagcgttctctttattggagaaagggaaagagccctggaagattttgagggatgagacaagaggaccttgcccagacatgcagtcgaggtgtcagaccaagaagttattaccaaaaaatggcatttttgagagagaaatagcccaattggaaataatgagaatttgtaaaaaccacagccttgactgtttatgttttagaggtgactgggaaggcaacactcagtttcaaacacttcaagataatcaagagga

SEQ ID NO: 203847 - DNA, 578 bp, Homo sapiens
  Payload ID: 20204
  Gene Name: zinc finger protein 790
  ENST ID: ENST00000527645
  CDS Start-End: 430-578
atgactgcgtcgcgttgtgcgtgaccacgttcgtaaaggtggtgatagcagccgctatggggccaaaaacaaagaattgagctttgcgttgagtgacaggcatagtccttcgtgaatgtgtggggagcagtttttgtgctggcccgtagctggattggagtgggggcaacctagaaggaggggagaagaatgggacacagtgtagacaacatagttcaagagtttctccgtaaattagagcagagaaatggagcagcaggttggggtagagggctggggaagacggctggggaacaaccacccatcaacatgttgttggaaatgagccacgagaggggggaaaagtccaggcaaggctctgctttcccagcacgctgcctcaccaagaaagaatccagagaaggactggtggacttggaatgttaagtcatggcccatttgatgatgttcagggatgtggctgtagatttctctcaggaggagtgggagtgcctggacctggaacagagggatttatatagagatgtgatgttggagaactacagcaacatggtctcactgggtttttgcatttatca

SEQ ID NO: 203848 - DNA, 922 bp, Homo sapiens
  Payload ID: 20204
  Gene Name: zinc finger protein 790
  ENST ID: ENST00000528994
  CDS Start-End: 386-922
gacatactggaccgcagggtctcctgggaaacgtagtccaagcctcgccggggatagatgggcccaactaaagtgtgctgcgttctctgggtcctgaggcggcagtctggccgcagtgaccagactaactgtgccccggaggctgcttggaattccacttaacgctggaagcacgcagacgctcttgaggcgggcagctgcgtagcgtgtggaggagccgggagagcgcaccccaatgtggcacctgagcgtctgggaccgaaccagcatggggagtcggaaggggacaaatccgcgatcccagtcatgcatctctgctttcccagcacgctgcctcaccaagaaagaatccagagaaggactggtggacttggaatgttaagtcatggcccatttgatgatgttcagggatgtggctgtagatttctctcaggaggagtgggagtgcctggacctggaacagagggatttatatagagatgtgatgttggagaactacagcaacatggtctcactgggtttttgcatttatcagccagaagcgttctctttattggagaaagggaaagagccctggaagattttgagggatgagacaagaggaccttgcccagacatgcagtcgaggtgtcagaccaagaagttattaccaaaaaatggcatttttgagagagaaatagcccaattggaaataatgagaatttgtaaaaaccacagccttgactgtttatgttttagaggtgactgggaaggcaacactcagtttcaaacacttcaagataatcaagaggaatgcttcaagcaggtgatacgcacctgtgaaaaaaggcccacttttaaccagcatacagtgtttaatctacaccagagacttaatacaggagacaaactgaatgaatttaaagaactggggaaagccttt

SEQ ID NO: 203849 - DNA, 581 bp, Homo sapiens
  Payload ID: 20204
  Gene Name: zinc finger protein 790
  ENST ID: ENST00000586323
  CDS Start-End: 162-581
agaaagcgacaggttgccgaaagctacagcccagccatcccgattcccctggcgcggactctggcaccaacaaaactatctctttgagctctgctttcccagcacgctgcctcaccaagaaagaatccagagaaggactggtggacttggaatgttaagtcatggcccatttgatgatgttcagggatgtggctgtagatttctctcaggaggagtgggagtgcctggacctggaacagagggatttatatagagatgtgatgttggagaactacagcaacatggtctcactgggtttttgcatttatcagccagaagcgttctctttattggagaaagggaaagagccctggaagattttgagggatgagacaagaggaccttgcccagacatgcagtcgaggtgtcagaccaagaagttattaccaaaaaatggcatttttgagagagaaatagcccaattggaaataatgagaatttgtaaaaaccacagccttgactgtttatgttttagaggtgactgggaaggcaacactcagtttcaaacacttcaagataatcaagaggaatgcttcaagcag

SEQ ID NO: 203850 - DNA, 2451 bp, Homo sapiens
  Payload ID: 20204
  Gene Name: zinc finger protein 790
  Uniprot ID: Q6PG37
  ENST ID: ENST00000615484
  CDS Start-End: 430-2340
atgactgcgtcgcgttgtgcgtgaccacgttcgtaaaggtggtgatagcagccgctatggggccaaaaacaaagaattgagctttgcgttgagtgacaggcatagtccttcgtgaatgtgtggggagcagtttttgtgctggcccgtagctggattggagtgggggcaacctagaaggaggggagaagaatgggacacagtgtagacaacatagttcaagagtttctccgtaaattagagcagagaaatggagcagcaggttggggtagagggctggggaagacggctggggaacaaccacccatcaacatgttgttggaaatgagccacgagaggggggaaaagtccaggcaaggctctgctttcccagcacgctgcctcaccaagaaagaatccagagaaggactggtggacttggaatgttaagtcatggcccatttgatgatgttcagggatgtggctgtagatttctctcaggaggagtgggagtgcctggacctggaacagagggatttatatagagatgtgatgttggagaactacagcaacatggtctcactgggtttttgcatttatcagccagaagcgttctctttattggagaaagggaaagagccctggaagattttgagggatgagacaagaggaccttgcccagacatgcagtcgaggtgtcagaccaagaagttattaccaaaaaatggcatttttgagagagaaatagcccaattggaaataatgagaatttgtaaaaaccacagccttgactgtttatgttttagaggtgactgggaaggcaacactcagtttcaaacacttcaagataatcaagaggaatgcttcaagcaggtgatacgcacctgtgaaaaaaggcccacttttaaccagcatacagtgtttaatctacaccagagacttaatacaggagacaaactgaatgaatttaaagaactggggaaagcctttatttctggttcagatcatactcaacatcagttaattcacacaagtgagaaattctgtggagataaagaatgtgggaatacctttcttcctgattcagaagttattcaatatcagacagttcacactgttaagaaaacatatgaatgtaaagaatgtgggaagtcttttagtttacgttcgagtcttactggtcataagagaattcataccggtgagaaaccttttaaatgtaaggattgtgggaaagcctttagatttcattcacaacttagtgtccataagcgaattcatactggtgagaaatcttatgaatgtaaggaatgtgggaaggcctttagttgtggctcagatcttactcgacatcagagaattcatactggtgaaaaaccctatgaatgtaatgaatgtagaaaggcctttagtcagcgatcacatcttattaaacatcagagaattcacactggtgaaaaaccttatgaatgtaaggagtgtgggaaagcttttactcgtggatcacacctaactcagcatcagagaattcatactggtgagaaatctcatgagtgtaaggaatgtggaaaagcctttattcgtggttcaaatcttgctcaacatcagaatgttcatgttggtaggaaaccttataaatgtgagaaatgtgggaaagcctatatttggagctcacaccttgctcgacatcagcgaattcatactggcaggaaaccttatgaatgtaagcaatgcgggaagacttttacttgggcttcgtatcttgctcaacatgagaaaattcacaatgagaggaaatcctatgaatgtaaggaatgtggaaagacctttcttcatggctcagagtttaatcgacatcagaaaattcatactggtgagagaaactatgaatgtaaggaatgtggaaagaccttttttcgtggttcagaacttaatcgacaccagaaaattcatactggaaagaggccatatgaatgtgaagaatgtggaaaagcctttctctggggttcacaacttactcgacatcagagaatgcatactggtgaggaaccttacgtatgtaaagaatgtgggaaatcttttatctggggttcacagcttacacgacataagaaaattcatactgatgcagaaccttatggatgcaagaaaagtagccacatctttagtcaccattcatattttactgaacaaaaaattcataatagtgcaaatctctgtgaatggacagactatgggaacacctttagtcatgagtcaaactttgctcaacaccagaatatttacacttttgagaaatcctatgaatttaaagattttgagaaagcattttcttcaagctctcacttcatttcactcttgtgaaatattatataaaagtgtaggaagggctttattcatgactcattaattgatgtcatttatttttttctcttgaggaacaccacaaatgtaagtaatattggaaggcatttt

SEQ ID NO: 203851 - DNA, 2183 bp, Homo sapiens
  Payload ID: 20204
  Gene Name: zinc finger protein 790
  Uniprot ID: Q6PG37
  ENST ID: ENST00000613249
  CDS Start-End: 162-2072
agaaagcgacaggttgccgaaagctacagcccagccatcccgattcccctggcgcggactctggcaccaacaaaactatctctttgagctctgctttcccagcacgctgcctcaccaagaaagaatccagagaaggactggtggacttggaatgttaagtcatggcccatttgatgatgttcagggatgtggctgtagatttctctcaggaggagtgggagtgcctggacctggaacagagggatttatatagagatgtgatgttggagaactacagcaacatggtctcactgggtttttgcatttatcagccagaagcgttctctttattggagaaagggaaagagccctggaagattttgagggatgagacaagaggaccttgcccagacatgcagtcgaggtgtcagaccaagaagttattaccaaaaaatggcatttttgagagagaaatagcccaattggaaataatgagaatttgtaaaaaccacagccttgactgtttatgttttagaggtgactgggaaggcaacactcagtttcaaacacttcaagataatcaagaggaatgcttcaagcaggtgatacgcacctgtgaaaaaaggcccacttttaaccagcatacagtgtttaatctacaccagagacttaatacaggagacaaactgaatgaatttaaagaactggggaaagcctttatttctggttcagatcatactcaacatcagttaattcacacaagtgagaaattctgtggagataaagaatgtgggaatacctttcttcctgattcagaagttattcaatatcagacagttcacactgttaagaaaacatatgaatgtaaagaatgtgggaagtcttttagtttacgttcgagtcttactggtcataagagaattcataccggtgagaaaccttttaaatgtaaggattgtgggaaagcctttagatttcattcacaacttagtgtccataagcgaattcatactggtgagaaatcttatgaatgtaaggaatgtgggaaggcctttagttgtggctcagatcttactcgacatcagagaattcatactggtgaaaaaccctatgaatgtaatgaatgtagaaaggcctttagtcagcgatcacatcttattaaacatcagagaattcacactggtgaaaaaccttatgaatgtaaggagtgtgggaaagcttttactcgtggatcacacctaactcagcatcagagaattcatactggtgagaaatctcatgagtgtaaggaatgtggaaaagcctttattcgtggttcaaatcttgctcaacatcagaatgttcatgttggtaggaaaccttataaatgtgagaaatgtgggaaagcctatatttggagctcacaccttgctcgacatcagcgaattcatactggcaggaaaccttatgaatgtaagcaatgcgggaagacttttacttgggcttcgtatcttgctcaacatgagaaaattcacaatgagaggaaatcctatgaatgtaaggaatgtggaaagacctttcttcatggctcagagtttaatcgacatcagaaaattcatactggtgagagaaactatgaatgtaaggaatgtggaaagaccttttttcgtggttcagaacttaatcgacaccagaaaattcatactggaaagaggccatatgaatgtgaagaatgtggaaaagcctttctctggggttcacaacttactcgacatcagagaatgcatactggtgaggaaccttacgtatgtaaagaatgtgggaaatcttttatctggggttcacagcttacacgacataagaaaattcatactgatgcagaaccttatggatgcaagaaaagtagccacatctttagtcaccattcatattttactgaacaaaaaattcataatagtgcaaatctctgtgaatggacagactatgggaacacctttagtcatgagtcaaactttgctcaacaccagaatatttacacttttgagaaatcctatgaatttaaagattttgagaaagcattttcttcaagctctcacttcatttcactcttgtgaaatattatataaaagtgtaggaagggctttattcatgactcattaattgatgtcatttatttttttctcttgaggaacaccacaaatgtaagtaatattggaaggcatttt

SEQ ID NO: 203852 - DNA, 2361 bp, Homo sapiens
  Payload ID: 20204
  Gene Name: zinc finger protein 790
  Uniprot ID: Q6PG37
  ENST ID: ENST00000614179
  CDS Start-End: 340-2250
gccggggatagatgggcccaactaaagtgtgctgcgttctctgggtcctgaggcggcagtctggccgcagtgaccagactaactgtgccccggaggctgcttggaattccacttaacgctggaagcacgcagacgctcttgaggcgggcagctgcgtagcgtgtggaggagccgggagagcgcaccccaatgtggcacctgagcgtctgggaccgaaccagcatggggagtcggaaggggacaaatccgcgatcccagtcatgcatctctgctttcccagcacgctgcctcaccaagaaagaatccagagaaggactggtggacttggaatgttaagtcatggcccatttgatgatgttcagggatgtggctgtagatttctctcaggaggagtgggagtgcctggacctggaacagagggatttatatagagatgtgatgttggagaactacagcaacatggtctcactgggtttttgcatttatcagccagaagcgttctctttattggagaaagggaaagagccctggaagattttgagggatgagacaagaggaccttgcccagacatgcagtcgaggtgtcagaccaagaagttattaccaaaaaatggcatttttgagagagaaatagcccaattggaaataatgagaatttgtaaaaaccacagccttgactgtttatgttttagaggtgactgggaaggcaacactcagtttcaaacacttcaagataatcaagaggaatgcttcaagcaggtgatacgcacctgtgaaaaaaggcccacttttaaccagcatacagtgtttaatctacaccagagacttaatacaggagacaaactgaatgaatttaaagaactggggaaagcctttatttctggttcagatcatactcaacatcagttaattcacacaagtgagaaattctgtggagataaagaatgtgggaatacctttcttcctgattcagaagttattcaatatcagacagttcacactgttaagaaaacatatgaatgtaaagaatgtgggaagtcttttagtttacgttcgagtcttactggtcataagagaattcataccggtgagaaaccttttaaatgtaaggattgtgggaaagcctttagatttcattcacaacttagtgtccataagcgaattcatactggtgagaaatcttatgaatgtaaggaatgtgggaaggcctttagttgtggctcagatcttactcgacatcagagaattcatactggtgaaaaaccctatgaatgtaatgaatgtagaaaggcctttagtcagcgatcacatcttattaaacatcagagaattcacactggtgaaaaaccttatgaatgtaaggagtgtgggaaagcttttactcgtggatcacacctaactcagcatcagagaattcatactggtgagaaatctcatgagtgtaaggaatgtggaaaagcctttattcgtggttcaaatcttgctcaacatcagaatgttcatgttggtaggaaaccttataaatgtgagaaatgtgggaaagcctatatttggagctcacaccttgctcgacatcagcgaattcatactggcaggaaaccttatgaatgtaagcaatgcgggaagacttttacttgggcttcgtatcttgctcaacatgagaaaattcacaatgagaggaaatcctatgaatgtaaggaatgtggaaagacctttcttcatggctcagagtttaatcgacatcagaaaattcatactggtgagagaaactatgaatgtaaggaatgtggaaagaccttttttcgtggttcagaacttaatcgacaccagaaaattcatactggaaagaggccatatgaatgtgaagaatgtggaaaagcctttctctggggttcacaacttactcgacatcagagaatgcatactggtgaggaaccttacgtatgtaaagaatgtgggaaatcttttatctggggttcacagcttacacgacataagaaaattcatactgatgcagaaccttatggatgcaagaaaagtagccacatctttagtcaccattcatattttactgaacaaaaaattcataatagtgcaaatctctgtgaatggacagactatgggaacacctttagtcatgagtcaaactttgctcaacaccagaatatttacacttttgagaaatcctatgaatttaaagattttgagaaagcattttcttcaagctctcacttcatttcactcttgtgaaatattatataaaagtgtaggaagggctttattcatgactcattaattgatgtcatttatttttttctcttgaggaacaccacaaatgtaagtaatattggaaggcatttt

SEQ ID NO: 203853 - DNA, 4554 bp, Homo sapiens
  Payload ID: 20205
  Gene Name: zinc finger protein 791
  Uniprot ID: Q3KP31
  ENST ID: ENST00000343325
  CDS Start-End: 163-1893
gcaaatgcgtgctacgtcactgtgcgatcgggttgtgcttagcttggggtctcctggccccttgacgcgtcaggttgctgtacccctgcatcggatgcgctgtaccctgcgctggctccgtgaaccttagggacaacaccgggacacccgcgaggccggaaaatggactcagtggcttttgaggatgtgtctgtgagcttcagccaggaggagtgggctctgctggctccttcacagaagaaactctacagagatgtgatgcaggaaacattcaagaacctggcatctataggggaaaaatgggaagacccgaatgttgaagatcaacacaaaaaccaaggacgaaatctaagaagccatacgggagagagactctgtgaaggtaaagaaggtagtcaatgtgcagaaaacttcagtcccaatctcagtgtgacgaagaagactgccggagtaaaaccatatgagtgtactatctgtggaaaagccttcatgcgtctctcatcccttactagacacatgaggtctcacactggatacgagctatttgagaagccatataaatgtaaggagtgtgagaaagcctttagttatctcaaatcctttcaaagacatgaaaggagtcacactggagaaaaaccctataaatgtaaacaatgtggaaaaaccttcatatatcaccagccctttcaaagacatgagcggactcacattggagaaaaaccctatgaatgtaagcaatgtggaaaagctcttagttgttccagttcgcttcgagttcatgaaaggattcacactggagaaaagccctatgaatgtaaacaatgtgggaaagccttcagttgttccagttctattcgagtacacgaaagaactcacactggagagaaaccctatgcatgtaaggaatgtgggaaagccttcatttcccacacaagtgttctaacacacatgataacacacaacggagatagaccttataaatgcaaagaatgtggaaaggcattcatttttcccagttttttacgagtacatgaaagaattcacactggagagaaaccctataaatgtaaacaatgtggtaaagccttcagatgttccacctccattcaaattcatgaaagaattcatactggagagaagccctataaatgtaaagaatgtgggaaatctttcagtgcacgcccagcctttcgagtacacgtgagagtgcatactggagagaaaccctataagtgtaaagaatgtgggaaagcctttagtagaatcagttactttcgaatacatgaaaggactcacactggagagaaaccctacgaatgtaaaaaatgtgggaaaactttcaattatcctctagatttgaaaatccacaagagaaatcacactggagaaaaaccctatgagtgtaaggaatgtgcaaaaaccttcatttctcttgagaactttcgaagacacatgatcacccacactggagacggaccttataaatgtagggactgtgggaaggtgttcatttttcctagtgcgttacgaacacatgaaagaactcacactggagagaaaccctatgaatgtaaacaatgtggaaaagcctttagttgttctagttacattcggatacataaaagaactcacactggggagaaaccttatgaatgtaaggaatgcgggaaggcctttatttatcccacaagctttcaaggacacatgagaatgcatactggagagaaaccctataaatgtaaagaatgtgggaaggcctttagtcttcacagttcctttcaaagacatacaagaattcacaattatgagaaacctcttgaatgtaagcaatgtggaaaagccttcagtgtgtccacatccttaaaaaaacatatgagaatgcacaatcgatagaaactctataaatgtgagaaataggagaaagttttcaattctaacagatgctttcaaagttgtgaaaattcccactgaagagagaaatcctgtcaatgtaagtaatatagaaagcgagatacaagatgattcatgtatagtcaggtaccacataatcatgtttcagtcagcaatggaccatataggttggtagccccataagattatataacacctaaaacatttctatcaaccgcaatttagtagcagtagtaacaccatagtgcagcacattatttaagtgtttatggtgctggtgtaaacgtgctgcactttcagttgtataaaagtacaagacagcggccggggacggtggctcacgcctgtaatcccagcactttgggaggccaaggcgggcggatcacgaggccaggagatcaagaccatcctggctaacacggtaaaaccccatctctactaaaaatacaaacaattagccgggcgtggtggtgggcgcctgtagtcccagctacttgggaggctgaggcaggagaatggcataaacccaggaggccgagctgacagtgagctgagatccggccaacagagcgagactctgtctcaaaaaaaaaaaaaaaaaaaaagtacaacacagctgggcatggtcacacctgtgatcccaacactgggagactaaggcagtaggattgcttgatgccaggactactctggtcaacctagtgagaccctgtctctacaaaaaataaaaacattttctaagtgtggtagcacaccctgtagtcccatctacatgggaggctgaggcaggaggattgcctgagcccaggagttcaaggctacagtgaaccaagatcacgtgatggcagtccagcatgggtgacagtgagactgtatcaaaaaaaaaaaaaaaaaattggctgggcacagtggctcatacctgtaatcccagcactttgggaggctgaggtgggagaatcagttgaggtcaggagttcaagaccagcctggtcaacatgatgaaaccctgtctccattagaaatacgaaaattagctgggcgttctggtgtgcctgtagtcccagctacttgggaggccaaagcaggagaatcgcttgaacccgggaggtggagattgcagtgagctgagatctaccactacactccagcctgggtgacagagcgagactccgtctcgaaaaaaaaaaaattacagcacagatgtgcaatatatacttgataataaatggctaagttactggtttatatatttacaatcctgttttagaatgtattcctgtgtttttttaacagtaagacagtctcaggcaggtccttaaggagatattcccggaaaaactttgttatgataggcgatgacggctccatgtgcaggactgcccctgaacgtattctggcgggacaaaacatggaggcagaagacaatgatattgatgatcctcaccccgtgtagtcctacactaatgtgtgtttgtgtcttagttagtctttaacaaaaatagtttaaaaaaatttaatagaaaaagcttatagaatatggacataaaatatttttgtacagctgtacaatgtgttttaagctaaattattacaaagtttttaaaaataagtttataaagaaaataatgtacagtaagttaaggtttattcattattgaggaaaaaatgtttttatgaatgtagtgtagtccaagtgtacagtgtttataaattctccattagtgtacagtaacatcctgggccttcgcattcactcaccactcaactgactcacccagagcaacttctagtcctgcaagctatgttcatggagtgtcctatgcaggtgcatccttttttatcttttatactgcatgtttactctgtgtattttctgtgtttagactcataaatacttaacattttgttacaatttcctacagtgttcagtacaacaacatgttgtatggtttatagcctagtagcaatagactgtaccatatagtctagatgtgttgtagctataccatctagatttgtgtaagttcactttgtgatgtttgtaccatgaggaaatcacctacaacacgtttctcagaacatatacccatgattaagcaatctctgcctgtaaaatgctccagaaaattcacaccatgatataaattcatcacacacgatataaaagttaaggcaaggcatggtggctcatgcctgtaatcccagcactttgggaggccaaggcaggcagatcacctgaggtcaggagttcgagaccagcctggccaagacggtgaaaccccatctctactaaaaatacaaaaattacctgagcgtggtggcatgcacctgtaattccagctacttgggaggctgaagcaggagaatcatttgaacctgggaggtggaggctgcagtgagctgagattgtgccactacactccagcctgggcaacagagcaagactccatcccacacaccaaaaaaaagttaaaaattttttatcactggctcattcttcaagtacatctctggactatgaattgtaacttaactacttttccaagaagtcttggaagtgagataattctgtaagtactctttaagcagtggtcaaaagtttaaaaggttgtgttttctcattaaatcagttagtaaaacttt

SEQ ID NO: 203854 - DNA, 6412 bp, Homo sapiens
  Payload ID: 20205
  Gene Name: zinc finger protein 791
  ENST ID: ENST00000446165
  CDS Start-End: 163-372
gcaaatgcgtgctacgtcactgtgcgatcgggttgtgcttagcttggggtctcctggccccttgacgcgtcaggttgctgtacccctgcatcggatgcgctgtaccctgcgctggctccgtgaaccttagggacaacaccgggacacccgcgaggccggaaaatggactcagtggcttttgaggatgtgtctgtgagcttcagccaggaggagtgggctctgctggctccttcacagaagaaactctacagagatgtgatgcaggaaacattcaagaacctggcatctatagaagccatacgggagagagactctgtgaaggtaaagaaggtagtcaatgtgcagaaaacttcagtcccaatctcagtgtgacgaagaagactgccggagtaaaaccatatgagtgtactatctgtggaaaagccttcatgcgtctctcatcccttactagacacatgaggtctcacactggatacgagctatttgagaagccatataaatgtaaggagtgtgagaaagcctttagttatctcaaatcctttcaaagacatgaaaggagtcacactggagaaaaaccctataaatgtaaacaatgtggaaaaaccttcatatatcaccagccctttcaaagacatgagcggactcacattggagaaaaaccctatgaatgtaagcaatgtggaaaagctcttagttgttccagttcgcttcgagttcatgaaaggattcacactggagaaaagccctatgaatgtaaacaatgtgggaaagccttcagttgttccagttctattcgagtacacgaaagaactcacactggagagaaaccctatgcatgtaaggaatgtgggaaagccttcatttcccacacaagtgttctaacacacatgataacacacaacggagatagaccttataaatgcaaagaatgtggaaaggcattcatttttcccagttttttacgagtacatgaaagaattcacactggagagaaaccctataaatgtaaacaatgtggtaaagccttcagatgttccacctccattcaaattcatgaaagaattcatactggagagaagccctataaatgtaaagaatgtgggaaatctttcagtgcacgcccagcctttcgagtacacgtgagagtgcatactggagagaaaccctataagtgtaaagaatgtgggaaagcctttagtagaatcagttactttcgaatacatgaaaggactcacactggagagaaaccctacgaatgtaaaaaatgtgggaaaactttcaattatcctctagatttgaaaatccacaagagaaatcacactggagaaaaaccctatgagtgtaaggaatgtgcaaaaaccttcatttctcttgagaactttcgaagacacatgatcacccacactggagacggaccttataaatgtagggactgtgggaaggtgttcatttttcctagtgcgttacgaacacatgaaagaactcacactggagagaaaccctatgaatgtaaacaatgtggaaaagcctttagttgttctagttacattcggatacataaaagaactcacactggggagaaaccttatgaatgtaaggaatgcgggaaggcctttatttatcccacaagctttcaaggacacatgagaatgcatactggagagaaaccctataaatgtaaagaatgtgggaaggcctttagtcttcacagttcctttcaaagacatacaagaattcacaattatgagaaacctcttgaatgtaagcaatgtggaaaagccttcagtgtgtccacatccttaaaaaaacatatgagaatgcacaatcgatagaaactctataaatgtgagaaataggagaaagttttcaattctaacagatgctttcaaagttgtgaaaattcccactgaagagagaaatcctgtcaatgtaagtaatatagaaagcgagatacaagatgattcatgtatagtcaggtaccacataatcatgtttcagtcagcaatggaccatataggttggtagccccataagattatataacacctaaaacatttctatcaaccgcaatttagtagcagtagtaacaccatagtgcagcacattatttaagtgtttatggtgctggtgtaaacgtgctgcactttcagttgtataaaagtacaagacagcggccggggacggtggctcacgcctgtaatcccagcactttgggaggccaaggcgggcggatcacgaggccaggagatcaagaccatcctggctaacacggtaaaaccccatctctactaaaaatacaaacaattagccgggcgtggtggtgggcgcctgtagtcccagctacttgggaggctgaggcaggagaatggcataaacccaggaggccgagctgacagtgagctgagatccggccaacagagcgagactctgtctcaaaaaaaaaaaaaaaaaaaaagtacaacacagctgggcatggtcacacctgtgatcccaacactgggagactaaggcagtaggattgcttgatgccaggactactctggtcaacctagtgagaccctgtctctacaaaaaataaaaacattttctaagtgtggtagcacaccctgtagtcccatctacatgggaggctgaggcaggaggattgcctgagcccaggagttcaaggctacagtgaaccaagatcacgtgatggcagtccagcatgggtgacagtgagactgtatcaaaaaaaaaaaaaaaaaattggctgggcacagtggctcatacctgtaatcccagcactttgggaggctgaggtgggagaatcagttgaggtcaggagttcaagaccagcctggtcaacatgatgaaaccctgtctccattagaaatacgaaaattagctgggcgttctggtgtgcctgtagtcccagctacttgggaggccaaagcaggagaatcgcttgaacccgggaggtggagattgcagtgagctgagatctaccactacactccagcctgggtgacagagcgagactccgtctcgaaaaaaaaaaaattacagcacagatgtgcaatatatacttgataataaatggctaagttactggtttatatatttacaatcctgttttagaatgtattcctgtgtttttttaacagtaagacagtctcaggcaggtccttaaggagatattcccggaaaaactttgttatgataggcgatgacggctccatgtgcaggactgcccctgaacgtattctggcgggacaaaacatggaggcagaagacaatgatattgatgatcctcaccccgtgtagtcctacactaatgtgtgtttgtgtcttagttagtctttaacaaaaatagtttaaaaaaatttaatagaaaaagcttatagaatatggacataaaatatttttgtacagctgtacaatgtgttttaagctaaattattacaaagtttttaaaaataagtttataaagaaaataatgtacagtaagttaaggtttattcattattgaggaaaaaatgtttttatgaatgtagtgtagtccaagtgtacagtgtttataaattctccattagtgtacagtaacatcctgggccttcgcattcactcaccactcaactgactcacccagagcaacttctagtcctgcaagctatgttcatggagtgtcctatgcaggtgcatccttttttatcttttatactgcatgtttactctgtgtattttctgtgtttagactcataaatacttaacattttgttacaatttcctacagtgttcagtacaacaacatgttgtatggtttatagcctagtagcaatagactgtaccatatagtctagatgtgttgtagctataccatctagatttgtgtaagttcactttgtgatgtttgtaccatgaggaaatcacctacaacacgtttctcagaacatatacccatgattaagcaatctctgcctgtaaaatgctccagaaaattcacaccatgatataaattcatcacacacgatataaaagttaaggcaaggcatggtggctcatgcctgtaatcccagcactttgggaggccaaggcaggcagatcacctgaggtcaggagttcgagaccagcctggccaagacggtgaaaccccatctctactaaaaatacaaaaattacctgagcgtggtggcatgcacctgtaattccagctacttgggaggctgaagcaggagaatcatttgaacctgggaggtggaggctgcagtgagctgagattgtgccactacactccagcctgggcaacagagcaagactccatcccacacaccaaaaaaaagttaaaaattttttatcactggctcattcttcaagtacatctctggactatgaattgtaacttaactacttttccaagaagtcttggaagtgagataattctgtaagtactctttaagcagtggtcaaaagtttaaaaggttgtgttttctcattaaatcagttagtaaaacttttctctttctcttgatgtcttgattcatgagtaaactgaagtgtattttttttttttcgagacggagtcttgctctgttgcccaggctggagttcagcggtgtgatctcggctcactgcaagctccgcctcccgggtccacgccattctcctgcctcagcctccccagtagctgggactgcaggcgcccgccaccatgcccagctaattttttttgtatttttagtagagatggggtttcaccgtgttaagccaggatggtctcaatctcctgacctcgtgattcgaccgcctcagcctcccaaagtgctgggattacaagcttgagccaccgcacccggcctgaagtgtattttttttttcttttaaagaccagtgttagtagaagtgtatttttaatatacaattagttttaatttgtgtatagtttttcagttgttctctgaataaagagattgttgaatactgacacactgtaactaggatttttcctactggcctcatgtggaaggtggtgcatatattacccattatatatttatttcaccttttccgaaaaactgctttttaaatttcttggccagacacggtggctcactcctttgtaattccagcactttgggaaaccaaggcaagcagatcacttgaggtcaggagttcgagaccaacctggccaacatggtgaaatcccatctctactaaaaatacaaaaattagctgggcatgttggagggcacctgtaatctcagctacttgggaggctgaggcaggagaaatgcttgaacctggaagtcagaggttgcagtgagccaagatcacaccactgcactccagcctggacaacagaacgagactccatatcaaaaaaattaaattaaaatataataaatttcttgccgggcgcagtggctcacacctgtaatcccagcactttgggaggccgaggtgggcggatcacgaagtcaggagattgagaccatcctggctaatacagtgaaaccccgtctctactataaatacaaaaaattagctgggcatggtggcgggcgtctgtagtcccagctactcaggagtctgaggcaggagaatggtgtgaacccgggaggcggagcttgcagtgagccgagatcgtgccactgcaatccagcctgggcagcagaacgagactccatctcaaataaataaataaataaaatgaatttcagctagaagagccttattccattttcctttttattaaacatctggcataagttggtaagtatgtgaagtttatcatatattcttatgcgaattattattttcgccttttttttataattctgtctgggatttgaatagtagagtttgaattcaggaaggacacctgtgataggacaataaaatctagagctggacgtggccctcctgctacctgtcgacacaggtaaatttcctagaatctgttccctttatagatccatgttgaaattcacttatagcctcacttgcatgagatttgccaggcagaagtgaagaagacattagtcaggtattggaaccccaccatacagggagacagcctgcttcctgctcattttcctggttattttctctgccaatcaaaagtatcctgaaaacaccctgagctgcttgacttccattctcaaagagatgtgttggtttccacagttgtctccacaagctccgcatcaaagatccacgtacagtttggattttccttctagccttcatgtgtggcccaagcatctatttcagactgtcatggttggcattgttctctgaggttctgtcttccctttgtgtttctatgagctttaatttgtatggttcttgttctgttaatgccactagggactatgtattcctgattccaccatgacagctacagtaaaacagtaaaaaaaaaaaaaaacaacta

SEQ ID NO: 203855 - DNA, 704 bp, Homo sapiens
  Payload ID: 20205
  Gene Name: zinc finger protein 791
  ENST ID: ENST00000598225
  CDS Start-End: 164-271
aaatgcgtgctacgtcactgtgcgatcgggttgtgcttagcttggggtctcctggccccttgacgcgtcaggttgctgtacccctgcatcggatgcgctgtaccctgcgctggctccgtgaaccttagggacaacaccgggacacccgcgaggccggaaaatgatggggtctggctgtgttgctcaggctgatcttgaactcctgggctcaagcgatcctccaccctcagcatcccaaagtgctaggattccaggactcagtggcttttgaggatgtgtctgtgagcttcagccaggaggagtgggctctgctggctccttcacagaagaaactctacagagatgtgatgcaggaaacattcaagaacctggcatctataggggaaaaatgggaagacccgaatgttgaagatcaacacaaaaaccaaggacgaaatctaagaagccatacgggagagagactctgtgaaggtaaagaaggtagtcaatgtgcagaaaacttcagtcccaatctcagtgtgacgaagaagactgccggagtaaaaccatatgagtgtactatctgtggaaaagccttcatgcgtctctcatcccttactagacacatgaggtctcacactggatacgagctatttgagaagccatataaatgtaaggagtgtgagaaagcctttagttatctcaaatcctttcaaagacatgaa

SEQ ID NO: 203856 - DNA, 576 bp, Homo sapiens
  Payload ID: 20205
  Gene Name: zinc finger protein 791
  ENST ID: ENST00000600752
  CDS Start-End: 327-576
gcttagcttggggtctcctggccccttgacgcgtcaggttgctgtacccctgcatcggatgcgctgtaccctgcgctggctccgtgaaccttagggacaacaccgggacacccgcgaggccggaaaatggggaaaaatgggaagacccgaatgttgaagatcaacacaaaaaccaaggacgaaatctaagaagccatacgggagagagactctgtgaaggtaaagaaggtagtcaatgtgcagaaaacttcagtcccaatctcagtgtgacgaagaagactgccggagtaaaaccatatgagtgtactatctgtggaaaagccttcatgcgtctctcatcccttactagacacatgaggtctcacactggatacgagctatttgagaagccatataaatgtaaggagtgtgagaaagcctttagttatctcaaatcctttcaaagacatgaaaggagtcacactggagaaaaaccctataaatgtaaacaatgtggaaaaaccttcatatatcaccagccctttcaaagacatgagcggactcacattggagaaaaaccctatgaatgtaagcaat

SEQ ID NO: 203857 - DNA, 576 bp, Homo sapiens
  Payload ID: 20205
  Gene Name: zinc finger protein 791
  ENST ID: ENST00000597691
  CDS Start-End: 161-295
aaatgcgtgctacgtcactgtgcgatcgggttgtgcttagcttggggtctcctggccccttgacgcgtcaggttgctgtacccctgcatcggatgcgctgtaccctgcgctggctccgtgaaccttagggacaacaccgggacacccgcgaggccggaaaatgatggggtctggctgtgttgctcaggctgatcttgaactcctgggctcaagcgatcctccaccctcagcatcccaaagtgctaggattccaggcatgagctactattaccggcccaacattctcattttctgaaagcaatagactcagtggcttttgaggatgtgtctgtgagcttcagccaggaggagtgggctctgctggctccttcacagaagaaactctacagagatgtgatgcaggaaacattcaagaacctggcatctataggggaaaaatgggaagacccgaatgttgaagatcaacacaaaaaccaaggacgaaatctaagaagccatacgggagagagactctgtgaaggtaaagaaggtagtcaatgtgcagaaaacttcagtcccaatctcagtgtgacgaag

SEQ ID NO: 203858 - DNA, 3888 bp, Homo sapiens
  Payload ID: 20206
  Gene Name: zinc finger protein 792
  Uniprot ID: Q3KQV3
  ENST ID: ENST00000404801
  CDS Start-End: 388-2286
cggggaggctgagtccccaggagctggggaccccgagttgggggcggggcggctggggctacgcccgtgaagctgccccgccggctttcccggaccgcgagggggacagtgaggccgggaccccctccgcgcctttgcaccagccgtgaccccttgcaacgggggtacccagcggagctgcgcgctctcggcgcccccggagcctgcgccccgggccccttgcgcattttgcacgggggagactgaggctaggagtgcgaccctcagcccggggtcacacctcgtctggggcacggccaggtgggtggtagcctcagcctgcgagaccccctacccccgccccgtggtttcccgcaccgtggggccctgctctgaccacagactccgatggcagcggcggcgctgcgggaccccgcgcagggctgcgtgacctttgaggacgtgaccatttacttctcccaggaggagtgggtgctcctcgatgaggctcagagactcctgtactgcgatgtgatgctggaaaactttgcacttatagcctcgctgggacttatatctttcaggtcccacatcgtttcccagttggagatggggaaagagccctgggtgcctgacagtgtggatatgacatcagccatggccagaggggcttatggcaggcctggctctgatttttgccatggaacagagggcaaggacttaccttctgagcataacgtttctgtagaaggagtggcacaggacaggagtcccgaggcaactctgtgcccccagaagacctgcccctgtgacatatgtggcctacgtttgaaagacattttgcatttggctgaacaccagacaacacatcccaggcagaaaccatttgtgtgtgaggcatatgtgaaaggctctgagttcagtgcaaaccttccccggaaacaggtgcagcagaacgtacacaaccctatcagaacggaggagggccaggcttcccctgtaaagacctgcagagaccacacatcagatcagctttccacctgcagggagggtgggaaggactttgtggccacagcagggtttctgcagtgtgaggtcactcccagcgatggggagccgcacgaggccaccgaaggtgtggtggattttcacattgcactaaggcataacaagtgctgtgaatctggggatgccttcaataacaaatccactcttgttcagcaccagagaatccacagcagagaaaggccttatgaatgcagcaaatgtggaatcttcttcacttacgccgctgacctcactcaacaccagaaagttcacaatagaggaaaaccgtatgagtgctgtgaatgtggaaaattcttcagccagcactccagccttgttaaacatcgcagggttcacaccggtgaaagccctcacgtgtgtggtgactgtgggaaattcttcagccgaagctccaacctcattcagcataagagggttcacactggtgaaaagccatatgagtgcagcgactgtgggaagttcttcagccagcgttccaacctcattcatcataagagggttcatacgggcagaagtgcccatgagtgcagtgaatgtgggaaatctttcaactgcaactccagcctaattaaacattggagagttcacactggagaaagaccttacaagtgtaacgaatgtgggaaattcttcagccacattgccagcctcattcaacatcagatagttcacactggcgagcggcctcacgggtgtggtgagtgtgggaaagccttcagccgaagctctgacctcatgaaacatcagcgagttcacactggtgagcggccttatgaatgcaatgaatgtgggaagttatttagccagagctccagcctcaatagccatcggagacttcacactggtgaacggccttaccagtgcagtgaatgtgggaaattctttaaccaaagctccagcctcaataaccaccggagacttcacaccggcgagcggccttatgagtgcagcgaatgtgggaaaaccttcaggcagaggtccaatctgaggcagcacctgaaagttcacaaaccagacaggccttacgaatgcagcgaatgtgggaaagccttcaaccaaaggcctaccctcattcggcatcagaagattcacatcagagaaaggagcatggagaatgtgctccttccctgttcacagcacacaccagagataagctctgagaacagaccttatcagggcgctgtcaactacaagttgaaacttgttcatccaagtacccaccctggggaggttccctaggaatgctagctgtgttggaagctttctggagacaagttacattctcttactgtagagtttatcagcgttttttcactgctggggttgtgatagaagccatgtcagcaccacacactgcagctctccaaagagtgtgtccaccactccactgtgctcagggaaggcagacctctcctctctctttccaatccctaaagggaattaggagtagtctgaagccttgggaagatgtcattcccgccctgtatggctggtttagccatggacatgaccagcttttggctgtgaagacctgagcagggttttgccaacagcttgttctagagaaggtttccctttttctgggacattgttggtctcatgttatgcctgtgaaggatttgtccagccttcatgttactctacacaacaacttatctcctgtgtattgccctggttcatgtgatgataatggccttatgataaagccgcctttagtcttccatgttctgatcactgtgtggggtggttcaagagcagagttaagatctaccaaactgaaggggtctccagattatcttggaggggacaggaggatggcagagaaacaactgtcaatccagatttgacctcatttgcattgccaccaaggcctcctaggaaaaattgtaggaatttatgggtataatattgtggtctgaatggcgtgaatttttatcccgaggagggggcagttgtgacaacctccagtgcatgtgggaacagcatgaattgggtcccttattcccagggggtgccccatattccccaatactgtaaagcagatgctgtttagcacctgccaaggagccatatgccctgaagttcagcattaggcaggtatctcttaactgtaagacataccaggcccagctgggaccataatttgtacagaaacactggatgtgattaatagggagtaggcgagattatagcaaaccagcagaaatggaactctgctaaatgtgcatccgtgaatgctcccttgaatgtggctgtgcaggattcagggtttgcagaaattctcaggacctcagacctctgtcctatgactaatgttactggcagagcaaataatctaaaggttttggttttgtggattaccatctccgtgctgtgcatctgaaggccagtgctgtgctggcaggaaaatagggactgagaaaaagcagatcctatactatagggactgtagtatctatgacgtagccagccattctttgctcccaaggcaagaagaaagagatgacagagtcaatatagggttgccaaatcggattttctaaaatgagtaggaagttggatttttatgtgcaacagtttcttttaatgctttgttgatatgtgattgtcatgcaataattattcatatttggtaagttttgtacatatattatgtacactcagggaaccaataccataatcatgataatgaacgtatccatcacctgcaaagctacctcatgcccctttacattccctccttgccttccctaggaaaccgttgatttacattttttactttagatttgtttgccttttctagaattaacacaattggaatcataaagtatttatactctc

SEQ ID NO: 203859 - DNA, 2567 bp, Homo sapiens
  Payload ID: 20206
  Gene Name: zinc finger protein 792
  ENST ID: ENST00000605484
  CDS Start-End: 388-2085
tccctcctctccctgagctgcccccacacctgctgcctgaagccttgcagggaagctccaggcatgaggggtcttgcggttagctgtgtgactacctctgactcggccattccctcctgggtgattatccagatctgacagttctgtggtttagattctgtgcctttcctcttgctaatatttcctaagcctgactgtgccaggaattccaatcactgatgtggttactgcttgccgtgaccacccaatgtccctgtgtcatacggagcttcctgtcttgtagtctatcatggggtagttcaactgggcaggtgctggccactgacccactctgtctttcccttaggacttatatctttcaggtcccacatcgtttcccagttggagatggggaaagagccctgggtgcctgacagtgtggatatgacatcagccatggccagaggggcttatggcaggcctggctctgatttttgccatggaacagagggcaaggacttaccttctgagcataacgtttctgtagaaggagtggcacaggacaggagtcccgaggcaactctgtgcccccagaagacctgcccctgtgacatatgtggcctacgtttgaaagacattttgcatttggctgaacaccagacaacacatcccaggcagaaaccatttgtgtgtgaggcatatgtgaaaggctctgagttcagtgcaaaccttccccggaaacaggtgcagcagaacgtacacaaccctatcagaacggaggagggccaggcttcccctgtaaagacctgcagagaccacacatcagatcagctttccacctgcagggagggtgggaaggactttgtggccacagcagggtttctgcagtgtgaggtcactcccagcgatggggagccgcacgaggccaccgaaggtgtggtggattttcacattgcactaaggcataacaagtgctgtgaatctggggatgccttcaataacaaatccactcttgttcagcaccagagaatccacagcagagaaaggccttatgaatgcagcaaatgtggaatcttcttcacttacgccgctgacctcactcaacaccagaaagttcacaatagaggaaaaccgtatgagtgctgtgaatgtggaaaattcttcagccagcactccagccttgttaaacatcgcagggttcacaccggtgaaagccctcacgtgtgtggtgactgtgggaaattcttcagccgaagctccaacctcattcagcataagagggttcacactggtgaaaagccatatgagtgcagcgactgtgggaagttcttcagccagcgttccaacctcattcatcataagagggttcatacgggcagaagtgcccatgagtgcagtgaatgtgggaaatctttcaactgcaactccagcctaattaaacattggagagttcacactggagaaagaccttacaagtgtaacgaatgtgggaaattcttcagccacattgccagcctcattcaacatcagatagttcacactggcgagcggcctcacgggtgtggtgagtgtgggaaagccttcagccgaagctctgacctcatgaaacatcagcgagttcacactggtgagcggccttatgaatgcaatgaatgtgggaagttatttagccagagctccagcctcaatagccatcggagacttcacactggtgaacggccttaccagtgcagtgaatgtgggaaattctttaaccaaagctccagcctcaataaccaccggagacttcacaccggcgagcggccttatgagtgcagcgaatgtgggaaaaccttcaggcagaggtccaatctgaggcagcacctgaaagttcacaaaccagacaggccttacgaatgcagcgaatgtgggaaagccttcaaccaaaggcctaccctcattcggcatcagaagattcacatcagagaaaggagcatggagaatgtgctccttccctgttcacagcacacaccagagataagctctgagaacagaccttatcagggcgctgtcaactacaagttgaaacttgttcatccaagtacccaccctggggaggttccctaggaatgctagctgtgttggaagctttctggagacaagttacattctcttactgtagagtttatcagcgttttttcactgctggggttgtgatagaagccatgtcagcaccacacactgcagctctccaaagagtgtgtccaccactccactgtgctcagggaaggcagacctctcctctctctttccaatccctaaagggaattaggagtagtctgaagccttgggaagatgtcattcccgccctgtatggctggtttagccatggacatgaccagcttttggctgtgaagacctgagcagggttttgccaacagcttgttctagagaaggtttccctttttctgggacattgttggtctcatgttatgcctgtgaaggatttgtccagccttcatgttactctacacaacaacttatctcctgtgtattgccctggttcatgtgatgataatggccttatgataaagccgcctttagtcttc

SEQ ID NO: 203860 - DNA, 6712 bp, Homo sapiens
  Payload ID: 20207
  Gene Name: zinc finger protein 793
  Uniprot ID: Q6ZN11
  ENST ID: ENST00000445217
  CDS Start-End: 36-1256
tacaggtgtcagatctttttcaagaacagcagaaaatgatcgaataccagatacctgtgtcattcaaagatgtggttgtgggcttcacccaagaggagtggcaccggctgagtcctgctcagagggccctgtaccgggatgtgatgctggaaacctatagcaacctcgtctcagtgggttatgaaggcaccaaaccagatgtgatcctcagactggagcaggaagaagcaccatggattggtgaggcagcatgcccgggctgccactgttgggaagacatctggcgagttaatatccagaggaaaagacggcaagacatgcttttgaggccaggcgcagccataagcaagaaaacattgcccaaggagaaaagctgtgaatataataagtttgggaaaatatcacttctgagcactgatcttttttcttcaatccagagccctagtaactggaacccttgtggaaagaatttgaaccataatttagacttgattggttttaagagaaactgtgcaaaaaagcaagatgagtgttatgcttatgggaaattgcttcagcgtataaatcatggtagacgacctaatggagaaaagccccggggttgcagtcactgtgagaaagctttcacccagaacccggcacttatgtataaaccagcagtaagtgattctctcttgtacaaacggaagagggttccacctacagaaaaaccccacgtctgtagtgagtgtgggaaagccttctgctacaagtctgaattcattaggcatcagagaagtcacactggggagaagccttatggctgcactgactgtgggaaagccttttcacataagtcaaccctcatcaaacaccagagaattcacactggggtaagaccctttgaatgttttttttgtgggaaagcctttacccagaagtcacaccgcacagaacatcagagaacacacacaggagagagaccctttgtctgcagtgaatgcgggaaatcgtttggtgagaagtcatacctcaatgtacatcgaaaaatgcacacaggagaaagaccgtatcgttgcagagaatgtggaaaatccttcagccagaagtcatgcctcaataaacattggagaactcacacaggagagaagccctatgggtgcaatgaatgtgggaaagctttctaccagaagccaaacctcagcagacatcagaaaattcatgctcggaagaatgcctacaggaatgaaaacttaataattgtgggaaatacttgagcaaaatatctggtttcatggtatgtagggaattttttttttttttttttgagttggaatctcactttgtcacccaggctggagtgcagtggcgcgatctcggcttactgcaagctctgcctcccgggttcacgccattctcctgcctcagcctcccgagtagctgggactacaggtgcccaccaccatgcccggctaattttttttttgtatttttagtagagacggggtttcaccgtgttagccaggatggtctcgatctcctgaccttgtgatctgcccgccttgtcctcccaaagtgctgggattacaggcgtgagccaccgcgcctggccggtatgtagggaatttatccttaggagaaatcttatcattttaatgaatttgaacagtgtgtttttattttatttatttatttattttgagttgtattctctgtttcccaggctggagtgcaatggcactatctcggctcactgtaacctcagcctcccaggttcaagcagttctcctgcctcagcctcccaagtagctgggattacaggcacctgccaccacgcctggctaatttttgtatttttagtagagatggggtttcaccatgttggtcaggctggtctctttggctaggctggtctcgaactcctgacctcgtgataccccccaaccccccgcccttggcctcccaaagtgttgggattacaggcatgagccaacgcgcccaaccgacagtgttgtatcataatggaaatcatgatctaattgtgatacaaacttttctagaaaatactttctcaaacataagcatggacaccctggcatgtaaacgtttaaaaatgtattaaatggaataacagcagaatacaaaatatctgtgaagagacttaaaggcatactctggtatattccacagtgagccatacaatcagcattatttgtattttggagttgtaaatgtgaaattaacataaaatgtgaatatcagacacatgtcacacaacatatagaatgccattcagaaaacttttccactttaaatatcatcattgtcttttgatgtcttaacaatacaaaaaaataacaacaacatggcccactattgttaaaagaactttattataccagctacatttttccacctttttgtaatacatgtaaatggctatagaggttgttactgtcctctgcagaaataataaagcagtgtttttaaatgtatttggataatttggccaaaaattttactaaaatgtagttatttatattaaaaatgcaagctaaggaatagtttaagaacctgatactgggtaaatgaaacactgtaaactatttgacaaaatgtagtgtcaccctggtgtacagtacactgttcatattttcttagtcttgcttaaaatatcttgtagcaaattagtagcattgctacactattctagatacactattctatatacaggttgtataactcagaaatgtttcatgcgtagaccactgaaggagaatttcttttctctctatccctctgcaaattaattcaagaatattcatttttttcatataaatttccttgcaagtgtcctagacactaaatcccaaggttttaattatttcaatgtttggaaagaagtctgcttccctgagttgctatgtcatccatattagaaaataaatggccatgtggaatctacatttttcaagatttccctccatgtaagactgcctgatccagaatgagaaaggagacataaccacagatatcaatatgattttttaagtgataaaaagatacctcatacaactctaatcaacatattttttaaaaagaggaggtggatgcttttctaataaacttaagttatgaaaactgcaataagaagtagaaaacttggtaggatagttaacattgaaaaactcaaaaaagctattaaagatctataatgggaaaatgctccaggctcagaagagttcatgcttagttctatcttttaaagaaagagtaataccagtgttatttattatatggatgtaatacaatccatgaactgtactcatttattttattaagtcagaataaattttaacaccaaaatcaaatacagatagttgaaaaaagaaaacttctgctgggtgcggtggctcacgcctgtaatcccaacactttgggaggccgaggcaggtggatcatgaggtcagaagttcgagatggtgaaaccccatctctactaaaaatacaaaaattagccgggtgtggtggcacacacctgtagtcccagctacttgggaggttgaggcatgaggcaggagaattgcttgtacccaggaggtagaggttgcggtgagccaagatcgtgccatccagcctgggtgacaagagcgaaactccgtcaaaaaaaaaaaaaaaaaaagaaaacttcagaccagtcttactcatgaatatagaaacaaaaattatagttaaaatactagcaaatagaattcagccatatacccaaagagtgacatagtaagagtcatcccaagaatgccaaaccagttcagttaataggaaatgcatcaatcaaattaacagtttaaaggagaagaatcatatgaactctcaacagatactgagaaggcatttcatagaatgtgttaatttacattgtaatagatgggaaccacttaaagcggtttttcttaaaaaaaattttttttaacccaaaccccaaagcatatattatgccaaagccattttttaaaatcaggaattcaatattggcttagagattccagtgaaggcaataaaaagaaatgaattggtataaacagcagaaaaggtaaaactatccatttttactgatgatatggttgtacaccaataaatgaaaagactattttttgagttaacttttctaagaagacagggtaccaaaatcaagagctgttctccatactgacaagaaaacataatttatatgtacttcttttggaattacactaaatctcaatgattttttgacaatcattgaaaaaaatatatgaaaaaaatcataccatgtataaaaacatcacatgtacccaataaatatatacaacaattatatatctataataattaaaaatttttaaaatgccatgctagataccagaagataacatgaagccattctaatgaaattaatattgtattggcaaaggaacaggtaaatacatcattagaacacagtagaaaattcagaaatagacttcgatatatatgaactttttcatatgtgaaaaaggtgaaatctgaaaccacaggggaaaagagtagtttacttaaaaagaattctggaacagaaccttttaatcttaaaggaagaaaatttggattaacagcacaaaaataaattctgggtggctttaagacgtaaaattttaaagcaacagaattcttaaaagaaaatcaaaggagcctatgtgtacaatctaggagttgggagatattaactttaccaacacaggacactcagaagctatttagaaataagcagttgaaggctgggtgcagtggctcatgcctgtaatcccaacactttgggaggctgaggcaggaggatcacctgaggttaggagttcaagactagtctggtcaacatggtgaaaccccatctccactaaaaatacaaaaattagctgggtgtggtggcacatgcctgtagtcccagctacttgggaggctgaggcaggagaatcacttgaacctggaaggcaggggttgaagtgagctgagattgcaccactgcactccagcctgggcaacagagcaagactccatctcagaaaaaaagaaaaagaaaaaaaaaaggaaacaaacatttgactacgtagaatcttttggtacaatcttttgggtgacaaaagatgccatcagcaaactcaagagataatagattgtggggaaatatttgtaaagctgatcagagagaaggcattcatgaaatggacaggaaaaaaacccaatagcaaaatgtggcaaagaatatgagttgacagttgtgagaagagcaaatctaagtggccaatggacctgtccaaaaatgtttatcctcagtagtcactgggggatgcagatttaaagttaaaatcaaataacactgtgtaacagcatttttagctatcagaacaaaagatgttacacactgctggtggagaaataaattttgaaaaacaatgcaaattactgttttggaaagaaatctggtaatatttaggctgggcgtggtggctcacacctgtaatcctagcactttgggaggccgaggcaggcaaattgtctgaggtcgggagttcgagaacagcctggccagcatggtgaaaccccgtctctactaaaaatacaaaaattagctgggcatggtggcaggcacctgtgatcccagctactcgggaggctgaggcaggagaatcacttgaacccaggaggcagaggttgcagtgagccaagatcgcgccattgcactccaacctgggcaacagagcaaaaagattccatctcaaaagaaaagaaaagaaatctgttaatattattaaaatatttatgtcactttggagaatcttcccttagaagtaaaagctccaatacataaaagacagatgaacatgtgaacatggacatttattgtaaaaattgttcttaatggcaaaaaaacccccaaaaccaaagcaaacactagaatcaaagtaaatacccatcaactgggaaattgtagaaaggaaaaaactatagtgtatccattccatagaatgttaatatagccattaaggtggacaaattaaaactatgctagtggacttgagtggaattccacaatgttctcttgagtgaaaaatgcaaggtagatattaagtatgttaaatatgactccatttttttaaatcattaacaaaatgtctctaggtgtttgtcagcaataaacggtatctatatatgtttatttgattttatgtgcatgaagaaaagtatagaagagtatgcattgacttggagggaggtgggtaatgcaggtaggttatgggggagtcaggggtgtagggaaaaggaaaaccaaaaaagaaaaatacataaatgactgaatcacgggtgataccacaaatgtgtgagttagtaaatttggctggggatgggggagctagaattttgctaatttgtggggatgttcatggtatatattgtaaaaagggaaaatttcataataatgtatacgattctatttttaaaaaaagtaaaaactcctgtgtgtgtatatatgcatgtggatgtttatatgaacatagaaaagtgtagaagaatacacacgaaggtgttaacattcattggttaccttggtggagaagggtaataagttttctgaatacctttgcattgtcttgttcacatatattgcttttgtaatttgaaaaacaaaataaagggggaaaacatttcaaactgaatg

SEQ ID NO: 203861 - DNA, 4073 bp, Homo sapiens
  Payload ID: 20207
  Gene Name: zinc finger protein 793
  ENST ID: ENST00000542455
  CDS Start-End: 750-1667
tacaggtgtcagatctttttcaagaacagcagaaaatgatcgaataccagatacctgtgtcattcaaagatgtggttgtgggcttcacccaagaggagtggcaccggctgagtcctgctcagagggccctgtaccgggatgtgatgctggaaacctatagcaacctcgtctcagtgggttatgaaggcaccaaaccagatgtgatcctcagactggagcaggaagaagcaccatggattggtgaggcagcatgcccgggctgccactgttgggggatcagcaaactgtggcctaccgattggccacctgctttgtgaataaagttttattagaacacaaccacattcttacgtttacatgttgtctatattttcatggtatggcgggagagttgagtcattgtgacggagaccatatggcccacaaagcctttactttctgactccttaagaataagtttgccaacctctgctctgtaatatcctattttctttgaaattattggtctctatactctatgatatattgaattccatttgtgccagtgttcagaatcctctttactcatagaacactcttccctgcgtttgtgctttgggttatggttcatgttctctatttgtgtgctgtgcactctttaaattttgagagcatttcttaagtagtatgaagtttcataaggatgattcactgtactttctccagaagacatctggcgagttaatatccagaggaaaagacggcaagacatgcttttgaggccaggcgcagccataagcaagaaaacattgcccaaggagaaaagctgtgaatataataagtttgggaaaatatcacttctgagcactgatcttttttcttcaatccagagccctagtaactggaacccttgtggaaagaatttgaaccataatttagacttgattggttttaagagaaactgtgcaaaaaagcaagatgagtgttatgcttatgggaaattgcttcagcgtataaatcatggtagacgacctaatggagaaaagccccggggttgcagtcactgtgagaaagctttcacccagaacccggcacttatgtataaaccagcagtaagtgattctctcttgtacaaacggaagagggttccacctacagaaaaaccccacgtctgtagtgagtgtgggaaagccttctgctacaagtctgaattcattaggcatcagagaagtcacactggggagaagccttatggctgcactgactgtgggaaagccttttcacataagtcaaccctcatcaaacaccagagaattcacactggggtaagaccctttgaatgtttttttgtgggaaagcctttacccagaagtcacaccgcacagaacatcagagaacacacacaggagagagaccctttgtctgcagtgaatgcgggaaatcgtttggtgagaagtcatacctcaatgtacatcgaaaaatgcacacaggagaaagaccgtatcgttgcagagaatgtggaaaatccttcagccagaagtcatgcctcaataaacattggagaactcacacaggagagaagccctatgggtgcaatgaatgtgggaaagctttctaccagaagccaaacctcagcagacatcagaaaattcatgctcggaagaatgcctacaggaatgaaaacttaataattgtgggaaatacttgagcaaaatatctggtttcatggtatgtagggaattttttttttttttttttgagttggaatctcactttgtcacccaggctggagtgcagtggcgcgatctcggcttactgcaagctctgcctcccgggttcacgccattctcctgcctcagcctcccgagtagctgggactacaggtgcccaccaccatgcccggctaattttttttttgtatttttagtagagacggggtttcaccgtgttagccaggatggtctcgatctcctgaccttgtgatctgcccgccttgtcctcccaaagtgctgggattacaggcgtgagccaccgcgcctggccggtatgtagggaatttatccttaggagaaatcttatcattttaatgaatttgaacagtgtgtttttattttatttatttatttattttgagttgtattctctgtttcccaggctggagtgcaatggcactatctcggctcactgtaacctcagcctcccaggttcaagcagttctcctgcctcagcctcccaagtagctgggattacaggcacctgccaccacgcctggctaatttttgtatttttagtagagatggggtttcaccatgttggtcaggctggtctctttggctaggctggtctcgaactcctgacctcgtgataccccccaaccccccgcccttggcctcccaaagtgttgggattacaggcatgagccaacgcgcccaaccgacagtgttgtatcataatggaaatcatgatctaattgtgatacaaacttttctagaaaatactttctcaaacataagcatggacaccctggcatgtaaacgtttaaaaatgtattaaatggaataacagcagaatacaaaatatctgtgaagagacttaaaggcatactctggtatattccacagtgagccatacaatcagcattatttgtattttggagttgtaaatgtgaaattaacataaaatgtgaatatcagacacatgtcacacaacatatagaatgccattcagaaaacttttccactttaaatatcatcattgtcttttgatgtcttaacaatacaaaaaaataacaacaacatggcccactattgttaaaagaactttattataccagctacatttttccacctttttgtaatacatgtaaatggctatagaggttgttactgtcctctgcagaaataataaagcagtgtttttaaatgtatttggataatttggccaaaaattttactaaaatgtagttatttatattaaaaatgcaagctaaggaatagtttaagaacctgatactgggtaaatgaaacactgtaaactatttgacaaaatgtagtgtcaccctggtgtacagtacactgttcatattttcttagtcttgcttaaaatatcttgtagcaaattagtagcattgctacactattctagatacactattctatatacaggttgtataactcagaaatgtttcatgcgtagaccactgaaggagaatttcttttctctctatccctctgcaaattaattcaagaatattcatttttttcatataaatttccttgcaagtgtcctagacactaaatcccaaggttttaattatttcaatgtttggaaagaagtctgcttccctgagttgctatgtcatccatattagaaaataaatggccatgtggaatctacatttttcaagatttccctccatgtaagactgcctgatccagaatgagaaaggagacataaccacagatatcaatatgattttttaagtgataaaaagatacctcatacaactctaatcaacatattttttaaaaagaggaggtggatgcttttctaataaacttaagttatgaaaactgcaataagaagtagaaaacttggtaggatagttaacattgaaaaactcaaaaaagctattaaagatctataatgggaaaatgctccaggctcagaagagttcatgcttagttctatcttttaaagaaagagtaataccagtgttatttattatatggatgtaatacaatccatgaactgtactcatttattttattaagtcagaataaattttaacaccaaaatcaaatacagatagttgaaaaaagaaaacttctgctgggtgcggtggctcacgcctgtaatcccaacactttgggaggccgaggcaggtggatcatgaggtcagaagttcgagatggtgaaaccccatctctactaaaaatacaaaaattagccgggtgtggtggcacacacctgtagtcccagctacttgggaggttgaggcatgaggcaggagaattgcttgtacccaggaggtagaggttgcggtgagccaagatcgtgccatccagcctgggtgacaagagcgaaactccgtc

SEQ ID NO: 203862 - DNA, 409 bp, Homo sapiens
  Payload ID: 20207
  Gene Name: zinc finger protein 793
  ENST ID: ENST00000587490
  CDS Start-End: 1-251
tgtcattcaaagatgtggttgtgggcttcacccaagaggagtggcaccggctgagtcctgctcagagggccctgtaccgggatgtgatgctggaaacctatagcaacctcgtctcagtgggttatgaaggcaccaaaccagatgtgatcctcagactggagcaggaagaagcaccatggattggtgaggcagcatgcccgggctgccactgttgggccttgaaagtcctccgagagcttcagccacgttaatgactcttcaacctccatgcaaccccaccgcccatatctgagtgtttttctcggctctacttgattgcacctctgcccttatgtgcttggtccatctctctttctccagaatctttcccatgcaggtattcttacaaataaaagcttctatgattctc

SEQ ID NO: 203863 - DNA, 1240 bp, Homo sapiens
  Payload ID: 20207
  Gene Name: zinc finger protein 793
  ENST ID: ENST00000586187
  CDS Start-End: 1-179
gttatgaaggcaccaaaccagatgtgatcctcagactggagcaggaagaagcaccatggattggtgaggcagcatgcccgggctgccactgttgggtggctgtacctttttatattacaaccagtaatgcacaagggttccagtttcttcacaacctcgccatccatcatttgttataatcatgtgccacataatgatgttttggtcaatgagggaccacatatacagtagtggtcccataagattatagcagagctgaaaattttctttttataaaattgtatttattattattattttttttccaacttttatggagctgaaaagtttatactgcctaatgacattttgatgatcctggcactgtgtgtacctaggctaatgtgtttgtgtcttagtttttaacaaaaaagtctggaggctgaggcaagagaattgcttgatctgccctattaattgcaattttcacagttaactagtactatttttatttaaataatattacctgggaagcggaggttgcagtgagttaagatcacgccactgcactccagcctgggcgagagagtgagactctgtctcaaaataaaataaaattaaattaaaataaaaaaattaaaaaaatttttaagtagaagattatagaataaggatataaagaaaatatttgtgtacagctatacaatgtgtttgaagctaatttattacaagagagtcaaaacatttttaaaaattaaaaggtttataaagaaattatagtaagctaaggttaatttattaccgacaaaaaaattcaaataaatttagtgtagcctaagcatacagtacatataaagtctacagtagtatacagtactgccctagccttcacattcactcaccgctcagtcactgactcacccggagtaacttccagtcttgcaagctccatccacgacagcagtgctgagaagcaggagcccctgagcttggagacgcaggaagagccctgggaggcccagatcaaagggaggcagtcagctcatggagccgaggaatgttctgctgacacccaccccgagggtatccgtccagaatcaaatcagaagagcaatcccgagtgcccacctcacggtctgaagcacctcctcctacacccggacccaaacacgaggtcggctcaaggaggcactgaggtcacgacagtcagggtcctgcgctgcttgtcgcatgcagtctccttccccgaaccgccgcctgc

SEQ ID NO: 203864 - DNA, 3869 bp, Homo sapiens
  Payload ID: 20207
  Gene Name: zinc finger protein 793
  ENST ID: ENST00000587986
  CDS Start-End: 505-900
ggcacggtctctgaagaagatggattgggagtgtgtgggaatcaataaatgcgagttctgtgaaatgtcttgattttcagggtgcatggggctctttctggcaaaggtaatgacatacgcatctgtgccagcatcccaagagtgaggctggtttctggaaatccattctgactctgtgacagcggggatggatgtgaccttgcccgtggttagaaaacaaatttactgagttctctgggtgccctgcagacctttggatcctgccaccttgctggacgggagggctctctagctcctgccagcccttagagccacaggaccttggtcacaacatctacagaaggccctgcagctaagtgatctaatccaggatcatatgctgcctttaggtgacacatccctttagtctcctttaatcaggagcagtttctcagtgttcatcttccatgaagtcgacatttttgaagagtataggtgtcagatctttttcaagaacagcagaaaatgatcgaataccagatacctgtgtcattcaaagatgtggttgtgggcttcacccaagaggagtggcaccggctgagtcctgctcagagggccctgtaccgggatgtgatgctggaaacctatagcaacctcgtctcagtgggttatgaaggcaccaaaccagatgtgatcctcagactggagcaggaagaagcaccatggattggtgaggcagcatgcccgggctgccactgttggggtaagtgtgataaatctagcaaaaggggtactgaaggaggctggcacctttggaattttgttcagcattcttctcttaaaagccttgaaagtcctccgagagcttcagccacgttaatgactcttcaacctccatgcaaccccaccgcccatatctgagtgtttttctcggctctacttgattgcacctctgcccttatgtgcttggtccatctctctttctccagaatctttcccatgcaggtattcttacaaataaaagcttctatgattctcctgttcctgcttcctattctctgttgtgacaaactttccagataaaatgcttcagagctacctgctttccctaatttctgcactcaaatttaaatcactcccatagacagatgactgtgggatcagagaagaggaagcagtgaattccatgttggggtggggaggtgtgaaggaaatggctgagctgggcccatcttaaccactgctgattaaccctcagactcactgcccctctcccttcagctctgtaagacattccagcaatatccattgtaccctgagggctgatggatggcccactcttagggatgcctctgaacttctgcttctggcgctctctggagtgtgttcctccattaaactgtgctcttcagctgtcctgagactgtggtatcccggttatcagttgccctcctcttcttttcttctcctcttctgaaaatttcgtaactgcaaattccacaagaatgtatctagtcagcctcccgtttttccagctactctgttactatctatttccctggctcaaacccagcattttccttccaaggaacaattgcattttctgttttccataacttggttctctttccagtggtgtaatcctctcaaagaactcacccattctgagagtacatgattctcacaaccagcccttttgccatgttgggcccttttttcccccttgcactgcccacccccgcatttaaccagtctgtggattacactacaggtgtgcacttaccctgttctttgtgtgtcaaaaactaaaatcatctttatttgtccttgctacccctgccacacacacactcacactcacacacacacacacacacgcacacacacacaccacttcatcttgcttattattccagggctttgctaccgtgtggtcattttgaatcttctgcctttaccactcactctaactgttccattcatatgtgtggttttgttgattttttttcttctgagaaatggctttaaatcttcctctctgctttttttttttctttttgagacagtgtctcactctgtcacccaggctggagtgcagtggcatgatcatggctcactgcagccttgacctcctgggctcaagcgatcctcccacctcttaacctcccgagtaactgggattatattcacgtgctaccacacctggctaattttcattttttttgtagagaaggggttttgcagtgccgctcaggctggtctcaaactcctgggctcaagcagtccacctgctttggcttcccaaagtgctggatttactggcatgagccaccatgcccagtccttctccacttttttttgttgttattgttcagatgaagtcttgttctgtcacccaggctggaatgcagtggtgccatctcagctcactgcaacctccgcctcctgggtttaagcaattctctgcctcagcctccggagtagctgggattacaggcacgtgccaccacccccagctaatttttgtatttttagtagagatggggtttcaccatcttggccaggctggtcttgatctcctgacctcgtgatccacccgccttagcctcccaaagtgctgggattactggcgtgagccactgcacccagccccacttttaattttccactgatatctcctaaaatgagacccagattatctcatgactgaatgtctttaagtgaggggttattaattatttttgtgccatggacttcttaggcattcttttgaaggctatagacctcacttctatgtataaaaatataataacgttcataagattataaaataaatgactaaagtacagtaattatcaaaataagctagaaaatagttatcaaaaaaaaatttttttttttttagatggagtttcactctgtcgcccaggccggagtgcaatggcatgatctcagctcactgcagcctcctcctcctgggttcaagcgattctcctgcctcagcctcccgagtagctgggactacaggtgtgtgccaccacgcccagcttattttctatttttagtagagactgggtttcatcatgttggtcaggctagtcttgaactcctgacgtcagatgatccacctgcctcggcctcccaaaatgctgggattacaggcgtgagccaccgcgcccagcttcaaaatattttcaaaatgtgcaatataatagtagatgtactttttcatttatacgttaatgaggcctagcatcaggtctaataactgtcatgatctcaaagaagagatgattataaacataataatgtgacatgaaaataacaatattcacaaactagtatcaagtcacaggaaccactaataccactgtgttttgttgcttatattcatattcaaaggaaatgttcaattgtagttggaactcagtgaaaacaaaaatgtaatttcttttctatcaaagttcacaagccccctgttttctgccaagttaagaactcttgcttaagtcctagttagctttgttgattttattttttaatctgtttcaccttagagtgctttaccgtttatattgtaactaactagcccaacatgatattcccttggatgactgctataccagtgcttgttaagctccaaggtgtttggaatcaccggggcatcttgttgaaatgcagagtctgattaagtaggtctggggcggtgccttagattctgcacatctaacaagctccaagtaaggccaaaattgccacttgaagacccacatgctggatagcaaggtactgtataacatttaaccttctttcttctgtaacagggatcagcaaactgtggcctaccgattggccacctgctttgtgaataaagttttattagaacacaa

SEQ ID NO: 203865 - DNA, 1915 bp, Homo sapiens
  Payload ID: 20207
  Gene Name: zinc finger protein 793
  ENST ID: ENST00000589319
  CDS Start-End: 416-832
ggctctttctggcaaaggtaatgacatacgcatctgtgccagcatcccaagagtgaggctggtttctggaaatccattctgactctgtgacagcggggatggatgtgaccttgcccgtggttagaaaacaaatttactgagttctctgggtgccctgcagacctttggatcctgccaccttgctggacgggagggctctctagctcctgccagcccttagagccacaggaccttggtcacaacatctacagaaggccctgcagctaagtgatctaatccaggatcatatgctgcctttaggtgacacatccctttagtctcctttaatcaggagcagtttctcagtgttcatcttccatgaagtcgacatttttgaagagtataggtgtcagatctttttcaagaacagcagaaaatgatcgaataccagatacctgtgtcattcaaagatgtggttgtgggcttcacccaagaggagtggcaccggctgagtcctgctcagagggccctgtaccgggatgtgatgctggaaacctatagcaacctcgtctcagtgggttatgaaggcaccaaaccagatgtgatcctcagactggagcaggaagaagcaccatggattggtgaggcagcatgcccgggctgccactgttgggaagacatctggcgagttaatatccagaggaaaagacggcaagacatgcttttgaggccaggcgcagccataagcaagaaaacattgcccaaggagaaaagctgtgaatataataagtttgggaaaatatcacttctgagcactgatcttttttcttcaatccagagccctacatggtgaaaccccgtctctactaaaaatacaaaaattagctgggcatggtggcaggcacctgtgatcccagctactcgggaggctgaggcaggagaatcacttgaacccaggaggcagaggttgcagtgagccaagatcgcgccattgcactccaacctgggcaacagagcaaaaagattccatctcaaaagaaaagaaaagaaatctgttaatattattaaaatatttatgtcactttggagaatcttcccttagaagtaaaagctccaatacataaaagacagatgaacatgtgaacatggacatttattgtaaaaattgttcttaatggcaaaaaaacccccaaaaccaaagcaaacactagaatcaaagtaaatacccatcaactgggaaattgtagaaaggaaaaaactatagtgtatccattccatagaatgttaatatagccattaaggtggacaaattaaaactatgctagtggacttgagtggaattccacaatgttctcttgagtgaaaaatgcaaggtagatattaagtatgttaaatatgactccatttttttaaatcattaacaaaatgtctctaggtgtttgtcagcaataaacggtatctatatatgtttatttgattttatgtgcatgaagaaaagtatagaagagtatgcattgacttggagggaggtgggtaatgcaggtaggttatgggggagtcaggggtgtagggaaaaggaaaaccaaaaaagaaaaatacataaatgactgaatcacgggtgataccacaaatgtgtgagttagtaaatttggctggggatgggggagctagaattttgctaatttgtggggatgttcatggtatatattgtaaaaagggaaaatttcataataatgtatacgattctatttttaaaaaaagtaaaaactcctgtgtgtgtatatatgcatgtggatgtttatatgaacatagaaaagtgtagaagaatacacacgaaggtgttaacattcattggttaccttggtggagaagggtaataagttttctgaatacctttgcattgtcttgttcacatatattgcttttgtaatttgaa

SEQ ID NO: 203866 - DNA, 4549 bp, Homo sapiens
  Payload ID: 20207
  Gene Name: zinc finger protein 793
  ENST ID: ENST00000588578
  CDS Start-End: 487-768
aactgaagggttaagagattcggcgtctgagcctcgcggggcctcagtggtggcggacagaggtttgcgggagctctttctggcaaaggtaatgacatacgcatctgtgccagcatcccaagagtgaggctggtttctggaaatccattctgactctgtgacagcggggatggatgtgaccttgcccgtggttagaaaacaaatttactgagttctctgggtgccctgcagacctttggatcctgccaccttgctggacgggagggctctctagctcctgccagcccttagagccacaggaccttggtcacaacatctacagaaggccctgcagctaagtgatctaatccaggatcatatgctgcctttaggtgacacatccctttagtctcctttaatcaggagcagtttctcagtgttcatcttccatgaagtcgacatttttgaagagtataggtgtcagatctttttcaagaacagcagaaaatgatcgaataccagatacctgtgtcattcaaagatgtggttgtgggcttcacccaagaggagtggcaccggctgagtcctgctcagagggccctgtaccgggatgtgatgctggaaacctatagcaacctcgtctcagtgggttatgaaggcaccaaaccagatgtgatcctcagactggagcaggaagaagcaccatggattggtgaggcagcatgcccgggctgccactgttgggggatcagcaaactgtggcctaccgattggccacctgctttgtgaataaagttttattagaacacaaccacattcttacgtttacatgttgtctatattttcatggtatggcgggagagttgagtcattgtgacggagaccatatggcccacaaagcctttactttctgactccttaagaataagtttgccaacctctgctctgtaatatcctattttctttgaaattattggtctctatactctatgatatattgaattccatttgtgccagtgttcagaatcctctttactcatagaacactcttccctgcgtttgtgctttgggttatggttcatgttctctatttgtgtgctgtgcactctttaaattttgagagcatttcttaagtagtatgaagtttcataaggatgattcactgtactttctccagaagacatctggcgagttaatatccagaggaaaagacggcaagacatgcttttgaggccaggcgcagccataagcaagaaaacattgcccaaggagaaaagctgtgaatataataagtttgggaaaatatcacttctgagcactgatcttttttcttcaatccagagccctagtaactggaacccttgtggaaagaatttgaaccataatttagacttgattggttttaagagaaactgtgcaaaaaagcaagatgagtgttatgcttatgggaaattgcttcagcgtataaatcatggtagacgacctaatggagaaaagccccggggttgcagtcactgtgagaaagctttcacccagaacccggcacttatgtataaaccagcagtaagtgattctctcttgtacaaacggaagagggttccacctacagaaaaaccccacgtctgtagtgagtgtgggaaagccttctgctacaagtctgaattcattaggcatcagagaagtcacactggggagaagccttatggctgcactgactgtgggaaagccttttcacataagtcaaccctcatcaaacaccagagaattcacactggggtaagaccctttgaatgttttttttgtgggaaagcctttacccagaagtcacaccgcacagaacatcagagaacacacacaggagagagaccctttgtctgcagtgaatgcgggaaatcgtttggtgagaagtcatacctcaatgtacatcgaaaaatgcacacaggagaaagaccgtatcgttgcagagaatgtggaaaatccttcagccagaagtcatgcctcaataaacattggagaactcacacaggagagaagccctatgggtgcaatgaatgtgggaaagctttctaccagaagccaaacctcagcagacatcagaaaattcatgctcggaagaatgcctacaggaatgaaaacttaataattgtgggaaatacttgagcaaaatatctggtttcatggtatgtagggaattttttttttttttttttgagttggaatctcactttgtcacccaggctggagtgcagtggcgcgatctcggcttactgcaagctctgcctcccgggttcacgccattctcctgcctcagcctcccgagtagctgggactacaggtgcccaccaccatgcccggctaattttttttttgtatttttagtagagacggggtttcaccgtgttagccaggatggtctcgatctcctgaccttgtgatctgcccgccttgtcctcccaaagtgctgggattacaggcgtgagccaccgcgcctggccggtatgtagggaatttatccttaggagaaatcttatcattttaatgaatttgaacagtgtgtttttattttatttatttatttattttgagttgtattctctgtttcccaggctggagtgcaatggcactatctcggctcactgtaacctcagcctcccaggttcaagcagttctcctgcctcagcctcccaagtagctgggattacaggcacctgccaccacgcctggctaatttttgtatttttagtagagatggggtttcaccatgttggtcaggctggtctctttggctaggctggtctcgaactcctgacctcgtgataccccccaaccccccgcccttggcctcccaaagtgttgggattacaggcatgagccaacgcgcccaaccgacagtgttgtatcataatggaaatcatgatctaattgtgatacaaacttttctagaaaatactttctcaaacataagcatggacaccctggcatgtaaacgtttaaaaatgtattaaatggaataacagcagaatacaaaatatctgtgaagagacttaaaggcatactctggtatattccacagtgagccatacaatcagcattatttgtattttggagttgtaaatgtgaaattaacataaaatgtgaatatcagacacatgtcacacaacatatagaatgccattcagaaaacttttccactttaaatatcatcattgtcttttgatgtcttaacaatacaaaaaaataacaacaacatggcccactattgttaaaagaactttattataccagctacatttttccacctttttgtaatacatgtaaatggctatagaggttgttactgtcctctgcagaaataataaagcagtgtttttaaatgtatttggataatttggccaaaaattttactaaaatgtagttatttatattaaaaatgcaagctaaggaatagtttaagaacctgatactgggtaaatgaaacactgtaaactatttgacaaaatgtagtgtcaccctggtgtacagtacactgttcatattttcttagtcttgcttaaaatatcttgtagcaaattagtagcattgctacactattctagatacactattctatatacaggttgtataactcagaaatgtttcatgcgtagaccactgaaggagaatttcttttctctctatccctctgcaaattaattcaagaatattcatttttttcatataaatttccttgcaagtgtcctagacactaaatcccaaggttttaattatttcaatgtttggaaagaagtctgcttccctgagttgctatgtcatccatattagaaaataaatggccatgtggaatctacatttttcaagatttccctccatgtaagactgcctgatccagaatgagaaaggagacataaccacagatatcaatatgattttttaagtgataaaaagatacctcatacaactctaatcaacatattttttaaaaagaggaggtggatgcttttctaataaacttaagttatgaaaactgcaataagaagtagaaaacttggtaggatagttaacattgaaaaactcaaaaaagctattaaagatctataatgggaaaatgctccaggctcagaagagttcatgcttagttctatcttttaaagaaagagtaataccagtgttatttattatatggatgtaatacaatccatgaactgtactcatttattttattaagtcagaataaattttaacaccaaaatcaaatacagatagttgaaaaaagaaaacttctgctgggtgcggtggctcacgcctgtaatcccaacactttgggaggccgaggcaggtggatcatgaggtcagaagttcgagatggtgaaaccccatctctactaaaaatacaaaaattagccgggtgtggtggcacacacctgtagtcccagctacttgggaggttgaggcatgaggcaggagaattgcttgtacccaggaggtagaggttgcggtgagccaagatcgtgccatccagcctgggtgacaagagcgaaactccgtcaaaaaaaaaaaaaaaaaaagaaaa

SEQ ID NO: 203867 - DNA, 625 bp, Homo sapiens
  Payload ID: 20207
  Gene Name: zinc finger protein 793
  ENST ID: ENST00000586138
  CDS Start-End: 465-625
aatgacaagggaactgaagggttaagagattcggcgtctgagcctcgcggggcctcagtggtggcggacagaggtttgcgggagtcagtggcacggtctctgaagaagatggattgggagtgtgtgggaatcaataaatgcgagttctgtgaaatgtcttgattttcagggtgcatggggctctttctggcaaaggtaatgacatacgcatctgtgccagcatcccaagagtgaggctggtttctggaaatccattctgactctgtgacagcggggatggatgtgaccttgcccgtggttagaaaacaaatttactgagatctaatccaggatcatatgctgcctttaggtgacacatccctttagtctcctttaatcaggagcagtttctcagtgttcatcttccatgaagtcgacatttttgaagagtataggtgtcagatctttttcaagaacagcagaaaatgatcgaataccagatacctgtgtcattcaaagatgtggttgtgggcttcacccaagaggagtggcaccggctgagtcctgctcagagggccctgtaccgggatgtgatgctggaaacctatagcaacctcgtctcagtgggttatgaaggcaccaaacc

SEQ ID NO: 203868 - DNA, 1488 bp, Homo sapiens
  Payload ID: 20207
  Gene Name: zinc finger protein 793
  Uniprot ID: Q6ZN11
  ENST ID: ENST00000587143
  CDS Start-End: 236-1456
aggacgaccaatttcagattcagggcgcggatgcagcataaatgggaaggcacggtttgagaaacggctctttctggcaaaggtaatgacatacgcatctgtgccagcatcccaagagtgaggctggtttctggaaatccattctgactctgtgacagcggggatggatgtgaccttgcccgtggttagaaaacaaatttactgagtgtcagatctttttcaagaacagcagaaaatgatcgaataccagatacctgtgtcattcaaagatgtggttgtgggcttcacccaagaggagtggcaccggctgagtcctgctcagagggccctgtaccgggatgtgatgctggaaacctatagcaacctcgtctcagtgggttatgaaggcaccaaaccagatgtgatcctcagactggagcaggaagaagcaccatggattggtgaggcagcatgcccgggctgccactgttgggaagacatctggcgagttaatatccagaggaaaagacggcaagacatgcttttgaggccaggcgcagccataagcaagaaaacattgcccaaggagaaaagctgtgaatataataagtttgggaaaatatcacttctgagcactgatcttttttcttcaatccagagccctagtaactggaacccttgtggaaagaatttgaaccataatttagacttgattggttttaagagaaactgtgcaaaaaagcaagatgagtgttatgcttatgggaaattgcttcagcgtataaatcatggtagacgacctaatggagaaaagccccggggttgcagtcactgtgagaaagctttcacccagaacccggcacttatgtataaaccagcagtaagtgattctctcttgtacaaacggaagagggttccacctacagaaaaaccccacgtctgtagtgagtgtgggaaagccttctgctacaagtctgaattcattaggcatcagagaagtcacactggggagaagccttatggctgcactgactgtgggaaagccttttcacataagtcaaccctcatcaaacaccagagaattcacactggggtaagaccctttgaatgttttttttgtgggaaagcctttacccagaagtcacaccgcacagaacatcagagaacacacacaggagagagaccctttgtctgcagtgaatgcgggaaatcgtttggtgagaagtcatacctcaatgtacatcgaaaaatgcacacaggagaaagaccgtatcgttgcagagaatgtggaaaatccttcagccagaagtcatgcctcaataaacattggagaactcacacaggagagaagccctatgggtgcaatgaatgtgggaaagctttctaccagaagccaaacctcagcagacatcagaaaattcatgctcggaagaatgcctacaggaatgaaaacttaataattgtgggaaatacttgagcaaaatatctggtttcatggtatgtagggaa

SEQ ID NO: 203869 - DNA, 1525 bp, Homo sapiens
  Payload ID: 20207
  Gene Name: zinc finger protein 793
  ENST ID: ENST00000627814
  CDS Start-End: 443-1525
attcaggatgggacgaccttataccgcggctctttctggcaaaggtaatgacatacgcatctgtgccagcatcccaagagtgaggctggtttctggaaatccattctgactctgtgacagcggggatggatgtgaccttgcccgtggttagaaaacaaatttactgagttctctgggtgccctgcagacctttggatcctgccaccttgctggacgggagggctctctagctcctgccagcccttagagccacaggaccttggtcacaacatctacagaaggccctgcagctaagtgatctaatccaggatcatatgctgcctttaggtgacacatccctttagtctcctttaatcaggagcagtttctcagtgttcatcttccatgaagtcgacatttttgaagagtataggtgtcagatctttttcaagaacagcagaaaatgatcgaataccagatacctgtgtcattcaaagatgtggttgtgggcttcacccaagaggagtggcaccggctgagtcctgctcagagggccctgtaccgggatgtgatgctggaaacctatagcaacctcgtctcagtgggttatgaaggcaccaaaccagatgtgatcctcagactggagcaggaagaagcaccatggattggtgaggcagcatgcccgggctgccactgttgggaagacatctggcgagttaatatccagaggaaaagacggcaagacatgcttttgaggccaggcgcagccataagcaagaaaacattgcccaaggagaaaagctgtgaatataataagtttgggaaaatatcacttctgagcactgatcttttttcttcaatccagagccctagtaactggaacccttgtggaaagaatttgaaccataatttagacttgattggttttaagagaaactgtgcaaaaaagcaagatgagtgttatgcttatgggaaattgcttcagcgtataaatcatggtagacgacctaatggagaaaagccccggggttgcagtcactgtgagaaagctttcacccagaacccggcacttatgtataaaccagcagtaagtgattctctcttgtacaaacggaagagggttccacctacagaaaaaccccacgtctgtagtgagtgtgggaaagccttctgctacaagtctgaattcattaggcatcagagaagtcacactggggagaagccttatggctgcactgactgtgggaaagccttttcacataagtcaaccctcatcaaacaccagagaattcacactggggtaagaccctttgaatgttttttttgtgggaaagcctttacccagaagtcacaccgcacagaacatcagagaacacacacaggagagagaccctttgtctgcagtgaatgcgggaaatcgtttggtgagaagtcatacctcaatgtacatcgaaaaatgcacacaggagaaagaccgtatcgttgcagagaatgtggaaaatccttcagccagaagtcatgcctcaataaacattggagaactcac

SEQ ID NO: 203870 - DNA, 2583 bp, Homo sapiens
  Payload ID: 20208
  Gene Name: zinc finger protein 799
  Uniprot ID: Q96GE5
  ENST ID: ENST00000430385
  CDS Start-End: 202-2133
gtcaatcaggcgcgcttcccagaggagtgtgtggttgaaaaagcccgcggcgtcttctccacccacctgcgctgggcgctcggtgctcggctctgtagctaagagacgacctggaagttccgtggcagcctgtgtcccgcgggaacccgcattggcagcgggagccgtccggaggacctgggacaccgcggaagtcgggaaatggcctcagtggctttagaggatgtggctgtgaacttcacccgagaagagtgggctttgctgggtccttgtcagaagaatctctacaaagatgtgatgcaggaaaccatcaggaacctggattgtgtaggaatgaaatggaaagaccagaacattgaagatcaatatagatatcccaggaaaaatctaagatgtcgtatgttagagagatttgttgaaagtaaagatggaactcaatgtggagaaacatctagccagattcaagatagtattgtgaccaagaacactcttcctggagtaggtccatatgaaagccgtatgagtggagaagtcatcatgggtcattcatcccttaattgttacatcagagttggtgctgggcacaaaccatatgagtatcatgaatgtggagagaagccagatacgcataaacaacgtgggaaagccttcagttaccacaactcacttcaaacacatgagaggcttcacactggaaagaaaccatataattgtaaagaatgtgggaagtccttcagttctttgggaaaccttcaaagacacatggcagtgcagcgtggagatggaccttataaatgtaagttgtgtgggaaagcgtttttttggcccagtttattacatatgcatgagagaacgcacactggagagaaaccatatgaatgtaagcagtgttctaaagccttttctttttacagttcctatctaagacatgaaagaacacatactggggagaaactgtatgaatgtaaacagtgttctaaagccttccctgattacagttcttgtctaagacatgaaagaactcacactggaaagaaaccctatacatgtaaacaatgtgggaaagccttcagtgcttccacttcccttcgaagacacgaaacaactcacactgatgagaaaccctatgcatgtcagcaatgtgggaaagcgtttcatcatctgggaagctttcaaagacacatggtaatgcacacgagagatggacctcataagtgtaagatatgtggaaaaggctttgattgtcctagttcactgaaaagtcatgaaagaactcacactggagagaaactctatgaatgcaagcagtgtgggaaagcgttatctcatagctcaagctttcgaagacacatgacaatgcacactggagatggacctcacaaatgcaagatatgtgggaaagcctttgtttatcccagtgtatttcaaaggcatgaaaagactcacactgcagagaaaccctataaatgtaaacaatgtggcaaagcctaccgtatttccagttctcttcgaaggcatgaaacaactcatactggagagaaaccctataaatgcaaatgtgggaaagcctttattgatttctattcctttcaaaatcacaaaacaactcatgctggagagaagccatatgagtgtaaggaatgtgggaaagcattcagttgtttccaatacctttctcaacatagaaggactcacacaggagagaaaccttatgagtgtaacacatgtaagaaagccttcagtcattttggtaacttaaaagtacatgaaagaattcactctggagagaagccgtatgaatgtaaggaatgtgggaaagcattctcttggctcacttgctttctacgacatgaaagaattcacatgagagagaaaccctatgagtgtcaacaatgtggtaaagccttcactcattcccgttttcttcaaggacatgaaaaaactcatactggagagaacccgtatgaatgtaaggaatgtgggaaagcatttgcttctctcagttccttgcatagacataaaaagactcactggaaaaaaactcacactggagagaacccgtatggatgtaaggaatgtgggaaagcatttgcttctctcagttccttgcatagacataaaaagactcactagcattctctctaaatgtatggaatgtgggaaagcatttattaattttatttcatttcagatacttgtacgaaacacattggagatagaccctgtgaatgtaagcacttggtaaaaccttaagtaatttcagtttctttccagtacagtcatcccttgatacctgctgggtattggttccagcactccgtgagccatgtccagtcccttttataaaatgacatatttgtatgtaacttacccacatcctcttgtatactctcaattatgtctagattacttaaaatacctcatgcattgtaaaagctatgcaaatagttgttctattgtattgtttagggactcatgataaggaaaagagtctatgtattttcagtatagatgcagtaattgtcagcctatcaacatagtatagtcagccagaacattaaagtttctttgtttcaactctca

SEQ ID NO: 203871 - DNA, 3036 bp, Homo sapiens
  Payload ID: 20208
  Gene Name: zinc finger protein 799
  ENST ID: ENST00000419318
  CDS Start-End: 751-2586
aagggctactccgggatctacggacccgggttcccctggcgtaggtcggccctcggccgcagggtggggctgggcatgcagccgggaccccgggcgtcctgtcccgttcctgcgcggcgactgcggccccggcgccctctctgggcagctccgcgcccgcagcctcgcgtctcccgagattgtgcggctgtaagcaacacaggttcgcggcccgactcactgcaccgagacgctgagggctgcagcagaaacagtttaatagccagagaggggaggacaccccagatccgcctccctgagggatttggggtctggacgggggcggctgggtgtagggtcgttggttggtggggaagtgaggggtgaatcctgggacaggaggtgaagaaaccgcattctgctgaatgggctccctcgttgggacttcaacctgattggcgccagcctttgctgggattcaggatctgagaactccggcgactcttgagcagttctcagagatcttatccccaggcacaatggggaagccggcggtcagcgtctgctgtgacctgactctcagggaggcggccccttgaggcagcggggctgagggcacctggttaatatctaactgcaatctcgcctccagcctggctcgcagttcctgtgaacccggcctcagtggctttagaggatgtggctgtgaacttcacccgagaagagtgggctttgctgggtccttgtcagaagaatctctacaaagatgtgatgcaggaaaccatcaggaacctggattgtgtaggaatgaaatggaaagaccagaacattgaagatcaatatagatatcccaggaaaaatctaagatgtcgtatgttagagagatttgttgaaagtaaagatggaactcaatgtggagaaacatctagccagattcaagatagtattgtgaccaagaacactcttcctggagtaggtccatatgaaagccgtatgagtggagaagtcatcatgggtcattcatcccttaattgttacatcagagttggtgctgggcacaaaccatatgagtatcatgaatgtggagagaagccagatacgcataaacaacgtgggaaagccttcagttaccacaactcacttcaaacacatgagaggcttcacactggaaagaaaccatataattgtaaagaatgtgggaagtccttcagttctttgggaaaccttcaaagacacatggcagtgcagcgtggagatggaccttataaatgtaagttgtgtgggaaagcgtttttttggcccagtttattacatatgcatgagagaacgcacactggagagaaaccatatgaatgtaagcagtgttctaaagccttttctttttacagttcctatctaagacatgaaagaacacatactggggagaaactgtatgaatgtaaacagtgttctaaagccttccctgattacagttcttgtctaagacatgaaagaactcacactggaaagaaaccctatacatgtaaacaatgtgggaaagccttcagtgcttccacttcccttcgaagacacgaaacaactcacactgatgagaaaccctatgcatgtcagcaatgtgggaaagcgtttcatcatctgggaagctttcaaagacacatggtaatgcacacgagagatggacctcataagtgtaagatatgtggaaaaggctttgattgtcctagttcactgaaaagtcatgaaagaactcacactggagagaaactctatgaatgcaagcagtgtgggaaagcgttatctcatagctcaagctttcgaagacacatgacaatgcacactggagatggacctcacaaatgcaagatatgtgggaaagcctttgtttatcccagtgtatttcaaaggcatgaaaagactcacactgcagagaaaccctataaatgtaaacaatgtggcaaagcctaccgtatttccagttctcttcgaaggcatgaaacaactcatactggagagaaaccctataaatgcaaatgtgggaaagcctttattgatttctattcctttcaaaatcacaaaacaactcatgctggagagaagccatatgagtgtaaggaatgtgggaaagcattcagttgtttccaatacctttctcaacatagaaggactcacacaggagagaaaccttatgagtgtaacacatgtaagaaagccttcagtcattttggtaacttaaaagtacatgaaagaattcactctggagagaagccgtatgaatgtaaggaatgtgggaaagcattctcttggctcacttgctttctacgacatgaaagaattcacatgagagagaaaccctatgagtgtcaacaatgtggtaaagccttcactcattcccgttttcttcaaggacatgaaaaaactcatactggagagaacccgtatgaatgtaaggaatgtgggaaagcatttgcttctctcagttccttgcatagacataaaaagactcactggaaaaaaactcacactggagagaacccgtatggatgtaaggaatgtgggaaagcatttgcttctctcagttccttgcatagacataaaaagactcactagcattctctctaaatgtatggaatgtgggaaagcatttattaattttatttcatttcagatacttgtacgaaacacattggagatagaccctgtgaatgtaagcacttggtaaaaccttaagtaatttcagtttctttccagtacagtcatcccttgatacctgctgggtattggttccagcactccgtgagccatgtccagtcccttttataaaatgacatatttgtatgtaacttacccacatcctcttgtatactctcaattatgtctagattacttaaaatacctcatgcattgtaaaagctatgcaaatagttgttctattgtattgtttagggactcatgataaggaaaagagtctatgtattttcagtatagatgcagtaattgtcagcctatcaacatagtatagtcagccagaacattaaagtttctttgtttcaactctca

SEQ ID NO: 203872 - DNA, 576 bp, Homo sapiens
  Payload ID: 20208
  Gene Name: zinc finger protein 799
  ENST ID: ENST00000595766
  CDS Start-End: 199-474
aatcaggcgcgcttcccagaggagtgtgtggttgaaaaagcccgcggcgtcttctccacccacctgcgctgggcgctcggtgctcggctctgtagctaagagacgacctggaagttccgtggcagcctgtgtcccgcgggaacccgcattggcagcgggagccgtccggaggacctgggacaccgcggaagtcgggaaatgcgtctcactctgttgtccaggctggagtgcagtggcacgatctcagctcactgcaacctccgcctcctgcgttcaagcgattctcctgcctcagcctcccgagtagctgggactacaggcctcagtggctttagaggatgtggctgtgaacttcacccgagaagagtgggctttgctgggtccttgtcagaagaatctctacaaagatgtgatgcaggaaaccatcaggaacctggattgtgtaggaatgaaatggaaagaccagaacattgaagatcaatatagatatcccaggaaaaatctaagatgtcgtatgttagagagatttgttgaaagtaaagatggaactcaatgtggagaaacatctagccagat

SEQ ID NO: 203873 - DNA, 9128 bp, Homo sapiens
  Payload ID: 20209
  Gene Name: zinc finger protein 8
  Uniprot ID: P17098
  ENST ID: ENST00000621650
  CDS Start-End: 132-1859
agttgtagtcgccgcgtcgccggtgcggccgccattgtccggcgttcggcgagtcgggtggtccctttggctggagtgcctctctggtctggggatcacctcaggcgctgtccttcactgggcgatccagcatggaccccgaggacgaaggggtagcgggagtgatgtctgtggggccgccggcggcccggcttcaggaaccagtgaccttccgggatgtggctgtggactttacccaggaggaatgggggcagctggaccctacccagaggatcctctaccgtgacgtgatgctggagacctttggtcacctgctctccataggtcctgagcttccgaagcctgaagtcatctcccagctggagcaagggaccgagctatgggtggctgagagaggaaccacccagggctgccatccagcctgggagcctcgatctgaaagccaagcatcacgcaaggaagagggcctgcctgaagaggagccatcccatgtcacgggaagggaaggattcccgacagatgctccttatcccaccacgttagggaaagacagggagtgtcagagccagagtctggcactcaaggagcagaataacttgaagcagttggaatttggcctcaaggaagcaccagttcaagatcaaggctacaaaactctcagactcagggaaaactgcgtcctgagttcaagcccaaatccattcccagagatctctagaggggagtatttgtatacttacgactcacagattacagactcagaacataactccagcttagtcagtcagcagacaggctccccaggaaaacagcccggtgaaaacagtgactgtcacagagattccagtcaggccattccaattacggaactcacaaaaagccaggtgcaggacaaaccctacaaatgtactgactgtgggaagtcgtttaaccataacgcacacctcaccgtgcacaagaggattcatacgggagaaagaccttatatgtgcaaggagtgtgggaaagccttcagccagaactcctccctcgtccagcatgagcgcatccacactggagacaagccctacaagtgtgccgaatgtgggaagtctttctgccatagtacacaccttaccgtccatcggaggattcacactggggagaagccctatgagtgtcaggactgtgggagggccttcaaccagaactcctccctggggcggcacaagaggacacacactggggagaagccatacacctgcagtgtgtgtgggaaatccttctctcggaccacttgccttttcctgcacctgagaactcacaccgaggagaggccctacgagtgtaaccactgcgggaagggcttcaggcacagctcatccctggcccagcaccagcggaagcacgcgggggagaagccctttgagtgccgccagaggctgatctttgagcagacgccagctctcacaaagcatgaatggacagaagccctgggctgtgacccacctttgagtcaagatgagaggactcaccgaagcgacagacccttcaaatgtaatcagtgtgggaagtgtttcattcagagctctcacctcatccggcaccagataactcacaccagagaggagcagccccatgggcgaagccggcggcgtgaacaatcctcgagcaggaactcacacctggttcagcatcaacacccgaactccagaaagagctctgcaggcggagcaaaggcagggcagccggaaagcagagccctggctttgtttgacatccaaaaaatcatgcaagagaaaaaccctgtgcacgttattggggtggaagagccttctgtgggtgcttccatgttatttgacatcagagaatccacataggagagaaactttgctgatgacttttaaccacaagtaaaaaatgtggtaagtccacatagtgtactcatggaaggaggggctgggggtagaaatgtcatgggtgacttctgactttctaaggaaatgatgcttcccaagcacccgaggttggttggtcccaaatctatcaaactcagtgccctctttagcgacatattttgtgacattccttccattacaccacagtgagttcacaggtaatataacctacccacctgtgtaatgtcaaaaaaaatcaatatgcggccccattttgtaaaggatcattaaaatgaaagtaatttatggtagagtaaattgtagagtaacgtgtactgacttggtgcagtatttctccttgtcactgtgggcccaattttgccaggagacctagggcaatagcctgttgcttgtggactggtagagggtatgatgttgaccatggcaatactgtgaggggccttcccatgtggaacgtgaccttccaaagtagtgactaactcttggaaaagtttttaacaacataatatgctattgcatttctgggaaattctgggtaaattccaagcatgcagcaattagtttgtgcttatgtgtgaagtccagttaggttctcagttcataccctgaaaactgcttattccacatctgttgatgtggtccactgggggcagttctgttcctcaccatcttggcagcatgcatggctcctgcccacatttcaaccacacccccaacccaattacgtgaccagcccccacgaaatttcacagcattccgtgcaggggagtgtcacagctcctcttgaaaaacatctggtgttgctatgagccagaagttcttttttttgttttttgtctgagatggagtctcgctccgtcacccaggctggagtgcaatggcgcagtctgctcaccacaacctccgcctcccaggttaaagcaattctcctgccttagtcccccgagtagctgggattacacgcacctgccaccacgcccagctaatttttgtatttttggtagaaatggggtgttggccaggctgatctcaaactcctgacctcgtgatccacccacctcggcctcccaaagtgctgggtttacaggcatgagccactatgcccagctgagccagaggttcttaactggtggtgcttttgcctccagggcacatttggtgacatctagggacatttttggttgctgtgcctggaggaagggtgccgccgtcatgtagtgggtagaggccagggacgctgctcaacatcctttagtgcccgggacagctcctcaacaaaggattctctagctcaaatgtcaatagtgccaaggtggagaagccacctgggtataaacccagcccagaaatgtagctgacatttttaaaacttgcagccagctgtggtggctcacgcttgtgatcccagcactgtgggaggctgaggagggcggatcctttgaggtcaggagtttgagactagcctgggcccatggcgaaaccccatctctactaaaaatacacaaattagccaagtgtggtgacatgcgcctgtaattctagctacctgggggaggctgaggcacgagaatcgcttgaacctgggaggcagaggtttcagtgaaccgagattgcaccactgcactccagcctgggtgacagagcaagactctgtctcagaaaaaaaaaagaaaagaaaaaaaaccttcaaattgattaatcagggctggactagactagaaatcatataagcttgattttaacagatggcatcattagctagtttatacatgatgtactttttagtacatcctttacggttttgcagcattcataattgatgtgaaataaggaagataatcctttttttttttttgagacagagtctcactcttttgcccaggctggagtcagtgttgtaatcactgctcacttggcagcctcgacctcctgggctcaagtgatcctcccaccccagcctcccaagtagctgggaccacaggcatgtgccaccattcctgattttttttattttttgcagagacagggtctcactgtgttgcctaggctggtctcgaaccttggcgtcccaaagtgttgagattataggcatgagccactgtgcccagccacttatttttctgagtaacctttaaggatgtattgtggacattttcaaacatgagtcatatatttttgctggtactcccatctacctccccaccattctccttccctggatatatatataaccatgtttgtccactgggacaaaaccattttcacaatcatactaagctgtcatttcacatttttgctgtgcactgatagtgtgaaagcaatggcaggtaaaactgctgagcctgagttcaaagcagggcagtagccctgaggttggttgttcatattcttctccactgggaaatgcagtaaagaaaaagaaaagctaatttcacttaatttcttttcttttcttttttttttttttcttttgagacggagtctcgctctgtcgcccaggctggagtgcaatggcgtgatctcggctcactgcaacctccacctccacggttcacgccattctcctgcctcagcctcccgagtagctgggactacaggtgtgcgccatcttgcccagctacttttttgtatttttagtagagatggggtttcaccatgttagacaggatggtgtcgatcttctgacctcataatccgcccacctcggcctcccaaagtgctgggattacaggcatgagccactgcgcctggccctctttttctttttgagatggagtattgctctgtcgcccaggctggagtgcagtggcacaatcttggctcactgcaacctccgcctcccgggttcaagcagttctcatgcttcagccctctaagtagctgggatgacaggtgtgcgctaccacacccggctaatttttgtatttttagtagagatggggttttaccatgttggccaggctggtctcaaactcatgacctcaagtaatctgcccgcctcagtctcccaaaatgctggcattacaggcatgagccaccgtgcctggcctactttcactgaatttctgtgatgaaacgggaaaaattaattttgttaaatctcaagtagaactatattgtcattatcacatctaaacagatatcatcaaatacctagtgttcagatgttctgggttgcctcataaattttgttttctatttgtttcatagtaatcataatctaaacaagatccacacagtgcatttggttggaatttttcttttttctttttcttttttttttttgtgatggagacttgctctgtcacgtggttcactgcaacctcccaggttcaagcaattctcctgcctcagccgcccctgtagctgggactgcaggcatgcaccaccacactcagcagatttcttaattgtttgtagagatggggttttactacattgcctaggccagtttcaaactgggctcaagcgatcctcccaccttggccatccaaagtgctaggattacaggtgtgagccaatgcaccctgccaaacagcaattttttttttttttgagacagagtctcgctgtgtcacccaggctggagtgcagtggtgcgatctcggctcactgcaagctccgcctcccaggttcatgccattctcctgcctcagcctcccgagtagctgggactacaggcgcccgccaccacgcccggcaaattttttgcgtttttagtagagacggggtttcaccctgttagccaggatggtctcaatctcctgacctcgtgatccacctgcctcggcctcccaaagtgctggggttacaggagtgagccaccgcgcctggccccaaaacagcaatttgaataaccatgttggaatggttgagcattggaacgcattagcatcagaacttcccgtgtcaggccaggcgcggtggctcacgcctgtaatcccagcactttcggaggccgagatgggcagatcacgaggtcaggagatcgagaccagcctggctaacacggtgaaaccctgtctctactaaaaatacaaaaaattagcctggcgtggtggcgggcgcctgtagtcccagctactcgggaggctgaggcgggagaatggcgtgaacctgggaggcagagcttgcagtgagctgagatagtgcctctgcactccagcctgggtgacagagctagactccatctcgaaaaaaataaaagaacttcccgtgtccgtttttgctttttggatgctgggagtgtcacaactcagctatccaatcaaggcagagctggcctccaggatgccagagccagagctttgtggttcatctctagaggttcaacaggaccctgtggatggcccaagttcgtttctctgcacttacctcttcggggttgtcctcaaaacgttgccgtgtcagctctcacttttcacagcaactctggcctcctaccttggactgcgccacttctgtctccttagataacctccattcgcatagctaaatgctgcaccctccgacactgccacaataatagttctgtgagttagtaccattttatagataggcaaaatttggcacaggacaaaagttagtggtaactagaacaaaagtaaccagcccaagctaggaagtggtggagttagaatttgatgtcagcacccagctgaccatggcttaaacagatgaggctttgttcaaaggctgtcttttcagtggctcagctgtgtcacagtcgatgttttctgcaatctctcaacctttccattgtggtcatgaggagactcctatggctccagccattgcatccacagtgaagactgaaagaagggggaatgggcaggccaacacttaccgctgatggtgtttaaaggaaaaacattcccagaagcctgcagcacatgccccccttagtctcactggccacagatgggtcagggggccacccctaataacaacggggcttagaaacctcgtatttacctttctaacctctgtggtggagacaggtgggagagaaaagtcctgggaagtggatgatggaggcagctagccgtagctgctgcttttctcttcaagctcttgggagaattgcttgtgctccctattcccttggtggatgatggaggcagctagccgtatctgctgcttttctccttcaagctcttgggagaatcgcttgtgctccctattcccttggtggcagctcacacctcagacctgctgtccgcccccactgcttcacagaacccactgcaaccactgtccaaggtactacctctggtgtcgtctctcttcatccccaggactgtgaagcctgctaacctctttgcagagctccatctccttgcattgtggggttccttctaactcttcagggacttctcaacctcccgtcacccttcctaaatgctggggtcctagagtccaccttgtgctccacgccctccccaggtgtcatctacatccctagctttgtgctgctcaccaccaaatcagtctggtgcttctgagatttgggcttcagacccaaacaactgctgtgtgctactgggcaactccccgaggtgtgccgaaagctccccaaacccagcctaccccaaacaaaactcattttccacccagactagtctctgcttccctgatccctttcctggaggctgtttccacttgccatcccatcatggaagccagaaaaccagtcttcttgacctctccccttccccactccatggagttagaggtcctgttgattttgccatgtaaacatttcggatttgcttacttcatccccactgccaccaacagtgcaggatggccctaagaggagaagtaatgtgctaccaagtggcccagccagagtgtgaaccaaacagtctggtaccaaaaccctattctggatcattcctcctttctgctccaccagcagtttggggcacaggcttgggaatccagacaggaaagctcctcccctctgaagcagtgggaccaaaaatgacagcatggttctagacagctctggaagtcaggcctgtgattgcctcattccctccaccttggcccccaaaatggccagtcctgaaggggtcacagttgatacttctctgagggggcatggggttggctgaggttatagcagccccacagggtggtaagctgggatgaagcaatcaactggaactcaacaagccttgagttctcaaagggggtgtgggaaggttcttatacatcttctatgaagggcagtttatcagtcactaaattacaaatacataaaccctttgtctcaccaaacctgctgggaatgaatcctacatatatatttatatgtgtgcaggctacatggttttcattatgctattgattttaaaagtaaaaatttggaaagaacctccatgtccaccatggggaactggctaagtcatttatggtggaatggtgatcataaaaattcattaaaaatgaagactctatatacagcttgaatattccttatcgaaatgcttgggaccagaagtgtttcagatctttgcatattttctgtttctcatttcagttcacattttctaagcatgatattcctactgatttccttgtagatattttgaaacagataagaaactcctccgtggaaattactgttaactagggaaaagacatgtttttttctgttcataaaagtaatgcgagttctttgtagcaaaacttggaaaatgcataaaagtaaaaaaaaaatgaaaacttgtgtaaaattcctcatactttagccatccatagatggtccttaccattaggattttactaattttccttgcagctttttcttaaaatatacacgtgtgtctacacatacatagtgtacactaaattttacatacacacagaggaatatatatgtgtatagttatcttgtgtttagaaatttggaatcccttctagttgtcttgtaacatgtgcttactctattttgaggattttctctatgaatttcatgtagctctttaaattaactttcaggaggattgtaacaatgtgctctccacccagtattttaccagccttgagttttctcaaagggggcattggaggggttcttatacatttacagtgggaatgtgaattgatacaacttctgtggagggcagtttatcagccactatctaaattacacatacataaaccctttgtctaagcaaacttgctgggaataaatcctacacatatatttgtatgtgtgca

SEQ ID NO: 203874 - DNA, 2555 bp, Homo sapiens
  Payload ID: 20210
  Gene Name: zinc finger protein 80
  Uniprot ID: P51504
  ENST ID: ENST00000308095
  CDS Start-End: 505-1326
gccggagccagcagtggcaacccgctggggtccctttccacactgtggaagctttgttctttcgctctttgcaataaatcttgctacttctcactctttgggtccacactgcttttaccagctgtaacactcaccgcaaacgtctgcagcttcactcctgaagccagcgagaccacgagcccaccgggaggaacgaacaactccagacgcgccgccttaagccttaagagctgtaacactcaccacgaaggtctgcagcttcactcctgagccagcgagaccacgaacccgccagaaggaagaaactccgaacacatccgaacatcagaaggaacaaactctagacgcgccaccttaagagctgtaacactcaccacaagggtccgcggcttcattcttgaagtcagtgagaccaagaacccaccaattccggacacagttggaaatgcagaagggcacttgagtttggctgcagtctcccacacggagaccttctggaggaagatgagccctaaacgcgatgggttggggacaggtgatggtctgcactcacaggttttacaggagcaggtctccacaggagacaatctccatgaatgtgactcccagggaccaagtaaagacactttggttcgtgaggggaagacctacaaatgcaaggaatgtgggagcgtgtttaacaaaaacagcctccttgttcgacatcagcagattcacactggggtgaagccttatgaatgccaggagtgtggaaaagcctttcctgaaaaggtcgacttcgttcgacccatgaggattcacacaggggagaagccctgtaagtgcgtggagtgcgggaaggtcttcaaccgcaggtcgcacctcctgtgctaccgccagattcacactggagagaagccctatgagtgcagcgagtgtggaaagaccttcagctatcactctgtcttcatccagcatcgtgtgacccacactggagaaaaactctttgggtgcaaagaatgtggaaaaaccttttactacaactcttccttaacccggcacatgaagattcacactggagagaagccctgcaagtgcagtgagtgcgggaagaccttcacctaccgctctgttttcttccgacatagtatgacccacactgcaggaaagccctacgagtgcaaagaatgtgggaaaggtttttactacagctattccctcactcgacatacaaggagtcacactggagagaaaccttatgagtgccttgaacatagaaaggactttggctaccactctgcttttgcccaacagagtaagatccactctggaggaaaaaacctttgagtgcaaatgatgtgggaatttgtgggttttctttttttttttttctttgatacatagagagccacactgaggagaagcactctgaattcagtggcagtaggaaagctgtgacctgcagctcatcctcacttggcattgaagaattccttccagagataaactctatgagatatgtgggaaggccttttgcaagtgggcccacatcagtcaacgtcagagaacttaaactgcgaaaagacattttgacaaaaactagtgaagaaaatcttttggccacaggaaatatcttcctcagcatctgagaatttttccaggagggagacctgttggttattgtgcacttaaaagaaccacccacacctctctccatagtttatatcactaagccacttcaggattttttttttttaagtaagaagggaactgtaaaagagaaaaaaagaaattcatgcatagcttctgtcagacttctctgaaagccatgcctatcaaaatttgaattcagttcttcattttgcagatggctgaaagggacgagagaatgatggtgaagctgtgttgctttcccaggtgagccttgattatttcctctgtgctttctcagcttctttggccttctgtaagaggggcttctccaagagcatgtcactagttttctagaagttaaacaagagctaagacaaacaaaacaaaacacagcttatctaatctaatgagaaactcagaaaaaaatgttttgatgaatacaatgtattaaaatataaaacatgtagatcctttgacatgttaattcaattctagaaatcctcagaaatgtttttatattatgcagagatgtgcgtgcaaagaataatcgctgcagttttgtttttatgtgtgaaacgttgagaacaatctaaatgtttatcagttggaagtaagttatggtacatctgttctatgaaatactgtgaaacaataaggtatctctgtatgtactgatatcaaaacatctctaagatacagtatttagtaaaagagaaagtttcaggaaataaaactacatctagaagtataagcataaaactgttaatagtggttttctgcaggaaatgggatggaccagggttatatgcaatgttcagtttttacttttatacttaagtattgtttatgtttgaaaaataaaaagcatttattgtttttgcaataaatgtttaaaatatttcaataaagatagcatgttagaa

SEQ ID NO: 203875 - DNA, 2471 bp, Homo sapiens
  Payload ID: 20210
  Gene Name: zinc finger protein 80
  Uniprot ID: P51504
  ENST ID: ENST00000482457
  CDS Start-End: 28-849
tcccacacggagaccttctggaggaagatgagccctaaacgcgatgggttggggacaggtgatggtctgcactcacaggttttacaggagcaggtctccacaggagacaatctccatgaatgtgactcccagggaccaagtaaagacactttggttcgtgaggggaagacctacaaatgcaaggaatgtgggagcgtgtttaacaaaaacagcctccttgttcgacatcagcagattcacactggggtgaagccttatgaatgccaggagtgtggaaaagcctttcctgaaaaggtcgacttcgttcgacccatgaggattcacacaggggagaagccctgtaagtgcgtggagtgcgggaaggtcttcaaccgcaggtcgcacctcctgtgctaccgccagattcacactggagagaagccctatgagtgcagcgagtgtggaaagaccttcagctatcactctgtcttcatccagcatcgtgtgacccacactggagaaaaactctttgggtgcaaagaatgtggaaaaaccttttactacaactcttccttaacccggcacatgaagattcacactggagagaagccctgcaagtgcagtgagtgcgggaagaccttcacctaccgctctgttttcttccgacatagtatgacccacactgcaggaaagccctacgagtgcaaagaatgtgggaaaggtttttactacagctattccctcactcgacatacaaggagtcacactggagagaaaccttatgagtgccttgaacatagaaaggactttggctaccactctgcttttgcccaacagagtaagatccactctggaggaaaaaacctttgagtgcaaatgatgtgggaatttgtgggttttctttttttttttttctttgatacatagagagccacactgaggagaagcactctgaattcagtggcagtaggaaagctgtgacctgcagctcatcctcacttggcattgaagaattccttccagagataaactctatgagatatgtgggaaggccttttgcaagtgggcccacatcagtcaacgtcagagaacttaaactgcgaaaagacattttgacaaaaactagtgaagaaaatcttttggccacaggaaatatcttcctcagcatctgagaatttttccaggagggagacctgttggttattgtgcacttaaaagaaccacccacacctctctccatagtttatatcactaagccacttcaggattttttttttttaagtaagaagggaactgtaaaagagaaaaaaagaaattcatgcatagcttctgtcagacttctctgaaagccatgcctatcaaaatttgaattcagttcttcattttgcagatggctgaaaggtacaaaggccttgcctcgttatttgtcctttatatgtattcactcctgtctacaggagaattgtcctctgtaaagattaactctgtaaagatttattgaatgcattctttgttctaaaacattgtactcctgaggaatgtaagtctttgtgagaaatatgaacgcttaagtaatggaatatgtgaaacttgtaagaacgtagaatataaaaatactgccatataaaatcctttcatatctgaggaggtaagtaaccacattgaatgggcatattttgctacatcatttaagactacttaaggctttaatttaacaaaaaacaattcttcatgtggttttgaacacccagtgctcaatatacttgtttgttttgatttattttctcagggacgagagaatgatggtgaagctgtgttgctttcccaggtgagccttgattatttcctctgtgctttctcagcttctttggccttctgtaagaggggcttctccaagagcatgtcactagttttctagaagttaaacaagagctaagacaaacaaaacaaaacacagcttatctaatctaatgagaaactcagaaaaaaatgttttgatgaatacaatgtattaaaatataaaacatgtagatcctttgacatgttaattcaattctagaaatcctcagaaatgtttttatattatgcagagatgtgcgtgcaaagaataatcgctgcagttttgtttttatgtgtgaaacgttgagaacaatctaaatgtttatcagttggaagtaagttatggtacatctgttctatgaaatactgtgaaacaataaggtatctctgtatgtactgatatcaaaacatctctaagatacagtatttagtaaaagagaaagtttcaggaaataaaactacatctagaagtataagcataaaactgttaatagtggttttctgcaggaaatgggatggaccagggttatatgcaatgttcagtttttacttttatacttaagtattgtttatgtttgaaaaataaaaagcatttattgtttttgcaataaatgtttaaaatatttcaataaagatagcatgttagaataaaa

SEQ ID NO: 203876 - DNA, 2216 bp, Homo sapiens
  Payload ID: 20210
  Gene Name: zinc finger protein 80
  Uniprot ID: P51504
  ENST ID: ENST00000619534
  CDS Start-End: 505-1326
gccggagccagcagtggcaacccgctggggtccctttccacactgtggaagctttgttctttcgctctttgcaataaatcttgctacttctcactctttgggtccacactgcttttaccagctgtaacactcaccgcaaacgtctgcagcttcactcctgaagccagcgagaccacgagcccaccgggaggaacgaacaactccagacgcgccgccttaagccttaagagctgtaacactcaccacgaaggtctgcagcttcactcctgagccagcgagaccacgaacccgccagaaggaagaaactccgaacacatccgaacatcagaaggaacaaactctagacgcgccaccttaagagctgtaacactcaccacaagggtccgcggcttcattcttgaagtcagtgagaccaagaacccaccaattccggacacagttggaaatgcagaagggcacttgagtttggctgcagtctcccacacggagaccttctggaggaagatgagccctaaacgcgatgggttggggacaggtgatggtctgcactcacaggttttacaggagcaggtctccacaggagacaatctccatgaatgtgactcccagggaccaagtaaagacactttggttcgtgaggggaagacctacaaatgcaaggaatgtgggagcgtgtttaacaaaaacagcctccttgttcgacatcagcagattcacactggggtgaagccttatgaatgccaggagtgtggaaaagcctttcctgaaaaggtcgacttcgttcgacccatgaggattcacacaggggagaagccctgtaagtgcgtggagtgcgggaaggtcttcaaccgcaggtcgcacctcctgtgctaccgccagattcacactggagagaagccctatgagtgcagcgagtgtggaaagaccttcagctatcactctgtcttcatccagcatcgtgtgacccacactggagaaaaactctttgggtgcaaagaatgtggaaaaaccttttactacaactcttccttaacccggcacatgaagattcacactggagagaagccctgcaagtgcagtgagtgcgggaagaccttcacctaccgctctgttttcttccgacatagtatgacccacactgcaggaaagccctacgagtgcaaagaatgtgggaaaggtttttactacagctattccctcactcgacatacaaggagtcacactggagagaaaccttatgagtgccttgaacatagaaaggactttggctaccactctgcttttgcccaacagagtaagatccactctggaggaaaaaacctttgagtgcaaatgatgtgggaatttgtgggttttctttttttttttttctttgatacatagagagccacactgaggagaagcactctgaattcagtggcagtaggaaagctgtgacctgcagctcatcctcacttggcattgaagaattccttccagagataaactctatgagatatgtgggaaggccttttgcaagtgggcccacatcagtcaacgtcagagaacttaaactgcgaaaagacattttgacaaaaactagtgaagaaaatcttttggccacaggaaatatcttcctcagcatctgagaatttttccaggagggagacctgttggttattgtgcacttaaaagaaccacccacacctctctccatagtttatatcactaagccacttcaggattttttttttttaagtaagaagggaactgtaaaagagaaaaaaagaaattcatgcatagcttctgtcagacttctctgaaagccatgcctatcaaaatttgaattcagttcttcattttgcagatggctgaaagggacgagagaatgatggtgaagctgtgttgctttcccaggtgagccttgattatttcctctgtgctttctcagcttctttggccttctgtaagaggggcttctccaagagcatgtcactagttttctagaagttaaacaagagctaagacaaacaaaacaaaacacagcttatctaatctaatgagaaactcagaaaaaaatgttttgatgaatacaatgtattaaaatataaaacatgtagatcctttgacatgttaattcaattctagaaatcctcagaaatgtttttatattatgcagagatgtgcgtgcaaagaataatcgctgcagttttgtttttatgtgtgaaacgttgaga

SEQ ID NO: 203877 - DNA, 4203 bp, Homo sapiens
  Payload ID: 20211
  Gene Name: zinc finger protein 800
  Uniprot ID: Q2TB10
  ENST ID: ENST00000265827
  CDS Start-End: 694-2688
tgtcgctgccggagagtctctgcttcccccttcctacgcgctccgcggcggtagctcgggctctccggaggagggggcgacagagtaaaagagaggctgacttaataaagtttcctgaaacaacaactaccaccgaaaaggcccaaggttgggggagacccccatttttctccgcccctctcctaaagcctgagggaccgttgcaggtggagcggcgctggtgggacccgggttgcggcggcagccgttgccccggcgagggaagcctcaggtcctgcccgctccggttccggctccttcggtggtggcggcggcagctgctgccgggcggttcctcctgtcaactgcctccgcccgcgcgcctcccgcctagccacacagcgcggaggacgccgtgagccgccgccgcagtcgtctcggcccgcggagggacgtggtgagctgtggcgcttccgcgtcagcgccggcggggactctttgggagcgcgtcgggcccgagtccgggttcccccgcgtggtcagcggaggctgcgccaggtggggcccgcagccgcctcccacgccaggctgtccccgcggccgcccggcctgccttccttccttccgcccgcccgccggcccgccctaagagttgaccacgccgcaatgaagagcttcttacagtgaaagcaaagtaggtcgagtccactgaaaatgcctttaagggacaaatactgtcagactgaccaccatcatcacggatgctgtgaaccagtttatatcctggaacctggagatcctcctttgttacagcaaccactacagacatccaaatctggtattcaacaaataattgagtgctttcgatcaggaactaaacaacttaagcatattttattaaaagatgtggacactatttttgaatgtaagttatgccgcagtctcttcagaggattaccaaatttaattacccataaaaaattctactgcccaccaagtctccagatggatgacaaccttcctgatgtaaatgataaacaaagccaagccataaatgatctcctagaagccatatatccaagtgtggacaaacgagaatatattattaagctagaacccatagaaactaatcaaaatgcagtatttcaatatatttcgaggactgataatcctattgaagtcacagagtcaagcagtactcctgaacaaaccgaagttcagatacaggaaactagcactgaacagtcaaaaacagtaccggttacagatacagaggtggaaactgtagagccccctcctgttgagattgttacagatgaagttgcacctacatctgatgaacaacctcaggagtcgcaggctgacttggaaacttctgacaattctgattttggtcaccagttgatatgttgtctttgtagaaaagaattcaattctagacgaggtgttcgccgtcacattcgaaaagtacacaagaaaaagatggaagaactaaaaaagtacattgaaacacgaaagaatccaaaccaatcctctaaaggacgcagtaagaatgttctagttccattaagtaggagttgtccagtatgttgtaaatcatttgctacaaaagcgaatgtaaggaggcattttgatgaagttcatagaggactaaggagggattcaattactcctgatatagcaacaaagcctgggcaacctttgttcctggattctatttctcctaaaaaatcttttaagactcgaaaacaaaagtcttcttcaaaggctgaatacaatttaactgcatgcaaatgcctcctttgcaagaggaaatatagttcacaaataatgcttaaaagacatatgcaaattgtccacaagataactctttctggaacaaactctaaaagagaaaaaggccctaataatactgccaacagttcagaaataaaagttaaagttgaaccagcagattctgtagaatcttcacccccttccattacccattctccacagaatgaattaaagggaacaaatcattcaaatgaaaaaaagaacacaccggcagcacagaaaaataaagttaaacaagactctgaaagccctaaatcaactagtccgtcggctgcaggtggccagcaaaaaaccagaaaaccaaaactttcagctggctttgactttaagcaactttactgtaaactttgtaaacgtcagtttacttccaaacagaacttgactaaacacatcgagttgcacacagatggaaataacatttatgttaaattctacaagtgtcctctttgcacttatgaaactcgtcggaaacgtgatgtgatacgacatataactgtggttcataaaaagtcatctcgttatcttgggaaaataacagccagtttagagatcagagctataaaaaagcctattgattttgttctaaataaagtggcaaaaagaggcccttcgagggatgaagcaaaacatagtgattcaaaacatgatggcacttctaactctcctagtaaaaagtatgaagtagctgacgtcggtattgaagtaaaagtcacaaaaaacttttctcttcacagatgcaataaatgtggaaaggcatttgccaaaaagacttaccttgaacatcataagaaaactcataaggcaaatgcttccaattcacctgaaggaaacaaaaccaaaggccgaagtacaagatctaaggctcttgtctgataacttcaagtgatgtacgaaaaggtttggagttcatttttgtggaaagactttaaattggtgttagaaccactaaacatcttcaaatggtactatgaggaaaaaaagaaaaacatttttctaaatattcaactataactgctgttttctgactaaaataaccatctaaccacttgtttctaaggcactgcctattccagcactttcaagtagctgtgatattacatgttgtcatcacagtccatcagctatccacccttgaccttgtgcatttggtcgacagtttctacaaaaatgttacaaattttgttttctaaacaatttgttgattaagtgatcaacaacctgaagaaaatatcaatttttaattgacaaagactttatatcttagtgattttagttttgtttctctttatttggcaacattttcatctgaattgtatagatatatgattttctagtgagtgtatgttaggaacaaaagacaaaatagtatcaacacattataaatatttagcttactaaatatttgtaattatttttacatccatttatttctagcttgttctccagcacttcagtgtttgaaagtttcatcctaaaatatatactacaggaaagctgcagttcattttcatgcatggatcattacatttttcacttgtaaatgtaggtttttatgaaaattaaacattcccctatttttctttaaattttatacaaagcactttaatgatagatgcaaccttatttttcagttcctatttttttaaagaccacacatttactaatgttaatatgaaggtaataaatagcttactgatattttatggatgcagacaatccatgcacaaccacttcttatgatactagtttatttccttaaatattgctacaaaaggaagatgcgggtgtaagccctgatttttttttctcccaagaaaaatcttaaaggaccactttagataatatttgattcctactgtaaaatttagaaaatgatgaattcttgtccatttttgtaatcaagattttaggaaaaacagaagtacatctatctttatgaaattttgggcaggtttttgtgtatcaatattttgtacttttagggaatattttattttttagttatttgtgtcaaattataattataaaaggtacagcagaaaatataccatgtttttatataggttcacacctgtacttaggagggaccctgtccatctatatactttttgtataaaattttaaaatgttaaagatccacaaggtcttaataaaatgattctatagctagaaaaacatttaccttcccagtgctttgcactaaaatatactgtgaaaggaaactagaaagactgtaactattgctggaaatgttctatattgaatgtacatgctcttgttggaaaaatgtactatatgtgatggaaataaaccagaatcgaagttatttcagctaaatgtgcttcagcaaaggtgcattggttgaaacttaaatgttttattatcaaa

SEQ ID NO: 203878 - DNA, 2375 bp, Homo sapiens
  Payload ID: 20211
  Gene Name: zinc finger protein 800
  Uniprot ID: Q2TB10
  ENST ID: ENST00000393312
  CDS Start-End: 167-2161
cggttcctcctgtcaactgcctccgcccgcgcgcctcccgcctagccacacagcgcggaggacgccgtgagccgccgccgcagtcgtctcggcccgcggagggacgtgccacgccgcaatgaagagcttcttacagtgaaagcaaagtaggtcgagtccactgaaaatgcctttaagggacaaatactgtcagactgaccaccatcatcacggatgctgtgaaccagtttatatcctggaacctggagatcctcctttgttacagcaaccactacagacatccaaatctggtattcaacaaataattgagtgctttcgatcaggaactaaacaacttaagcatattttattaaaagatgtggacactatttttgaatgtaagttatgccgcagtctcttcagaggattaccaaatttaattacccataaaaaattctactgcccaccaagtctccagatggatgacaaccttcctgatgtaaatgataaacaaagccaagccataaatgatctcctagaagccatatatccaagtgtggacaaacgagaatatattattaagctagaacccatagaaactaatcaaaatgcagtatttcaatatatttcgaggactgataatcctattgaagtcacagagtcaagcagtactcctgaacaaaccgaagttcagatacaggaaactagcactgaacagtcaaaaacagtaccggttacagatacagaggtggaaactgtagagccccctcctgttgagattgttacagatgaagttgcacctacatctgatgaacaacctcaggagtcgcaggctgacttggaaacttctgacaattctgattttggtcaccagttgatatgttgtctttgtagaaaagaattcaattctagacgaggtgttcgccgtcacattcgaaaagtacacaagaaaaagatggaagaactaaaaaagtacattgaaacacgaaagaatccaaaccaatcctctaaaggacgcagtaagaatgttctagttccattaagtaggagttgtccagtatgttgtaaatcatttgctacaaaagcgaatgtaaggaggcattttgatgaagttcatagaggactaaggagggattcaattactcctgatatagcaacaaagcctgggcaacctttgttcctggattctatttctcctaaaaaatcttttaagactcgaaaacaaaagtcttcttcaaaggctgaatacaatttaactgcatgcaaatgcctcctttgcaagaggaaatatagttcacaaataatgcttaaaagacatatgcaaattgtccacaagataactctttctggaacaaactctaaaagagaaaaaggccctaataatactgccaacagttcagaaataaaagttaaagttgaaccagcagattctgtagaatcttcacccccttccattacccattctccacagaatgaattaaagggaacaaatcattcaaatgaaaaaaagaacacaccggcagcacagaaaaataaagttaaacaagactctgaaagccctaaatcaactagtccgtcggctgcaggtggccagcaaaaaaccagaaaaccaaaactttcagctggctttgactttaagcaactttactgtaaactttgtaaacgtcagtttacttccaaacagaacttgactaaacacatcgagttgcacacagatggaaataacatttatgttaaattctacaagtgtcctctttgcacttatgaaactcgtcggaaacgtgatgtgatacgacatataactgtggttcataaaaagtcatctcgttatcttgggaaaataacagccagtttagagatcagagctataaaaaagcctattgattttgttctaaataaagtggcaaaaagaggcccttcgagggatgaagcaaaacatagtgattcaaaacatgatggcacttctaactctcctagtaaaaagtatgaagtagctgacgtcggtattgaagtaaaagtcacaaaaaacttttctcttcacagatgcaataaatgtggaaaggcatttgccaaaaagacttaccttgaacatcataagaaaactcataaggcaaatgcttccaattcacctgaaggaaacaaaaccaaaggccgaagtacaagatctaaggctcttgtctgataacttcaagtgatgtacgaaaaggtttggagttcatttttgtggaaagactttaaattggtgttagaaccactaaacatcttcaaatggtactatgaggaaaaaaagaaaaacatttttctaaatattcaactataactgctgttttctgactaaaataaccatctaaccacttgtttctaaggcactgcctattccagcactttcaagtagc

SEQ ID NO: 203879 - DNA, 4358 bp, Homo sapiens
  Payload ID: 20211
  Gene Name: zinc finger protein 800
  Uniprot ID: Q2TB10
  ENST ID: ENST00000393313
  CDS Start-End: 593-2587
cgctgccggagagtctctgcttcccccttcctacgcgctccgcggcggtagctcgggctctccggaggagggggcgacagagtaaaagagaggctgacttaataaagtttcctgaaacaacaactaccaccgaaaaggcccaaggttgggggagacccccatttttctccgcccctctcctaaagcctgagggaccgttgcaggtggagcggcgctggtgggacccgggttgcggcggcagccgttgccccggcgagggaagcctcaggtcctgcccgctccggttccggctccttcggtggtggcggcggcagctgctgccgggcggttcctcctgtcaactgcctccgcccgcgcgcctcccgcctagccacacagcgcggaggacgccgtgagccgccgccgcagtcgtctcggcccgcggagggacgtggtgagctgtggcgcttccgcgtcagcgccggcggggactctttgggagcgcgtcgggcccgagtccgggttcccccgcgtggtcagcggaggctgcgccagccacgccgcaatgaagagcttcttacagtgaaagcaaagtaggtcgagtccactgaaaatgcctttaagggacaaatactgtcagactgaccaccatcatcacggatgctgtgaaccagtttatatcctggaacctggagatcctcctttgttacagcaaccactacagacatccaaatctggtattcaacaaataattgagtgctttcgatcaggaactaaacaacttaagcatattttattaaaagatgtggacactatttttgaatgtaagttatgccgcagtctcttcagaggattaccaaatttaattacccataaaaaattctactgcccaccaagtctccagatggatgacaaccttcctgatgtaaatgataaacaaagccaagccataaatgatctcctagaagccatatatccaagtgtggacaaacgagaatatattattaagctagaacccatagaaactaatcaaaatgcagtatttcaatatatttcgaggactgataatcctattgaagtcacagagtcaagcagtactcctgaacaaaccgaagttcagatacaggaaactagcactgaacagtcaaaaacagtaccggttacagatacagaggtggaaactgtagagccccctcctgttgagattgttacagatgaagttgcacctacatctgatgaacaacctcaggagtcgcaggctgacttggaaacttctgacaattctgattttggtcaccagttgatatgttgtctttgtagaaaagaattcaattctagacgaggtgttcgccgtcacattcgaaaagtacacaagaaaaagatggaagaactaaaaaagtacattgaaacacgaaagaatccaaaccaatcctctaaaggacgcagtaagaatgttctagttccattaagtaggagttgtccagtatgttgtaaatcatttgctacaaaagcgaatgtaaggaggcattttgatgaagttcatagaggactaaggagggattcaattactcctgatatagcaacaaagcctgggcaacctttgttcctggattctatttctcctaaaaaatcttttaagactcgaaaacaaaagtcttcttcaaaggctgaatacaatttaactgcatgcaaatgcctcctttgcaagaggaaatatagttcacaaataatgcttaaaagacatatgcaaattgtccacaagataactctttctggaacaaactctaaaagagaaaaaggccctaataatactgccaacagttcagaaataaaagttaaagttgaaccagcagattctgtagaatcttcacccccttccattacccattctccacagaatgaattaaagggaacaaatcattcaaatgaaaaaaagaacacaccggcagcacagaaaaataaagttaaacaagactctgaaagccctaaatcaactagtccgtcggctgcaggtggccagcaaaaaaccagaaaaccaaaactttcagctggctttgactttaagcaactttactgtaaactttgtaaacgtcagtttacttccaaacagaacttgactaaacacatcgagttgcacacagatggaaataacatttatgttaaattctacaagtgtcctctttgcacttatgaaactcgtcggaaacgtgatgtgatacgacatataactgtggttcataaaaagtcatctcgttatcttgggaaaataacagccagtttagagatcagagctataaaaaagcctattgattttgttctaaataaagtggcaaaaagaggcccttcgagggatgaagcaaaacatagtgattcaaaacatgatggcacttctaactctcctagtaaaaagtatgaagtagctgacgtcggtattgaagtaaaagtcacaaaaaacttttctcttcacagatgcaataaatgtggaaaggcatttgccaaaaagacttaccttgaacatcataagaaaactcataaggcaaatgcttccaattcacctgaaggaaacaaaaccaaaggccgaagtacaagatctaaggctcttgtctgataacttcaagtgatgtacgaaaaggtttggagttcatttttgtggaaagactttaaattggtgttagaaccactaaacatcttcaaatggtactatgaggaaaaaaagaaaaacatttttctaaatattcaactataactgctgttttctgactaaaataaccatctaaccacttgtttctaaggcactgcctattccagcactttcaagtagctgtgatattacatgttgtcatcacagtccatcagctatccacccttgaccttgtgcatttggtcgacagtttctacaaaaatgttacaaattttgttttctaaacaatttgttgattaagtgatcaacaacctgaagaaaatatcaatttttaattgacaaagactttatatcttagtgattttagttttgtttctctttatttggcaacattttcatctgaattgtatagatatatgattttctagtgagtgtatgttaggaacaaaagacaaaatagtatcaacacattataaatatttagcttactaaatatttgtaattatttttacatccatttatttctagcttgttctccagcacttcagtgtttgaaagtttcatcctaaaatatatactacaggaaagctgcagttcattttcatgcatggatcattacatttttcacttgtaaatgtaggtttttatgaaaattaaacattcccctatttttctttaaattttatacaaagcactttaatgatagatgcaaccttatttttcagttcctatttttttaaagaccacacatttactaatgttaatatgaaggtaataaatagcttactgatattttatggatgcagacaatccatgcacaaccacttcttatgatactagtttatttccttaaatattgctacaaaaggaagatgcgggtgtaagccctgatttttttttctcccaagaaaaatcttaaaggaccactttagataatatttgattcctactgtaaaatttagaaaatgatgaattcttgtccatttttgtaatcaagattttaggaaaaacagaagtacatctatctttatgaaattttgggcaggtttttgtgtatcaatattttgtacttttagggaatattttattttttagttatttgtgtcaaattataattataaaaggtacagcagaaaatataccatgtttttatataggttcacacctgtacttaggagggaccctgtccatctatatactttttgtataaaattttaaaatgttaaagatccacaaggtcttaataaaatgattctatagctagaaaaacatttaccttcccagtgctttgcactaaaatatactgtgaaaggaaactagaaagactgtaactattgctggaaatgttctatattgaatgtacatgctcttgttggaaaaatgtactatatgtgatggaaataaaccagaatcgaagttatttcagctaaatgtgcttcagcaaaggtgcattggttgaaacttaaatgttttattatcaaatttaaacttattcagtgactatgagcagctacacttgaattatattctgatagttttatttctaagaaatagagtaataatttctctttaatttaaaaacagatttactttcccacatattgaaaatttgtacttatagatctaactttaataactaatagtataatatatttagggaactaaatgtgtaggtggtatttcatttataagccatcttcattagttgcacattattaaacctatatgtttgactttt

SEQ ID NO: 203880 - DNA, 410 bp, Homo sapiens
  Payload ID: 20211
  Gene Name: zinc finger protein 800
  ENST ID: ENST00000439506
  CDS Start-End: 115-410
tcaagcaagccacctgaaaaagatcacaagctgaaaaaagataaggtgtatgtaaaccacgccgcaatgaagagcttcttacagtgaaagcaaagtaggtcgagtccactgaaaatgcctttaagggacaaatactgtcagactgaccaccatcatcacggatgctgtgaaccagtttatatcctggaacctggagatcctcctttgttacagcaaccactacagacatccaaatctggtattcaacaaataattgagtgctttcgatcaggaactaaacaacttaagcatattttattaaaagatgtggacactatttttgaatgtaagttatgccgcagtctcttcagaggattaccaaatttaattacccataaaaaattctactgcccaccaagtctccagatgga

SEQ ID NO: 203881 - DNA, 502 bp, Homo sapiens
  Payload ID: 20211
  Gene Name: zinc finger protein 800
  ENST ID: ENST00000436992
  CDS Start-End: 113-502
cggccgcccggcctgccttccttccttccgcccgcccgccggcccgccctaagaccacgccgcaatgaagagcttcttacagtgaaagcaaagtaggtcgagtccactgaaaatgcctttaagggacaaatactgtcagactgaccaccatcatcacggatgctgtgaaccagtttatatcctggaacctggagatcctcctttgttacagcaaccactacagacatccaaatctggtattcaacaaataattgagtgctttcgatcaggaactaaacaacttaagcatattttattaaaagatgtggacactatttttgaatgtaagttatgccgcagtctcttcagaggattaccaaatttaattacccataaaaaattctactgcccaccaagtctccagatggatgacaaccttcctgatgtaaatgataaacaaagccaagccataaatgatctcctagaagccatatatccaagtgtggacaaacgagaatatatt

SEQ ID NO: 203882 - DNA, 955 bp, Homo sapiens
  Payload ID: 20211
  Gene Name: zinc finger protein 800
  ENST ID: ENST00000434602
  CDS Start-End: 230-955
gtccggggtcagtcagtcgctccctgtcgctgccggagagtctctgcttcccccttcctacgcgctccgcggcggtagctcgggctctccggaggagggggcgacagagtaaaagagaggctgacttaataaagtttcctgaaacaacaactaccaccgaaaaggcccaagccacgccgcaatgaagagcttcttacagtgaaagcaaagtaggtcgagtccactgaaaatgcctttaagggacaaatactgtcagactgaccaccatcatcacggatgctgtgaaccagtttatatcctggaacctggagatcctcctttgttacagcaaccactacagacatccaaatctggtattcaacaaataattgagtgctttcgatcaggaactaaacaacttaagcatattttattaaaagatgtggacactatttttgaatgtaagttatgccgcagtctcttcagaggattaccaaatttaattacccataaaaaattctactgcccaccaagtctccagatggatgacaaccttcctgatgtaaatgataaacaaagccaagccataaatgatctcctagaagccatatatccaagtgtggacaaacgagaatatattattaagctagaacccatagaaactaatcaaaatgcagtatttcaatatatttcgaggactgataatcctattgaagtcacagagtcaagcagtactcctgaacaaaccgaagttcagatacaggaaactagcactgaacagtcaaaaacagtaccggttacagatacagaggtggaaactgtagagccccctcctgttgagattgttacagatgaagttgcacctacatctgatgaacaacctcaggagtcgcaggctgacttggaaacttctgacaattctgattttggtcaccagttgatatgttgtctttgtagaaaagaattcaattctaga

SEQ ID NO: 203883 - DNA, 2099 bp, Homo sapiens
  Payload ID: 20211
  Gene Name: zinc finger protein 800
  ENST ID: ENST00000619291
  CDS Start-End: 694-1704
tgtcgctgccggagagtctctgcttcccccttcctacgcgctccgcggcggtagctcgggctctccggaggagggggcgacagagtaaaagagaggctgacttaataaagtttcctgaaacaacaactaccaccgaaaaggcccaaggttgggggagacccccatttttctccgcccctctcctaaagcctgagggaccgttgcaggtggagcggcgctggtgggacccgggttgcggcggcagccgttgccccggcgagggaagcctcaggtcctgcccgctccggttccggctccttcggtggtggcggcggcagctgctgccgggcggttcctcctgtcaactgcctccgcccgcgcgcctcccgcctagccacacagcgcggaggacgccgtgagccgccgccgcagtcgtctcggcccgcggagggacgtggtgagctgtggcgcttccgcgtcagcgccggcggggactctttgggagcgcgtcgggcccgagtccgggttcccccgcgtggtcagcggaggctgcgccaggtggggcccgcagccgcctcccacgccaggctgtccccgcggccgcccggcctgccttccttccttccgcccgcccgccggcccgccctaagagttgaccacgccgcaatgaagagcttcttacagtgaaagcaaagtaggtcgagtccactgaaaatgcctttaagggacaaatactgtcagactgaccaccatcatcacggatgctgtgaaccagtttatatcctggaacctggagatcctcctttgttacagcaaccactacagacatccaaatctggtattcaacaaataattgagtgctttcgatcaggaactaaacaacttaagcatattttattaaaagatgtggacactatttttgaatgtaagttatgccgcagtctcttcagaggattaccaaatttaattacccataaaaaattctactgcccaccaagtctccagatggatgacaaccttcctgatgtaaatgataaacaaagccaagccataaatgatctcctagaagccatatatccaagtgtggacaaacgagaatatattattaagctagaacccatagaaactaatcaaaatgcagtatttcaatatatttcgaggactgataatcctattgaagtcacagagtcaagcagtactcctgaacaaaccgaagttcagatacaggaaactagcactgaacagtcaaaaacagtaccggttacagatacagaggtggaaactgtagagccccctcctgttgagattgttacagatgaagttgcacctacatctgatgaacaacctcaggagtcgcaggctgacttggaaacttctgacaattctgattttggtcaccagttgatatgttgtctttgtagaaaagaattcaattctagacgaggtgttcgccgtcacattcgaaaagtacacaagaaaaagatggaagaactaaaaaagtacattgaaacacgaaagaatccaaaccaatcctctaaaggacgcagtaagaatgttctagttccattaagtaggagttgtccagtatgttgtaaatcatttgctacaaaagcgaatgtaaggaggcattttgatgaagttcatagaggactaaggagggattcaattactcctgatatagcaacaaagcctgggcaacctttgttcctggattctatttcttaaaaaatcttttaagactcgaaaacaaaagtcttcttcaaaggctgaatacaatttaactgcatgcaaatgcctcctttgcaagaggaaatatagttcacaaataatgcttaaaagacatatgcaaattgtccacaagataactctttctggaacaaactctaaaagagaaaaaggccctaataatactgccaacagttcagaaataaaagttaaagttgaaccagcagattctgtagaatcttcacccccttccattacccattctccacagaatgaattaaagggaacaaatcattcaaatgaaaaaaagaacacaccggcagcacagaaaaataaagttaaacaagactctgaaagccctaaatcaactagtccgtcggctgcaggtggccagc

SEQ ID NO: 203884 - DNA, 4690 bp, Homo sapiens
  Payload ID: 20212
  Gene Name: zinc finger protein 804A
  Uniprot ID: Q7Z570
  ENST ID: ENST00000302277
  CDS Start-End: 595-4224
ggccgcgggtcccggcggcggggtgggcgggggaggcagcgggtgacagatgtactcctctgacagctctcagtatcagcccagtggctccctgccattggctcagtgcaatggaccggcaacgccgctcactataataacactcatgcctgccagcagcagcaactccgagtgcaggcgccgagcgcgggggatgctgccgccgccgccgcttctgctgccgcgcgggcggctcccgcagccccgctccgcccggccaccgcgcgggcactgactcccgctcggttccgtttcgccggcccggccccctcctaggctggaatcctcccgcggggctcgtcgtcccgacgcgaatctgaggagaaacaggagcgagagactgaggggagagcgcggcgagcatgcggaggcgggggagcctcggcgctcaccacagaggggtgcagtgagccagtctccagaggacgtgccgggggtggctgcgtgccctcgtggcgggttcccagcccaccgtcgccggccccggcgcgctgcggctgtgggcgcggggtgcgtggaagcggcggctgcggcggaggaggcggcggctgccccatggagtgttactacattgtcatcagctccacgcatctcagcaacggacactttcgcaacatcaagggagttttccggggccctctcagcaagaacgggaacaaaactctggactatgctgagaaggaaaataccatagcaaaagctctggaagatctgaaggcaaatttttactgtgaactctgtgacaagcagtactataagcaccaggagtttgacaatcacattaattcatatgaccatgctcacaagcagaggctcaaggaactgaaacaaagggaatttgctcgaaatgtagcatctaaatccaggaaagatgaaagaaaacaggaaaaggcactccaacgcctgcacaagctggctgagctaagaaaggaaactgtatgtgctcctggaagtggccccatgttcaaatcaacaactgttactgtgagagaaaactgtaatgaaatttcccaacgagttgttgtggattcagttaataaccagcaagatttcaaatatactttgattcatagtgaagagaatactaaagatgctaccactgttgctgaagatccagaaagtgcaaataattatacagcaaaaaataaccaagttggggatcaagcccaggggattcacagacacaaaatcggcttttcttttgcatttccaaagaaagcgtccgtgaagctagagtcctcagctgcagccttctctgaatacagtgatgatgcctcagtgggaaaaggatttagcagaaaaagtagatttgtccccagtgcttgtcatcttcaacaatcttcaccaacagatgtgcttttgagttctgaggagaaaactaactcttttcatccaccagaggcaatgtgcagagacaaagaaactgttcaaactcaagagataaaagaagtctctagtgaaaaagatgcattattattaccttcattttgcaagtttcaacttcagttatcttctgatgcagataattgtcaaaattcagtcccattagcagatcaaataccactagagagtgttgttattaatgaagacatacctgttagtggtaacagttttgagttgttaggaaataaatccacagttcttgacatgtctaatgattgcatatctgtgcaagctaccacagaggaaaatgttaagcataacgaggcatccacaactgaggttgaaaataaaaatggtcccgagacattggccccttcaaatactgaagaggttaacataactatacataagaaaacaaatttctgcaaaagacaatgtgagccatttgtacctgtccttaacaaacacagatctacagttcttcagtggccatcagaaatgctggtttatacaactacgaaaccatcaatttcctatagctgtaatcctctatgttttgacttcaagtctactaaagtaaataataatctagataaaaataagccagacttaaaagatctttgttctcagcagaagcaggaagacatttgcatgggaccactttcagattacaaggatgtatctacagaaggactcactgattatgaaattggaagtagcaaaaataaatgcagccaagtcactcctcttttggctgatgatattctctccagtagttgtgattctggaaaaaatgagaacacaggtcagaggtataaaaacatttcctgtaagatcagagaaacagaaaagtataattttactaaaagtcaaataaaacaggacactctagatgaaaaatacaacaaaataaggttgaaagagacccatgaatactggttccataaaagtagaagaaagaaaaaaagaaaaaagttatgtcagcatcatcatatggagaaaaccaaagaatcagaaactcgctgcaaaatggaagcagagaatagttacactgaaaatgctgggaaatatctattggaaccaatttcagaaaagcagtatttagctgcagagcaattattagactcacatcagttacttgataaaaggcccaaatcagaatccatatccttaagtgacaatgaagaaatgtgtaaaacatggaatactgaatacaacacttatgatactatcagttctaaaaaccactgtaaaaagaacacaatacttttaaatggacaatcaaatgcaacaatgatacattctgggaaacataatttaacatattctagaacttactgttgttggaaaaccaaaatgtcaagctgtagtcaggatcacagaagcttagttcttcaaaatgatatgaaacacatgagtcagaatcaggctgttaaaagaggttacaattctgtcatgaatgaatcagaaagattctatcgaaaacgtagacaacattcacattcttattcttcagatgaaagtttaaatcgacagaatcatttaccagaagaatttttgaggccaccaagtacttcagttgctccctgcaagcctaaaaagaaacggaggcgaaaaagaggcagattccaccccggatttgaaactttagaactcaaagaaaatacagattatcccgtgaaagacaattcttccttaaatcctctggataggttaataagtgaagacaaaaaagagaaaatgaaaccacaagaagttgcaaaaatcgaaaggaactcagaacaaacaaaccaattaagaaacaaactgtctttccaccctaacaatctccttccttctgaaaccaatggtgaaactgagcatttagaaatggagaccacttctggtgaattgtcagatgtttccaatgatcccaccacatctgtctgtgtagctagtgccccaacaaaagaagcaattgacaataccctgcttgaacacaaagaaagaagtgagaatataaatcttaatgaaaagcaaattccttttcaggtgcctaatattgaaaggaactttagacagtcacagcctaaatcctatctttgccattatgaactggctgaggcccttccacaaggaaagatgaatgagacaccaactgagtggctgcgttataattcaggaatccttaacacacaaccaccattaccattcaaagaagcacatgtcagtggtcatacttttgtaacagctgagcaaatcctggctccattagctttaccagagcaagcattattgatcccactagaaaaccatgacaaattcaaaaatgtaccatgtgaggtctaccagcacattctgcagccaaacatgctggccaacaaggttaaatttacctttcctccagctgccctcccaccccctagcacacctctgcagcctttgcctttgcagcagtccttatgttctacctctgtaaccactatccatcacactgttttgcagcagcacgctgcagctgctgcagctgcagctgcagccgcagctgcaggaacctttaaagtgcttcagccacaccaacagtttctttcccaaatcccagctctcaccagaacctcattacctcagctctcagtaggaccagtaggaccgaggctttgtcctgggaaccagccaacttttgttgctcctcctcagatgccaatcattccagcttccgttcttcatcctagccatctggctttcccatctttaccccatgcactctttccttcactgctttccccacaccctactgtcatccctttgcaacctctcttctagtcatcaccataatgggaaaaaaatactcttgtgaaaactattgctatatgcgttaagtgttcatctatgtgggtacatggctatttaactggtggaaataaactggccgatacatggcgtcattggtttgaaatcatttactgtaagtgcaatgatgcaaataaatccctaagtttctgatatataatattattaaagcactgaatagtttgaaaatcaatacaatatatgctatatattaaaatgatgtcttaagagtatgtataatgtacataaaatatatttatagtactctaatttatgttgtaaagtatgctcccttggtttttcttaatctttgtgtatttgcacctatttaatgtttagacaaagctgatggcactatgttttgtatcatgttccttgaaactgtaaattcagtgaaaaatatctcttgcaataaatttttgttaactatttaagtaaa

SEQ ID NO: 203885 - DNA, 3986 bp, Homo sapiens
  Payload ID: 20212
  Gene Name: zinc finger protein 804A
  ENST ID: ENST00000613975
  CDS Start-End: 149-3523
tcaggactatgctgagaaggaaaataccatagcaaaagctctggaagatctgaaggcaaatttttactgtgaactctgtgacaagcagtactataagcaccaggagtttgacaatcacattaattcatatgaccatgctcacaagcagaggctcaaggaactgaaacaaagggaatttgctcgaaatgtagcatctaaatccaggaaagatgaaagaaaacaggaaaaggcactccaacgcctgcacaagctggctgagctaagaaaggaaactgtatgtgctcctggaagtggccccatgttcaaatcaacaactgttactgtgagagaaaactgtaatgaaatttcccaacgagttgttgtggattcagttaataaccagcaagatttcaaatatactttgattcatagtgaagagaatactaaagatgctaccactgttgctgaagatccagaaagtgcaaataattatacagcaaaaaataaccaagttggggatcaagcccaggggattcacagacacaaaatcggcttttcttttgcatttccaaagaaagcgtccgtgaagctagagtcctcagctgcagccttctctgaatacagtgatgatgcctcagtgggaaaaggatttagcagaaaaagtagatttgtccccagtgcttgtcatcttcaacaatcttcaccaacagatgtgcttttgagttctgaggagaaaactaactcttttcatccaccagaggcaatgtgcagagacaaagaaactgttcaaactcaagagataaaagaagtctctagtgaaaaagatgcattattattaccttcattttgcaagtttcaacttcagttatcttctgatgcagataattgtcaaaattcagtcccattagcagatcaaataccactagagagtgttgttattaatgaagacatacctgttagtggtaacagttttgagttgttaggaaataaatccacagttcttgacatgtctaatgattgcatatctgtgcaagctaccacagaggaaaatgttaagcataacgaggcatccacaactgaggttgaaaataaaaatggtcccgagacattggccccttcaaatactgaagaggttaacataactatacataagaaaacaaatttctgcaaaagacaatgtgagccatttgtacctgtccttaacaaacacagatctacagttcttcagtggccatcagaaatgctggtttatacaactacgaaaccatcaatttcctatagctgtaatcctctatgttttgacttcaagtctactaaagtaaataataatctagataaaaataagccagacttaaaagatctttgttctcagcagaagcaggaagacatttgcatgggaccactttcagattacaaggatgtatctacagaaggactcactgattatgaaattggaagtagcaaaaataaatgcagccaagtcactcctcttttggctgatgatattctctccagtagttgtgattctggaaaaaatgagaacacaggtcagaggtataaaaacatttcctgtaagatcagagaaacagaaaagtataattttactaaaagtcaaataaaacaggacactctagatgaaaaatacaacaaaataaggttgaaagagacccatgaatactggttccataaaagtagaagaaagaaaaaaagaaaaaagttatgtcagcatcatcatatggagaaaaccaaagaatcagaaactcgctgcaaaatggaagcagagaatagttacactgaaaatgctgggaaatatctattggaaccaatttcagaaaagcagtatttagctgcagagcaattattagactcacatcagttacttgataaaaggcccaaatcagaatccatatccttaagtgacaatgaagaaatgtgtaaaacatggaatactgaatacaacacttatgatactatcagttctaaaaaccactgtaaaaagaacacaatacttttaaatggacaatcaaatgcaacaatgatacattctgggaaacataatttaacatattctagaacttactgttgttggaaaaccaaaatgtcaagctgtagtcaggatcacagaagcttagttcttcaaaatgatatgaaacacatgagtcagaatcaggctgttaaaagaggttacaattctgtcatgaatgaatcagaaagattctatcgaaaacgtagacaacattcacattcttattcttcagatgaaagtttaaatcgacagaatcatttaccagaagaatttttgaggccaccaagtacttcagttgctccctgcaagcctaaaaagaaacggaggcgaaaaagaggcagattccaccccggatttgaaactttagaactcaaagaaaatacagattatcccgtgaaagacaattcttccttaaatcctctggataggttaataagtgaagacaaaaaagagaaaatgaaaccacaagaagttgcaaaaatcgaaaggaactcagaacaaacaaaccaattaagaaacaaactgtctttccaccctaacaatctccttccttctgaaaccaatggtgaaactgagcatttagaaatggagaccacttctggtgaattgtcagatgtttccaatgatcccaccacatctgtctgtgtagctagtgccccaacaaaagaagcaattgacaataccctgcttgaacacaaagaaagaagtgagaatataaatcttaatgaaaagcaaattccttttcaggtgcctaatattgaaaggaactttagacagtcacagcctaaatcctatctttgccattatgaactggctgaggcccttccacaaggaaagatgaatgagacaccaactgagtggctgcgttataattcaggaatccttaacacacaaccaccattaccattcaaagaagcacatgtcagtggtcatacttttgtaacagctgagcaaatcctggctccattagctttaccagagcaagcattattgatcccactagaaaaccatgacaaattcaaaaatgtaccatgtgaggtctaccagcacattctgcagccaaacatgctggccaacaaggttaaatttacctttcctccagctgccctcccaccccctagcacacctctgcagcctttgcctttgcagcagtccttatgttctacctctgtaaccactatccatcacactgttttgcagcagcacgctgcagctgctgcagctgcagctgcagccgcagctgcaggaacctttaaagtgcttcagccacaccaacagtttctttcccaaatcccagctctcaccagaacctcattacctcagctctcagtaggaccagtaggaccgaggctttgtcctgggaaccagccaacttttgttgctcctcctcagatgccaatcattccagcttccgttcttcatcctagccatctggctttcccatctttaccccatgcactctttccttcactgctttccccacaccctactgtcatccctttgcaacctctcttctagtcatcaccataatgggaaaaaaatactcttgtgaaaactattgctatatgcgttaagtgttcatctatgtgggtacatggctatttaactggtggaaataaactggccgatacatggcgtcattggtttgaaatcatttactgtaagtgcaatgatgcaaataaatccctaagtttctgatatataatattattaaagcactgaatagtttgaaaatcaatacaatatatgctatatattaaaatgatgtcttaagagtatgtataatgtacataaaatatatttatagtactctaatttatgttgtaaagtatgctcccttggtttttcttaatctttgtgtatttgcacctatttaatgtttagacaaagctgatggcactatgttttgtatcatgttccttgaaactgtaaattcagtgaaaaatatctcttgcaataaatttttgttaactatttaagt

SEQ ID NO: 203886 - DNA, 4659 bp, Homo sapiens
  Payload ID: 20213
  Gene Name: zinc finger protein 804B
  Uniprot ID: A4D1E1
  ENST ID: ENST00000333190
  CDS Start-End: 610-4659
cccaactccctgtcctcaccccggcccgcccgtctcctcctccgccctctcccgactgcagcgggggcagcgctttggcgctcccaaggactccccgccactctccccacaaagcagcggcggtggcggcggctgctgctggatcttcacactgcagccagcagcccaggacgcccccggccggacgatgggtacccgcgcctgagcatcccccgggcaggcgccaggcgcgaaggcagggggcgggaggaaaggggcgggggaattcctgattccctggtggaccctggaagttgtccttaaataaatatatcgctggcccgcggttgagcagccacctcgtcagagcagcatgtggactggctcgccgggtcccctccgtgctctgtgctgtcgccgccgccgcctctgtcagagcagcagctgtcggcagcaggagccccgcacggggcgcggagcagggacgcgctgccaccgcctccccctgcgtcctgctggccgcgtcttctcgggaggtggtagtcgctgttgccgctgagaaacccgcccgctttccacggctggtcgcctggtgaggagttgagactctgcgcctccgcccggacccacatggcttgttacctggtcatcagttcgagacatctcagcaatgggcactaccggggcattaaaggagtcttcaggggacccctgtgcaagaacggatctccctctccggattttgcagaaaagaagtccacagcaaaggccctggaagatgtaaaggcaaacttttactgtgaattatgtgacaagcagtatcacaaacaccaggagtttgacaatcatattaattcttatgaccatgctcataagcagagactgaaagaattaaagcaacgggaatttgctcgaaatgtagcttctaagtcatggaaagatgagaaaaaacaagaaaaagcacttaaacgacttcatcagctggctgagttaaggcagcaatctgaatgtgtttctggaaatggaccagcatacaaagcccccagggtagccatagaaaagcaactccagcaaggaattttccccattaagaatggcagaaaggtatcatgcatgaagagtgctcttctccttaaaggaaaaaatctccccagaatcatatccgataaacagcggtccaccatgccaaatcgacaccaattacaatcagacaggcgttgtttgtttggaaatcaggtactgcaaacatcttcagatctcagcaatgcaaatcacagaacaggagtatcatttactttttccaaaaaagtgcacctaaaattagaatcttcagcatcagttttcagtgagaacacagaagaaacccatgattgtaacaagtcacccatttataaaacaaaacaaactgcagataagtgcaagtgctgcaggtttgcaaataaagatacacaccttaccaaggaaaaagaggtaaatatctcaccaagccatctggaaagtgttttacacaataccatctccataaactctaaaattttgcaagacaaacacgactctattgatgagacactagaagattcaattggcattcatgcttcattctctaaatctaacattcatctttcagatgtagattttactcctaccagcagagaaaaagaaactagaaatacattgaagaacactttagaaaattgtgttaatcacccatgccaagcaaatgcttccttcagcccaccaaacatttacaaccatagtgatgccaggatatctgaatgcctggatgagttttcatcactggagccaagtgaacaaaagagtacagtgcatctgaatccaaattccagaatagagaacagagaaaaatctttagataaaacagaaagagttagcaaaaatgttcaaagacttgtaaaagaagcatgtacccataatgtggcatctaaaccactaccttttctccacgttcaaagcaaggatggccacaccactcttcaatggcctacggaacttctgctctttacaaaaacagaaccctgtatctcttatggctgcaacccactgtattttgattttaagctttctcggaacacaaaggaagaccacaatctagaggacttaaaaacagaattgggtaagaagcccttggaattgaagactaaaagagagagccaagtctcaggtttaactgaagaccaacaaaaattgatccaagaagattatcaatatccgaaaccaaagacgatgatagctaatccggattgggaaaaattccagaggaaatataatttggactacagtgattctgagccaaataagagtgaatatactttcagtgcaaatgatttggaaatgaaaaatcctaaagtgcctctttacctcaacacatctctaaaggattgtgctggaaagaataatagtagtgagaacaaacttaaggaagcttcaagggcccattggcaaggctgcagaaaggcagttctaaatgatatagatgaggacctatcttttccttcctacatctctaggtttaaaaagcataaattgattccctgcagtcctcatttggaatttgaagatgaaagacaattcaactgcaagtccagtccttgtacagtagggggtcacagtgaccatgggaaagacttcagtgtaattttgaagagtaaccacatcagcatgaccagcaaggtttccggatgtggaaaccaaagatacaagagatactctccacagtcatgtttgagtagatattcttcctctttggacacatcccctagcagcatgtctagcttgagaagtacttgttcaagtcatagattcaatggtaatagcagaggtaatttgctctgcttccataaaagagaacaccactcagttgaaaggcacaaacggaaatgtctaaagcacaactgcttctacttgtctgatgatataacaaagagcagccaaatgcagtctgaaccacagaaagagaggaactgcaaattgtgggaatcatttaaaaatgaaaaatactcaaaacgtagatattgtcactgcagagaaagacaaaaactgggcaaaaatcaacaacaattttcagggctaaaatctacgagaatcatctattgtgattctaactcacagatttcctgtactggaagcagtaaaaaaccacctaattgccagggaactcagcacgacagattggactcttactcaatagagaaaatgtattacttgaataaaagcaagagaaatcaagagtctttgggcagccctcacatttgtgatctgggaaaagtcaggcccatgaagtgtaactccgggaatatcagctgccttctaaagaactgttccagtggcccttcagaaaccacagaatcaaacactgcagaaggagagaggacccctctaacagcaaaaatccttttagaaagagtacaagccaagaaatgtcaagaacaatcaagtaatgttgagatctcttcaaacagttgtaaaagtgaattagaggctccttcgcaagtcccatgcacaattcaacttgcaccatcaggctgtaacagacaagcattgcctttgtctgaaaaaatacagtatgcaagtgagagcagaaatgatcaagacagtgcaattccaaggactacggagaaagacaaaagcaaaagttcacacacaaataattttacaattttagcagacactgattgtgataaccatctttctaaaggtataattcacctagtaacagagtctcagtcactaaacataaaaagggatgcaacaacaaaagaacaatcaaaacctttaattagtgaaatccaaccttttattcaaagctgtgacccagtaccaaatgaattccctggtgcttttccgtctaataaatatactggtgtgactgattcaacagagacccaagaagaccaaataaatctagacttacaggatgtaagcatgcatataaatcatgtagagggaaatataaactcttactatgacagaactatgcagaaacctgacaaagtcgaagacggattagaaatgtgtcataaatctatctctccccctttaattcaacagcccataacattttctcctgacgaaatagataaatataagatcctacagctacaagcccagcagcatatgcagaagcaactcctatcaaagcatcttcgagttttgcctgctgcagggcctactgccttctctccggcctcaaccgtacagacagttccagttcaccagcacacttctatcaccaccatccaccacacgttcctgcagcattttgctgtttctgcttccttaagttctcatagcagtcacctccctattgctcatctacatcctctttcacaggcacatttcagtcctatttcattttcgactctgactccaaccattatccctgcacaccccactttcttagcaggtcatcccctgcatttagtagctgctacccccttccacccatctcacataacacttcagcctctgccccctacagcatttattcctacattgtttggtcctcacttaaatccagccacaacttctatcatccacttgaatcctttaatccaaccagtattccaaggtcaagatttttgccatcattcttgctctagccagatgcaacagctaaatgaagtgaaagaggccttaaatgtgtccacacacttgaactaa

SEQ ID NO: 203887 - DNA, 3968 bp, Homo sapiens
  Payload ID: 20213
  Gene Name: zinc finger protein 804B
  ENST ID: ENST00000611114
  CDS Start-End: 143-3943
ggattttgcagaaaagaagtccacagcaaaggccctggaagatgtaaaggcaaacttttactgtgaattatgtgacaagcagtatcacaaacaccaggagtttgacaatcatattaattcttatgaccatgctcataagcagagactgaaagaattaaagcaacgggaatttgctcgaaatgtagcttctaagtcatggaaagatgagaaaaaacaagaaaaagcacttaaacgacttcatcagctggctgagttaaggcagcaatctgaatgtgtttctggaaatggaccagcatacaaagcccccagggtagccatagaaaagcaactccagcaaggaattttccccattaagaatggcagaaaggtatcatgcatgaagagtgctcttctccttaaaggaaaaaatctccccagaatcatatccgataaacagcggtccaccatgccaaatcgacaccaattacaatcagacaggcgttgtttgtttggaaatcaggtactgcaaacatcttcagatctcagcaatgcaaatcacagaacaggagtatcatttactttttccaaaaaagtgcacctaaaattagaatcttcagcatcagttttcagtgagaacacagaagaaacccatgattgtaacaagtcacccatttataaaacaaaacaaactgcagataagtgcaagtgctgcaggtttgcaaataaagatacacaccttaccaaggaaaaagaggtaaatatctcaccaagccatctggaaagtgttttacacaataccatctccataaactctaaaattttgcaagacaaacacgactctattgatgagacactagaagattcaattggcattcatgcttcattctctaaatctaacattcatctttcagatgtagattttactcctaccagcagagaaaaagaaactagaaatacattgaagaacactttagaaaattgtgttaatcacccatgccaagcaaatgcttccttcagcccaccaaacatttacaaccatagtgatgccaggatatctgaatgcctggatgagttttcatcactggagccaagtgaacaaaagagtacagtgcatctgaatccaaattccagaatagagaacagagaaaaatctttagataaaacagaaagagttagcaaaaatgttcaaagacttgtaaaagaagcatgtacccataatgtggcatctaaaccactaccttttctccacgttcaaagcaaggatggccacaccactcttcaatggcctacggaacttctgctctttacaaaaacagaaccctgtatctcttatggctgcaacccactgtattttgattttaagctttctcggaacacaaaggaagaccacaatctagaggacttaaaaacagaattgggtaagaagcccttggaattgaagactaaaagagagagccaagtctcaggtttaactgaagaccaacaaaaattgatccaagaagattatcaatatccgaaaccaaagacgatgatagctaatccggattgggaaaaattccagaggaaatataatttggactacagtgattctgagccaaataagagtgaatatactttcagtgcaaatgatttggaaatgaaaaatcctaaagtgcctctttacctcaacacatctctaaaggattgtgctggaaagaataatagtagtgagaacaaacttaaggaagcttcaagggcccattggcaaggctgcagaaaggcagttctaaatgatatagatgaggacctatcttttccttcctacatctctaggtttaaaaagcataaattgattccctgcagtcctcatttggaatttgaagatgaaagacaattcaactgcaagtccagtccttgtacagtagggggtcacagtgaccatgggaaagacttcagtgtaattttgaagagtaaccacatcagcatgaccagcaaggtttccggatgtggaaaccaaagatacaagagatactctccacagtcatgtttgagtagatattcttcctctttggacacatcccctagcagcatgtctagcttgagaagtacttgttcaagtcatagattcaatggtaatagcagaggtaatttgctctgcttccataaaagagaacaccactcagttgaaaggcacaaacggaaatgtctaaagcacaactgcttctacttgtctgatgatataacaaagagcagccaaatgcagtctgaaccacagaaagagaggaactgcaaattgtgggaatcatttaaaaatgaaaaatactcaaaacgtagatattgtcactgcagagaaagacaaaaactgggcaaaaatcaacaacaattttcagggctaaaatctacgagaatcatctattgtgattctaactcacagatttcctgtactggaagcagtaaaaaaccacctaattgccagggaactcagcacgacagattggactcttactcaatagagaaaatgtattacttgaataaaagcaagagaaatcaagagtctttgggcagccctcacatttgtgatctgggaaaagtcaggcccatgaagtgtaactccgggaatatcagctgccttctaaagaactgttccagtggcccttcagaaaccacagaatcaaacactgcagaaggagagaggacccctctaacagcaaaaatccttttagaaagagtacaagccaagaaatgtcaagaacaatcaagtaatgttgagatctcttcaaacagttgtaaaagtgaattagaggctccttcgcaagtcccatgcacaattcaacttgcaccatcaggctgtaacagacaagcattgcctttgtctgaaaaaatacagtatgcaagtgagagcagaaatgatcaagacagtgcaattccaaggactacggagaaagacaaaagcaaaagttcacacacaaataattttacaattttagcagacactgattgtgataaccatctttctaaaggtataattcacctagtaacagagtctcagtcactaaacataaaaagggatgcaacaacaaaagaacaatcaaaacctttaattagtgaaatccaaccttttattcaaagctgtgacccagtaccaaatgaattccctggtgcttttccgtctaataaatatactggtgtgactgattcaacagagacccaagaagaccaaataaatctagacttacaggatgtaagcatgcatataaatcatgtagagggaaatataaactcttactatgacagaactatgcagaaacctgacaaagtcgaagacggattagaaatgtgtcataaatctatctctccccctttaattcaacagcccataacattttctcctgacgaaatagataaatataagatcctacagctacaagcccagcagcatatgcagaagcaactcctatcaaagcatcttcgagttttgcctgctgcagggcctactgccttctctccggcctcaaccgtacagacagttccagttcaccagcacacttctatcaccaccatccaccacacgttcctgcagcattttgctgtttctgcttccttaagttctcatagcagtcacctccctattgctcatctacatcctctttcacaggcacatttcagtcctatttcattttcgactctgactccaaccattatccctgcacaccccactttcttagcaggtcatcccctgcatttagtagctgctacccccttccacccatctcacataacacttcagcctctgccccctacagcatttattcctacattgtttggtcctcacttaaatccagccacaacttctatcatccacttgaatcctttaatccaaccagtattccaaggtcaagatttttgccatcattcttgctctagccagatgcaacagctaaatgaagtgaaagaggccttaaatgtgtccacacacttgaactaataagtgttaaagcccctcctgtgga

SEQ ID NO: 203888 - DNA, 2396 bp, Homo sapiens
  Payload ID: 20214
  Gene Name: zinc finger protein 805
  Uniprot ID: Q5CZA5
  ENST ID: ENST00000354309
  CDS Start-End: 480-1964
tggcggcgctggggaaatgagcaggtaggaggccgacagcgacctccgcgtctcggagcgaaccgtgagcctccccgtaacgagagagtttgactgtcagccaaggtcaccgggcccggcgcagggaaggggtggggctcggctgagcccgcgagacccgccctgctcgccgcagcccccgccccgctagggccacagggtcccggtatggcgatggctttgacggacccggcgcagggtgtcctgttcccagacctgagctgatctaccacctagagcatgggcaggagccatggaccaggaaggaagacctctcccaaggcacctgtccaggtgacaaaggaaaacccaagagcacagaacctaccacctgtgagctagccttgtctgaaggaatctctttttggggacaactaacacaaggagcttcaggggactcccagttggggcaacccaaggatcaggatgggttttcagaaatgcagggagaacgcttgagaccagggttagattcccaaaaggagaagcttcctggaaaaatgagccccaaacatgatggtttagggacagctgatagtgtgtgttcaaggattatacaggatcgagtctccttaggagatgatgtccatgactgtgactcacatggatcaggtaaaaatccagttattcaggaagaggaaaatatctttaaatgcaatgaatgtgaaaaagtgtttaacaagaaacgcctgcttgctcggcatgagaggattcactctggagtgaagccctatgaatgcacagagtgtggaaaaacctttagcaagagtacatacctcctgcagcaccacatggtccacactggggagaagccctataagtgcatggagtgtgggaaggcttttaatcggaagtcacaccttacccagcaccagcggattcacagtggagagaagccttataagtgcagtgaatgtggaaaggccttcacccaccgctccacttttgtcttgcataacaggagccacactggagaaaaaccctttgtgtgcaaagagtgtggcaaagcctttcgagataggccaggtttcattcgacactacatcatccacagtggtgagaatccctacgagtgcttcgaatgtggcaaggtcttcaaacacagatcatacctcatgtggcaccagcagactcataccggggagaagccctatgagtgcagtgaatgtgggaaggccttctgtgagagcgcagcgctgattcaccactatgtcatccacactggagagaagccctttgagtgcctcgagtgtgggaaggctttcaaccaccgatcctacctcaaaaggcaccagcggattcacactggggagaagccatatgtgtgtagtgaatgcggaaaggccttcacccactgctctactttcatcttgcataaaagggcccacactggagaaaaacctttcgagtgcaaagagtgtgggaaagcctttagcaatagggcagacctcattcgccacttcagcatccacactggagagaagccctatgagtgcatggagtgtggaaaggccttcaaccgcaggtcaggcctcacaaggcaccagcggattcatagtggagagaagccctatgaatgcatcgagtgtgggaaaacattttgctggagcacaaacctcattcgacactctatcatccacactggagagaagccgtatgagtgcagtgaatgtggaaaggccttcagtcgcagctcgtccctcactcagcatcaaaggatgcatactgggagaaatcctatcagtgtaacagatgtgggaagaccttttacaagtgggcagacctcagtcaacatccaagaacttttattggggaaaaactttttgaatgtcaccactgaggaaaatcttttgcaagaggaagcatcttacatggcatctgatcgtacataccaaagagaaaccccacaagtgtcttcactgtgagaaaaccttctgttgccaaatgtcatttgtcacctaaggagtcatattagaaaatcacgcagcttagagccttattctccatccgaattcatcctggaaaaacacccagtggttattacgcacttgggaaaacctttagctccatctttctcattagtttacagtgcaatgttatctcaggaatttttataaacagaaagaggtgacatagaaaagaaaatgaaatgcagacactgcttttatactgttgtcttgtatgtacatttctgtcctgtgtcaggaaagttagtaagggaaggtctggaaacttactcaatgtctttgttctacaacattgtctcttcttaagaagcattgtttttatgagaaataatgaagccttgagttatgaaatacttttatatttaaggattaaaagaaacatgaatgcgc

SEQ ID NO: 203889 - DNA, 1884 bp, Homo sapiens
  Payload ID: 20214
  Gene Name: zinc finger protein 805
  Uniprot ID: Q5CZA5
  ENST ID: ENST00000414468
  CDS Start-End: 1-1884
atggcgatggctttgacggacccggcgcaggtgtctgtgacctttgatgatgtggctgtgactttcacccaggaggagtggggccagctggacctagctcagcggaccctgtaccaggaggtgatgctggaaaactgtgggctcctggtatctctggggtgtcctgttcccagacctgagctgatctaccacctagagcatgggcaggagccatggaccaggaaggaagacctctcccaaggcacctgtccaggtgacaaaggaaaacccaagagcacagaacctaccacctgtgagctagccttgtctgaaggaatctctttttggggacaactaacacaaggagcttcaggggactcccagttggggcaacccaaggatcaggatgggttttcagaaatgcagggagaacgcttgagaccagggttagattcccaaaaggagaagcttcctggaaaaatgagccccaaacatgatggtttagggacagctgatagtgtgtgttcaaggattatacaggatcgagtctccttaggagatgatgtccatgactgtgactcacatggatcaggtaaaaatccagttattcaggaagaggaaaatatctttaaatgcaatgaatgtgaaaaagtgtttaacaagaaacgcctgcttgctcggcatgagaggattcactctggagtgaagccctatgaatgcacagagtgtggaaaaacctttagcaagagtacatacctcctgcagcaccacatggtccacactggggagaagccctataagtgcatggagtgtgggaaggcttttaatcggaagtcacaccttacccagcaccagcggattcacagtggagagaagccttataagtgcagtgaatgtggaaaggccttcacccaccgctccacttttgtcttgcataacaggagccacactggagaaaaaccctttgtgtgcaaagagtgtggcaaagcctttcgagataggccaggtttcattcgacactacatcatccacagtggtgagaatccctacgagtgcttcgaatgtggcaaggtcttcaaacacagatcatacctcatgtggcaccagcagactcataccggggagaagccctatgagtgcagtgaatgtgggaaggccttctgtgagagcgcagcgctgattcaccactatgtcatccacactggagagaagccctttgagtgcctcgagtgtgggaaggctttcaaccaccgatcctacctcaaaaggcaccagcggattcacactggggagaagccatatgtgtgtagtgaatgcggaaaggccttcacccactgctctactttcatcttgcataaaagggcccacactggagaaaaacctttcgagtgcaaagagtgtgggaaagcctttagcaatagggcagacctcattcgccacttcagcatccacactggagagaagccctatgagtgcatggagtgtggaaaggccttcaaccgcaggtcaggcctcacaaggcaccagcggattcatagtggagagaagccctatgaatgcatcgagtgtgggaaaacattttgctggagcacaaacctcattcgacactctatcatccacactggagagaagccgtatgagtgcagtgaatgtggaaaggccttcagtcgcagctcgtccctcactcagcatcaaaggatgcatactgggagaaatcctatcagtgtaacagatgtgggaagaccttttacaagtgggcagacctcagtcaacatccaagaacttttattggggaaaaactttttgaatgtcaccactgaggaaaatcttttgcaagaggaagcatcttacatggcatctgatcgtacataccaaagagaaaccccacaagtgtcttcactgtga

SEQ ID NO: 203890 - DNA, 3600 bp, Homo sapiens
  Payload ID: 20215
  Gene Name: zinc finger protein 808
  Uniprot ID: Q8N4W9
  ENST ID: ENST00000359798
  CDS Start-End: 181-2892
cgcggagattaacgcaaacccggaagcggatcgggtggagtgaaggtcacgtcgccatgatatctcttccaaatgcttgatgaaaaaggtggaagggtcacttgacccagggagttgaaggctgcagtgagccctgtttttgccaccacactccagcctgggattgatttctaaagactcatgttacgtgaggaagcagctcagaagaggaaaggaaaggagtcaggcatggctcttcctcagggacgcttgactttcagggatgtggctatagaattctcattggcagagtggaaattcctgaaccctgcacagagggctttgtacagggaagtgatgttggagaactacaggaacctggaggctgtggatatctcttccaaacacatgatgaaggaggtcttgtcaacagggcaaggcaatagagaagtgatccacacagggacattgcaaagacatcaaagttatcacattggagacttttgcttccaggaaattgagaaagaaattcataacattgagtttcagtgtcaagaagatgaaagaaatggccatgaagcacccacgacaaaaataaaaaagttgactggtagcacagaccaacatgatcacaggcatgctggaaacaagcctattaaagatcagcttggatcaagcttttattcacatctgcctgaactccacatatttcagatcaaaggtgaaattgctaatcaacttgagaagtctaccagtgatgcttcctcagtttcaacatcccaaagaatttcctgtaggccccaaatccatatttctaataactatgggaataatcccctgaattcttcattactcccacaaaaacaggaagtacacatgagagaaaaatctttcccatgtaatgagagtggcaaagcctttaattgtagctcactcttaaggaaacaccagataccccatttaggagacaaacaatataaatgtgatgtatgtggcaagctctttaatcacaagcaataccttgcatgccatcgtagatgtcacactggagagaaaccttacaagtgtaaagagtgtggaaagtccttcagttacaagtcatcccttacatgccatcatagacttcatactggagtaaaaccttacaagtgtaatgagtgtggcaaggtctttcgtcaaaattcagcccttgtaattcataaggcaattcatactggagagaaaccttacaagtgtaatgaatgtggcaaggcttttaatcaacaatcacacctttcacgccatcaaagacttcatactggagtgaaaccttacaaatgtaagatttgtgagaaggcttttgcgtgtcattcctatctggcaaaccatactagaattcatagtggagagaaaacatacaagtgtaatgagtgtggtaaggcttttaatcatcaatcaagccttgcacgtcatcatatacttcatactggagagaaaccttacaaatgtgaagaatgtgacaaagttttcagtcagaaatcaacccttgagagacataagagaattcatactggagagaaaccatacaaatgtaaggtttgtgatacagctttcacgtgtaattcacagctggcacgacatagaagaattcacactggagagaaaacttacaagtgtaatgagtgtcgcaagaccttcagccgcaggtcatcccttctatgccatcgtagacttcatagtggtgaaaaaccttacaagtgtaatcagtgtggcaataccttccgtcaccgggcatcccttgtataccatcgtagacttcacactctagagaaatcttacaaatgtacggtttgtaacaaggttttcatgcgtaattcagtcctggctgtacatactagaattcacactgcaaagaaaccttacaagtgtaatgaatgtgggaaagcttttaatcaacaatcacatctttcacgtcatcgtagacttcatactggagagaaaccttacaaatgtgaagcatgtgacaaagtttttggtcagaaatcagctcttgagtcacataagagaattcatactggagagaaaccatacagatgtcaggtttgtgacacagctttcacgtggaattcacagctggcacgacatacaagaattcacactggagaaaaaacttacaagtgtaatgagtgtgggaagaccttcagttacaagtcatcacttgtatggcatcgtagacttcatggtggagagaaatcttacaaatgtaaggtttgtgacaaggctttcgtgtgtcgttcctatgtggcaaaacatactagaattcacagtggaatgaaaccttacaagtgtaatgagtgcagcaagaccttcagtaacaggtcatcccttgtatgccatcgtagaattcatagtggtgagaaaccttacaagtgtagtgagtgcagcaagacgttcagtcagaaggcaacccttctatgccatcgtagacttcatagtggtgagaaaccttacaagtgtaacgactgtggcaataccttccgtcactggtcatcccttgtataccatcgtagacttcatactggagagaaatcttacaaatgtacggtttgtgacaaggctttcgtgcgtaattcatacctggcaagacatattagaattcacactgcagagaaaccttacaagtgtaatgaatgtggaaaggcttttaatgaacaatcacacctttcacgtcatcatagaattcatactggagagaaaccttacaaatgtgaagcatgtgacaaagttttcagtcgcaaatcacaccttaaaagacataggataattcatactggagagaaaccttacaagtgtaatgagtgtggcaaagcctttagtgaccggtcaacacttattcaccatcaggcaattcatggtatagggaaatttgattaatataatgattgtcacaaagtcttcagtaacactacaacaattgcaaatcattggagaatccatgatgaagagaaatcttctgagtgtaataaatgtggcatgtttttcagacattgttcatacattgcagttcattggcaacctcatactggagagaaaccttacaaatgtcatgattgaggcaaggtcttcagtcaagcttcatcctatgcaaaacaggagaattcatacaggagagaaacctcacaagtgtgatgattgtggcaaagcctttacttcacattcacacctcgttggacatcagagaatccatactggacagaaatcttgcaaatgtcatcagtgtggcaaggtcttcagtccgaggtcactccttgcagaacatgagaaaattcatttttgagataactgttcccaatgcagtgagtatagcaaaccatcaagcattaattgacattggagtcaattcagcattgacttgagtttgtgttgacttaacattgagttcaagccttaattgacattcaagtgtttatgttaagaggatggggccaggtgtggtggctcaggcctgtaatcccagcacgttggaagaccaaggcacataggtcacttgaggtcagaagtttgaaaccaccatggccaacagatgtcggccactttcgccatcctgttttttgtttcttattttcttatttatttatttat

SEQ ID NO: 203891 - DNA, 572 bp, Homo sapiens
  Payload ID: 20215
  Gene Name: zinc finger protein 808
  ENST ID: ENST00000461779
  CDS Start-End: 323-572
atggtgagttttgctctgtgttgcattaagtctccgcttcccaggtccccgccgcttctgtccctgggacgtggggtccccacagacctggaaattctcgcccgtcttccttcgcccagagcaaattgagacagcccagtgagaggccgggtgtcgcttcctttcgggtttaaagtcgtctggaggctggtcccgtcccggatatctcttccaaatgcttgatgaaaaaggtggaagggtcacttgacccagggagttgaaggctgcagtgagccctgtttttgccaccacactccagcctgggattgatttctaaagactcatgttacgtgaggaagcagctcagaagaggaaaggaaaggagtcaggcatggctcttcctcagggacgcttgactttcagggatgtggctatagaattctcattggcagagtggaaattcctgaaccctgcacagagggctttgtacagggaagtgatgttggagaactacaggaacctggaggctgtggatatctcttccaaacacatgatgaaggaggtcttgtcaacagggcaaggcaatagagaag

SEQ ID NO: 203892 - DNA, 553 bp, Homo sapiens
  Payload ID: 20215
  Gene Name: zinc finger protein 808
  ENST ID: ENST00000486474
  CDS Start-End: 246-553
aaacccggaagcggatcgggtggagtgaaggtcacgtcgccatgatatctcttccaaatgcttgatgaaaaaggtggaagggtcacttgacccagggagttgaaggctgcagtgagccctgtttttgccaccacactccagcctgggattgatttctaaagactcatgttacgtgaggaagcagctcagaagaggaaaggaaaggagtcaggcatggctcttcctcagatatctcttccaaacacatgatgaaggaggtcttgtcaacagggcaaggcaatagagaagtgatccacacagggacattgcaaagacatcaaagttatcacattggagacttttgcttccaggaaattgagaaagaaattcataacattgagtttcagtgtcaagaagatgaaagaaatggccatgaagcacccacgacaaaaataaaaaagttgactggtagcacagaccaacatgatcacaggcatgctggaaacaagcctattaaagatcagcttggatcaagcttttattcacatctgcctgaactccacatatttcagat

SEQ ID NO: 203893 - DNA, 601 bp, Homo sapiens
  Payload ID: 20215
  Gene Name: zinc finger protein 808
  ENST ID: ENST00000461321
  CDS Start-End: 82-601
ttcagtcctgggcgcgcaaaccccgaggcggatcgcgtggagtgaaggtcgtaccgcggcgcgattgatttctaaagactcatgttacgtgaggaagcagctcagaagaggaaaggaaaggagtcaggcatggctcttcctcagggacgcttgactttcagggatgtggctatagaattctcattggcagagtggaaattcctgaaccctgcacagagggctttgtacagggaagtgatgttggagaactacaggaacctggaggctgtggatatctcttccaaacacatgatgaaggaggtcttgtcaacagggcaaggcaatagagaagtgatccacacagggacattgcaaagacatcaaagttatcacattggagacttttgcttccaggaaattgagaaagaaattcataacattgagtttcagtgtcaagaagatgaaagaaatggccatgaagcacccacgacaaaaataaaaaagttgactggtagcacagaccaacatgatcacaggcatgctggaaacaagcctattaaagatcagcttggatcaagcttttattcacatctgcctgaactccacatatttcagatcaaag

SEQ ID NO: 203894 - DNA, 608 bp, Homo sapiens
  Payload ID: 20215
  Gene Name: zinc finger protein 808
  ENST ID: ENST00000465448
  CDS Start-End: 69-608
aacgcaaacccggaagcggatcgggtggagtgaaggtcacgtcgccatggattgatttctaaagactcatgttacgtgaggaagcagctcagaagaggaaaggaaaggagtcaggcatggctcttcctcagggacgcttgactttcagggatgtggctatagaattctcattggcagagtggaaattcctgaaccctgcacagagggctttgtacagggaagtgatgttggagaactacaggaacctggaggctgtggatatctcttccaaacacatgatgaaggaggtcttgtcaacagggcaaggcaatagagaagtgatccacacagggacattgcaaagacatcaaagttatcacattggagacttttgcttccaggaaattgagaaagaaattcataacattgagtttcagtgtcaagaagatgaaagaaatggccatgaagcacccacgacaaaaataaaaaagttgactggtagcacagaccaacatgatcacaggcatgctggaaacaagcctattaaagatcagcttggatcaagcttttattcacatctgcctgaactccacatatttcagatcaaaggtgaaattgctaatcaactt

SEQ ID NO: 203895 - DNA, 4233 bp, Homo sapiens
  Payload ID: 20215
  Gene Name: zinc finger protein 808
  Uniprot ID: Q8N4W9
  ENST ID: ENST00000487863
  CDS Start-End: 160-2664
gcgcggagattaacgcaaacccggaagcggatcgggtggagtgaaggtcacgtcgccatggattgatttctaaagactcatgttacgtgaggaagcagctcagaagaggaaaggaaaggagtcaggcatggctcttcctcagatatctcttccaaacacatgatgaaggaggtcttgtcaacagggcaaggcaatagagaagtgatccacacagggacattgcaaagacatcaaagttatcacattggagacttttgcttccaggaaattgagaaagaaattcataacattgagtttcagtgtcaagaagatgaaagaaatggccatgaagcacccacgacaaaaataaaaaagttgactggtagcacagaccaacatgatcacaggcatgctggaaacaagcctattaaagatcagcttggatcaagcttttattcacatctgcctgaactccacatatttcagatcaaaggtgaaattgctaatcaacttgagaagtctaccagtgatgcttcctcagtttcaacatcccaaagaatttcctgtaggccccaaatccatatttctaataactatgggaataatcccctgaattcttcattactcccacaaaaacaggaagtacacatgagagaaaaatctttcccatgtaatgagagtggcaaagcctttaattgtagctcactcttaaggaaacaccagataccccatttaggagacaaacaatataaatgtgatgtatgtggcaagctctttaatcacaagcaataccttgcatgccatcgtagatgtcacactggagagaaaccttacaagtgtaaagagtgtggaaagtccttcagttacaagtcatcccttacatgccatcatagacttcatactggagtaaaaccttacaagtgtaatgagtgtggcaaggtctttcgtcaaaattcagcccttgtaattcataaggcaattcatactggagagaaaccttacaagtgtaatgaatgtggcaaggcttttaatcaacaatcacacctttcacgccatcaaagacttcatactggagtgaaaccttacaaatgtaagatttgtgagaaggcttttgcgtgtcattcctatctggcaaaccatactagaattcatagtggagagaaaacatacaagtgtaatgagtgtggtaaggcttttaatcatcaatcaagccttgcacgtcatcatatacttcatactggagagaaaccttacaaatgtgaagaatgtgacaaagttttcagtcagaaatcaacccttgagagacataagagaattcatactggagagaaaccatacaaatgtaaggtttgtgatacagctttcacgtgtaattcacagctggcacgacatagaagaattcacactggagagaaaacttacaagtgtaatgagtgtcgcaagaccttcagccgcaggtcatcccttctatgccatcgtagacttcatagtggtgaaaaaccttacaagtgtaatcagtgtggcaataccttccgtcaccgggcatcccttgtataccatcgtagacttcacactctagagaaatcttacaaatgtacggtttgtaacaaggttttcatgcgtaattcagtcctggctgtacatactagaattcacactgcaaagaaaccttacaagtgtaatgaatgtgggaaagcttttaatcaacaatcacatctttcacgtcatcgtagacttcatactggagagaaaccttacaaatgtgaagcatgtgacaaagtttttggtcagaaatcagctcttgagtcacataagagaattcatactggagagaaaccatacagatgtcaggtttgtgacacagctttcacgtggaattcacagctggcacgacatacaagaattcacactggagaaaaaacttacaagtgtaatgagtgtgggaagaccttcagttacaagtcatcacttgtatggcatcgtagacttcatggtggagagaaatcttacaaatgtaaggtttgtgacaaggctttcgtgtgtcgttcctatgtggcaaaacatactagaattcacagtggaatgaaaccttacaagtgtaatgagtgcagcaagaccttcagtaacaggtcatcccttgtatgccatcgtagaattcatagtggtgagaaaccttacaagtgtagtgagtgcagcaagacgttcagtcagaaggcaacccttctatgccatcgtagacttcatagtggtgagaaaccttacaagtgtaacgactgtggcaataccttccgtcactggtcatcccttgtataccatcgtagacttcatactggagagaaatcttacaaatgtacggtttgtgacaaggctttcgtgcgtaattcatacctggcaagacatattagaattcacactgcagagaaaccttacaagtgtaatgaatgtggaaaggcttttaatgaacaatcacacctttcacgtcatcatagaattcatactggagagaaaccttacaaatgtgaagcatgtgacaaagttttcagtcgcaaatcacaccttaaaagacataggataattcatactggagagaaaccttacaagtgtaatgagtgtggcaaagcctttagtgaccggtcaacacttattcaccatcaggcaattcatggtatagggaaatttgattaatataatgattgtcacaaagtcttcagtaacactacaacaattgcaaatcattggagaatccatgatgaagagaaatcttctgagtgtaataaatgtggcatgtttttcagacattgttcatacattgcagttcattggcaacctcatactggagagaaaccttacaaatgtcatgattgaggcaaggtcttcagtcaagcttcatcctatgcaaaacaggagaattcatacaggagagaaacctcacaagtgtgatgattgtggcaaagcctttacttcacattcacacctcgttggacatcagagaatccatactggacagaaatcttgcaaatgtcatcagtgtggcaaggtcttcagtccgaggtcactccttgcagaacatgagaaaattcatttttgagataactgttcccaatgcagcttttcagtaagtggtatgcctgggaaacatggtgagacccccgtttctgcaaaaaatacaaaaattagctgggaatgatggcacatgcctgcagtatcaactactgtggagtctgcagtgggaggatggcttgagcctgggaggtcaagactatagtgagctgtaatcatgctactgcactccagcatggttgacagagcaagatgctgtctaaaaaagaatacttattgtaaagtttgggtacaggaataatgaagtcattgatagtttatgaacaggctatggagttgatgcccaaaagaaataaacagtttgtaaatgaataacttattttgagttgtgacaagacaatgttgaaagtgatgcatgaagcggcaggcagaccatccacatcagttttacagaaaaaaagttaatcttgttcgtgctgcagtgaagagaacagcaaacaggagaaacaatagtcaggaattcaataatagcctggttaacatgatgaaaccccgtctctactaaaaatacaaagattagctgggcacagtggtgggcacctgtaatcccagctactcaagaggctgaggcagaagaattgcttgaacccgggaggcggaagtttcgatgagccgggatcctgccgttgcactccagcctgggcaacaagagcaaacctctgtctaaaacaaacaaacaaaaaggtctagccccctctcctcctttgtctgccatcatggtgtgtgcttgactccacttcttgtcatgtcttctcacaagactttcaggattaagcggtttctggccaacaaccaaaagtaaaatcgtccgatttcccagtggattcgaatgaaaactggcaataaaatcaggtccaactttaaaaggagacattggagaagaaccaagctgggtctataaggaattgcacgtgagatggcacacatatttatgctgtgtgagcatcataatcacgttacttaagctgaaaatgtcactaccatctggagacttggacatgttttattgggaatatatttttttctctctgaatctgttatgaacgcattggttgggtgggttcagtaataaacatgtgagacctttcatttcaaaaaaaaaattttaatgacataatagattacctaaatttc

SEQ ID NO: 203896 - DNA, 1136 bp, Homo sapiens
  Payload ID: 20215
  Gene Name: zinc finger protein 808
  ENST ID: ENST00000611267
  CDS Start-End: 177-407
caaatgtgaagcatgtgacaaagttttcagtcgcaaatcacaccttaaaagacataggataattcatactgaagagaaatcttctgagtgtaataaatgtggcatgtttttcagacattgttcatacattgcagttcattggcaacctcatactggagagaaaccttacaaatgtcatgattgaggcaaggtcttcagtcaagcttcatcctatgcaaaacaggagaattcatacaggagagaaacctcacaagtgtgatgattgtggcaaagcctttacttcacattcacacctcgttggacatcagagaatccatactggacagaaatcttgcaaatgtcatcagtgtggcaaggtcttcagtccgaggtcactccttgcagaacatgagaaaattcatttttgagataactgttcccaatgcagtgagtatagcaaaccatcaagcattaattgacattggagtcaattcagcattgacttgagtttgtgttgacttaacattgagttcaagccttaattgacattcaagtgtttatgttaagaggatggggccaggtgtggtggctcaggcctgtaatcccagcacgttggaagaccaaggcacataggtcacttgaggtcagaagtttgaaaccaccatggccaacagatgtcggccactttcgccatcctgttttttgtttcttattttcttatttatttatttatttattttgagatggagtgtcactcttgttgcccagcctagagtgcaatgatgtgatctcagctcaccacaacctccgcctcccgggttcaagcgattcctctgcctcagcctccctagttgctgggattacaggcatgtgccaccacacccggctaattttttgtatttgtagtagagacggggtttctccatattaggctggtcttgaactcccaacctcaggtgatctgcccaccttggcatcccaaagtcctgggattacaggcatgagccaccgtacccggtcttgtttcttattttctattttttatttttttgagaggcaggagaatggcgggtgaacccaggaggtggagcttgcagtaagcccagatagcaccattgcaactccagcctgggagacagagtgagactccgtctatt

SEQ ID NO: 203897 - DNA, 610 bp, Homo sapiens
  Payload ID: 20216
  Gene Name: zinc finger protein 81
  ENST ID: ENST00000334937
  CDS Start-End: 345-554
gttgtcaggaggattcgacgttcagtgcccagggatgtggaggtgatggggggccggggaggagtctcactctgtcacccaggctggagtgcagtttgtgtgatctcaactcactgcaacctctgcctcctgggttcaagcgattctcctgcctcagcctcccgagtagctggaattacagagttcttggagtctctgcggagtccctgggccagatctcacagtgaaagctgcaggatcttccttctgaccccagcagtccccgttgagtccaccgatcccactggaattataaagttgtcagcaagaaagccccagggctgaagtccaagtccgtcgggaacatgccagctaacgaggacgctccccagccaggggaacatggcagtgcctgtgaggtatcagtgtcatttgaggatgtgactgtggacttcagtagagaggagtggcagcaactggactctactcaaagacgcctgtaccaggatgtaatgttggagaactacagccacctgctctcagtgggtaaggacaaccatcctgtgaagttgtgaggagcctgttatgggttaaattgtgcccccaaataaaatatgttgaagtcctaata

SEQ ID NO: 203898 - DNA, 7859 bp, Homo sapiens
  Payload ID: 20216
  Gene Name: zinc finger protein 81
  Uniprot ID: P51508
  ENST ID: ENST00000338637
  CDS Start-End: 250-2235
ggaagcggctgcggttctcgccggttctcagccggggtttgatagttgtcaggaggattcgacgttcagtgcccagggatgtggagagttcttggagtctctgcggagtccctgggccagatctcacagtgaaagctgcaggatcttccttctgaccccagcagtccccgttgagtccaccgatcccactggaattataaagttgtcagcaagaaagccccagggctgaagtccaagtccgtcgggaacatgccagctaacgaggacgctccccagccaggggaacatggcagtgcctgtgaggtatcagtgtcatttgaggatgtgactgtggacttcagtagagaggagtggcagcaactggactctactcaaagacgcctgtaccaggatgtaatgttggagaactacagccacctgctctcagtggggttcgaagttcctaaaccagaggtcatcttcaagttggagcaaggagaggggccatggacattggaaggggaagccccacatcagagctgttcagatgggaaatttggaattaagccttcccagaggagaatttctgggaaatctacatttcatagtgaaatggagggtgaagacacaagagatgattcattatactctattttagaagaattgtggcaagatgctgaacagataaagagatgtcaggaaaaacacaacaaacttctgagtcgcactactttcctcaataagaaaatattgaatacagagtgggattatgaatataaagactttggaaaatttgttcatccaagcccaaatctcattctttcacagaaaagaccccataaacgtgattcatttgggaagagttttaagcataatttagacttacatattcataataaaagcaatgcagcaaagaacctggataaaactattgggcatggtcaagtttttacccagaactcttcttatagtcaccacgaaaatacacatacaggagtgaagttctgtgaacgtaatcaatgtggaaaagtcctcagcctcaaacactcactcagtcaaaatgtgaaatttcccattggagagaaagcaaacacatgtactgaatttgggaagatcttcacccagaggtcacatttctttgctcctcaaaaaattcatactgtggaaaaacctcatgagcttagcaaatgtgtaaatgtttttacacagaagccactactcagtatatatctgagagttcatagagatgaaaaactctacatatgtactaaatgtgggaaggccttcatccagaattcagaattaattatgcatgagaaaactcatactagagagaaaccctataaatgcaatgaatgtgggaaatcatttttccaggtgtcatctctactcaggcatcagacaactcatactggagaaaaactctttgaatgcagtgaatgtggtaaaggcttctccctgaactcagccctcaatatacatcagaaaattcacactggagagagacatcacaaatgcagtgagtgtgggaaagcctttacccaaaaatcaacactcaggatgcatcagagaattcatacaggagagaggtcctatatctgtactcaatgtgggcaggccttcatccagaaggcacacttgattgcacatcaaagaattcatactggagagaagccttatgaatgcagtgactgtgggaaatctttcccttctaagtcacaactccagatgcataagagaattcatacaggagagaaaccctatatatgcactgaatgtgggaaggctttcaccaacaggtcaaatctcaatactcaccagaagtctcatactggagaaaagtcttatatatgtgctgaatgtgggaaggccttcaccgacaggtcaaatttcaataaacaccagaccattcacactggagagaaaccctatgtttgtgctgattgtgggagggccttcatccagaagtcagagttgattacacatcagagaattcatactacagagaagccttataaatgtcctgactgtgagaaatccttctccaagaaaccacatctcaaagtacatcaacgaattcacacaggggagaaaccatatatatgtgcagaatgtgggaaagccttcactgataggtcaaatttcaataaacatcagacaattcatactggagataaaccgtataaatgcagcgactgtggaaaggggttcacccagaaatcagttctcagtatgcatcgcaatattcatacatgaaagtaatcctgtttcttgaaaatgagagccttataaggctgacaaaagtcaggtctaactatatattataaaattcatccaagacagatcctatatgaatacattgtataaggaaaagcatcaggctatctcacttgagatggaaaaaaattattcagaagaaactctcttaaaaatgcattgaaggagagagaatttgcacagcctcatgaaatatagtaaaagtcatactgggaaaaatgttgtcagtttggtgtgttaggaaaagccttcctatagaaagtattataagttaaattgttaccaaattctttataggaaggagagtgcaaaattatgtaaatgatggtcaggtttactgtgttatattaagcaatttaaagtgataacaaaatgaaaggtagtgcagcaaaataatataactggtgagtagacctactttcagttccatagggtgtttgtggcagaacacagtgcagaacaggaggaatattacattttttttcaaatttagaataattatgtccatcaaatgtttcttactgaatatgtctatcaaatatgtttcttattgaatatttctatcaagtgaatccacaatttaaaagtcactttggttttatatatacacacatctgcagatataattttataagaacacacaaatataatcctgtcattcgtactggtttccatgacatagtatcttgttttctttcattgtggtacaatgcaaagtagccacagattcctcccatcccaagtagcgtctctttgtctactacttgactttgaacttggccacgtgactttctttggccaatggaaattagcaaagagaatcaataagaagcttgagaagtgtgcaaagcctgccttgaagcttaccctctcttgctgctctttgcaaacctgaagaatctcaaattgccctactcgggggtgaggagccaccacatggagcagtggtgagccagccttgctgaggccccttagaccaagtagcctgccaattgtcagaattgggagtgaggttttccaagacctctagccccagctgagccagcctagcccagaagagccataccagttattccagctgatttacagaattgtgagataaataaaatgatgatagttttaagcaacatgagttttggggttagtttgttgtacagaaaatgctaagtaatatttgaaagtatatgtttgggggagggggcatagtggaccaaaacgtgacaagtggcattggctttgggtctgagtggcacgtagaaactggaaaaacagtgaggaaaactgtttttcctcaaataacaaaggttggatagttggcaacccatgttatttagtagggaaagatacagaaaaacagtcatcaccatactctgtgggaagatagagaatggaccaaacgaactggtggatctggctaaggagatttgcagcagaatatgggaagtatcagtttgcttcttttagctgcatatgatacgatacagaaagagagaaatgaactaaagaaataactgtttctttggcaagcagaattcagaagaaatatggaaaagccaaggattgctgggttgaaaaataatgctttcacatcactagtctctccagctatctaactattcgcaaggtaaaaaatggcctcagggtaaagatcaaatcatggttgtgtctgtaagactctttattacagtgtgtgaaatagttcagttggtgcttaggagaccatctcagctaaacttaagggcttctaaaaatcttcatgacgttgtcccatagaagcctgacatactactcaaagtggagagagacctatcttaaaaagaattgctgatgtggcatttggggaaaggagtagatccaaaccagattcataggaaactcacaaagtttttaatagagttttactagtaaaactacctccaggttggacttccagggactgaaacagttcaaaatgaaaagtggcctctggattcccctccctaacttctatgaataggatacaagctgagaaagttactcagatgcaaacacggtccatttcttatggaaaatgaagggcatctcagagggaagacccaagaacaatatattaaaatgagctggggagccgttcccagggagaactgtgccctaatcaagaaacgtatctgcccctggagccaagggaaccgacaacatttgctctgtgggatttcagaatcgttatggaacagtgactgatatgtgcctcatggtcctcctctttttgaatgggagtgtctattacagttatcctgtacctatcccaccattgtatatattgggtgtatgttggggggcatgtaacttgtcatttagctcacaggtatctggatcaagaaactgaaaaactgtacccaaggaacctcagccacacctgaacctgatacagaagacttgagattctggattggagcttgatgccacaattttggatgagaaatttggaggtcctggaataggggtgaacacattttgcatggggtggtaatgtgaatactttgtgaccagaagacacactgtgttaggtagaaaaatgctacagatgtcttcatccctgtatatgtgtccttcttcagtctttatttctctttgtgtttcagttaggataatttctattgatctgtcttcaaattcactgatgttttttctctcaccctggctttgtcaagtctactgctgaacccattgaaggcattcttcaactcagttatgttttatttttatttgtaatatttccatttgattcttacaattttcatatatctgctgaaattccccatcttttcatgcatgttcatgttttcccctttaccctttgtcttagtcagtttgagctgctataataaagcaccatagacttggtggcttataaacaacagaaatttattcctcacagttctggagcctggaagtctgagatcagaatctagcaaggttaggtcttggtgacggccctcttcaaggttgcaaactgctcacttcttgcattttcccatgtctacagctagagaactctttgggatcccttttataagggcaccaatcccattcatgagttctccacccacattacctaactaccacccaaaggctccacctcctaataccatcacattgaggattaggattttaacatatgaattttgggggggatgcaatcattcagcccataataccctctaacatattaatcatagttatttttaactccctgtctgatagttccaactactaggtcaactgagtctaggtctgttgttgtcttctcttgctcttttgcatctaataatttttggctgaatgtcacagatgttgtatgtaggacagtagaaactgaggtaaatagtaattattcctggaaacagccatggttgcccttttgataggccattagcatggggagattgaatccatctaatcaggagttgggctgagtttgtgtttctttgttgccagtgttacctttgctgtaccatagacttaaaattcctctattgttatcttatgcttgaggtaggcactggtttgcccagagaatttttatttttcccagaccacacttgcctttaggcctgtaggcctttcctgtgtgcctgcatctcagggagggtctctctccatgttgttgcctctatgttagtagtagacaactgttattacttggttcttgctgacctggtgagttggggggcaggggttgtcttgggccagcctcagtttttgtcaggccatgaatccctgggtcttgagggtgggattttttagtgatcctgccctcttccactggtagaaggcctttaatgatctgggcccaggatgatttcctgcccttttatcatgggtggaatttttttttccatttccctcactctagtcacagtgaatctttaactgtgtcctgagggcaacagggtttgctgcacttcttttagtggcttaaggattttgttctgtaggggagtagggtttcattggagctttgtgccatttctatgttaacagcagcccccttgcaggcctaccccatggaggtaggctttctccagtcttcttccttgtccccgtgtttcttgagagcactcagtggatgactatggagaagagcctgcaagcagagaccaactacccttaggtctacagctctcatgagtctcccgcactcagcctttagcaattcattaaaaattcttgttgaattcttactgcttgtatagtggcctcatcttccttcctgctgtaccacagatggcccaggagaggcacttgtcttttattatatttcaagctagttggttgctctgtaatcttagctctctgatgggttcgagaaaacttatgtttttgcagattacccagctttgttcttgttataaagatgggagcagtgttctttccagatgtctacatgctaggcagaaactagaagtctggacagtctccatggtctcctactatcagaatatgtgcccttttcagtgtgactttgccacttcacccatcaagaggtagaatctatttcttcaacccctgcaactgagcttggctattttgttggccaatgggacattaacaagtatgatacaagcagaggcttgagaagtgcctgcacaatgaggcttgcccacttttgcagctctttggaatcctgaacccatgtgtggaaaagcctgaactgtgctgttggaaaatgagagcgatcacatggagcagtaatggagcaaagaccagccatcccagttgagataccctacaccaaccagattttcaactgctggacatatgaatgaagctatcctaggcatgcagtcttggtcaaggcaactttggctggcagtctctgagatgaccctgaatgatccccacctcctggtattctcactcttatataatcccctcctcttgagtttggactggaattagtgacttggttctagtgaatagaatgaggcagaggtaatgggatgtcatgttcaagattggttacaaaaagactgtggcttccattttgggtgcttgcttactctctcagatggctcatcataggggaaacctgctgctacatcatgagatagccctgtggaaaggtccacatgagtgaactttgaagcatatcctcccccagtttagcctttagatgaggaccacagccaaatagcttgactgtaagccagatagcttgactcatgagggaccttcagccagaggcatcttttgagccatacgaattcctgacccatagaaactgcaagacaataaatgttgttttaagttgctaaattttagggtaatttgttacacagtaataggttaataatacactggcccagattaggaaggttctgccatccatcccagccatcccaaacaactaccagaataatggattaaaacgttaactgttttaagtcactaagttttgggcagcatgataacaacccagcaaaaagctaactgatacattgattatttattgcatttcttcctccactattcttctctaacagatgaccaatactaataaactactgtgaacactttcatgttttaatctctgctctgtgctcataatcatatatagacat

SEQ ID NO: 203899 - DNA, 492 bp, Homo sapiens
  Payload ID: 20216
  Gene Name: zinc finger protein 81
  ENST ID: ENST00000376950
  CDS Start-End: 182-492
gtgcccagggatgtggagagttcttggagtctctgcggagtccctgggccagatctcacagtgaaagctgcaggatcttccttctgaccccagcagtccccgttgagtccaccgatcccactggaattataaagttgtcagcaagaaagccccagggctgaagtccaagtccgtcgggaacatgccagctaacgaggacgctccccagccaggggaacatggcagtgcctgtgaggtatcagtgtcatttgaggatgtgactgtggacttcagtagagaggagtggcagcaactggactctactcaaagacgcctgtaccaggatgtaatgttggagaactacagccacctgctctcagtggggttcgaagttcctaaaccagaggtcatcttcaagttggagcaaggagaggggccatggacattggaaggggaagccccacatcagagctgttcagggatttccacatatttcgtcacatccacagtaaa

SEQ ID NO: 203900 - DNA, 7933 bp, Homo sapiens
  Payload ID: 20216
  Gene Name: zinc finger protein 81
  Uniprot ID: P51508
  ENST ID: ENST00000376954
  CDS Start-End: 369-2354
ggaagcggctgcggttctcgccggttctcagccggggtttgatagttgtcaggaggattcgacgttcagtgcccagggatgtggagagtctcactctgtcacccaggctggagtgcagtttgtgtgatctcaactcactgcaacctctgcctcctgggttcaagcgattctcctgcctcagcctcccgagtagctggaattacagagttcttggagtctctgcggagtccctgggccagatctcacagtgaaagctgcaggatcttccttctgaccccagcagtccccgttgagtccaccgatcccactggaattataaagttgtcagcaagaaagccccagggctgaagtccaagtccgtcgggaacatgccagctaacgaggacgctccccagccaggggaacatggcagtgcctgtgaggtatcagtgtcatttgaggatgtgactgtggacttcagtagagaggagtggcagcaactggactctactcaaagacgcctgtaccaggatgtaatgttggagaactacagccacctgctctcagtggggttcgaagttcctaaaccagaggtcatcttcaagttggagcaaggagaggggccatggacattggaaggggaagccccacatcagagctgttcagatgggaaatttggaattaagccttcccagaggagaatttctgggaaatctacatttcatagtgaaatggagggtgaagacacaagagatgattcattatactctattttagaagaattgtggcaagatgctgaacagataaagagatgtcaggaaaaacacaacaaacttctgagtcgcactactttcctcaataagaaaatattgaatacagagtgggattatgaatataaagactttggaaaatttgttcatccaagcccaaatctcattctttcacagaaaagaccccataaacgtgattcatttgggaagagttttaagcataatttagacttacatattcataataaaagcaatgcagcaaagaacctggataaaactattgggcatggtcaagtttttacccagaactcttcttatagtcaccacgaaaatacacatacaggagtgaagttctgtgaacgtaatcaatgtggaaaagtcctcagcctcaaacactcactcagtcaaaatgtgaaatttcccattggagagaaagcaaacacatgtactgaatttgggaagatcttcacccagaggtcacatttctttgctcctcaaaaaattcatactgtggaaaaacctcatgagcttagcaaatgtgtaaatgtttttacacagaagccactactcagtatatatctgagagttcatagagatgaaaaactctacatatgtactaaatgtgggaaggccttcatccagaattcagaattaattatgcatgagaaaactcatactagagagaaaccctataaatgcaatgaatgtgggaaatcatttttccaggtgtcatctctactcaggcatcagacaactcatactggagaaaaactctttgaatgcagtgaatgtggtaaaggcttctccctgaactcagccctcaatatacatcagaaaattcacactggagagagacatcacaaatgcagtgagtgtgggaaagcctttacccaaaaatcaacactcaggatgcatcagagaattcatacaggagagaggtcctatatctgtactcaatgtgggcaggccttcatccagaaggcacacttgattgcacatcaaagaattcatactggagagaagccttatgaatgcagtgactgtgggaaatctttcccttctaagtcacaactccagatgcataagagaattcatacaggagagaaaccctatatatgcactgaatgtgggaaggctttcaccaacaggtcaaatctcaatactcaccagaagtctcatactggagaaaagtcttatatatgtgctgaatgtgggaaggccttcaccgacaggtcaaatttcaataaacaccagaccattcacactggagagaaaccctatgtttgtgctgattgtgggagggccttcatccagaagtcagagttgattacacatcagagaattcatactacagagaagccttataaatgtcctgactgtgagaaatccttctccaagaaaccacatctcaaagtacatcaacgaattcacacaggggagaaaccatatatatgtgcagaatgtgggaaagccttcactgataggtcaaatttcaataaacatcagacaattcatactggagataaaccgtataaatgcagcgactgtggaaaggggttcacccagaaatcagttctcagtatgcatcgcaatattcatacatgaaagtaatcctgtttcttgaaaatgagagccttataaggctgacaaaagtcaggtctaactatatattataaaattcatccaagacagatcctatatgaatacattgtataaggaaaagcatcaggctatctcacttgagatggaaaaaaattattcagaagaaactctcttaaaaatgcattgaaggagagagaatttgcacagcctcatgaaatatagtaaaagtcatactgggaaaaatgttgtcagtttggtgtgttaggaaaagccttcctatagaaagtattataagttaaattgttaccaaattctttataggaaggagagtgcaaaattatgtaaatgatggtcaggtttactgtgttatattaagcaatttaaagtgataacaaaatgaaaggtagtgcagcaaaataatataactggtgagtagacctactttcagttccatagggtgtttgtggcagaacacagtgcagaacaggaggaatattacattttttttcaaatttagaataattatgtccatcaaatgtttcttactgaatatgtctatcaaatatgtttcttattgaatatttctatcaagtgaatccacaatttaaaagtcactttggttttatatatacacacatctgcagatataattttataagaacacacaaatataatcctgtcattcgtactggtttccatgacatagtatcttgttttctttcattgtggtacaatgcaaagtagccacagattcctcccatcccaagtagcgtctctttgtctactacttgactttgaacttggccacgtgactttctttggccaatggaaattagcaaagagaatcaataagaagcttgagaagtgtgcaaagcctgccttgaagcttaccctctcttgctgctctttgcaaacctgaagaatctcaaattgccctactcgggggtgaggagccaccacatggagcagtggtgagccagccttgctgaggccccttagaccaagtagcctgccaattgtcagaattgggagtgaggttttccaagacctctagccccagctgagccagcctagcccagaagagccataccagttattccagctgatttacagaattgtgagataaataaaatgatgatagttttaagcaacatgagttttggggttagtttgttgtacagaaaatgctaagtaatatttgaaagtatatgtttgggggagggggcatagtggaccaaaacgtgacaagtggcattggctttgggtctgagtggcacgtagaaactggaaaaacagtgaggaaaactgtttttcctcaaataacaaaggttggatagttggcaacccatgttatttagtagggaaagatacagaaaaacagtcatcaccatactctgtgggaagatagagaatggaccaaacgaactggtggatctggctaaggagatttgcagcagaatatgggaagtatcagtttgcttcttttagctgcatatgatacgatacagaaagagagaaatgaactaaagaaataactgtttctttggcaagcagaattcagaagaaatatggaaaagccaaggattgctgggttgaaaaataatgctttcacatcactagtctctccagctatctaactattcgcaaggtaaaaaatggcctcagggtaaagatcaaatcatggttgtgtctgtaagactctttattacagtgtgtgaaatagttcagttggtgcttaggagaccatctcagctaaacttaagggcttctaaaaatcttcatgacgttgtcccatagaagcctgacatactactcaaagtggagagagacctatcttaaaaagaattgctgatgtggcatttggggaaaggagtagatccaaaccagattcataggaaactcacaaagtttttaatagagttttactagtaaaactacctccaggttggacttccagggactgaaacagttcaaaatgaaaagtggcctctggattcccctccctaacttctatgaataggatacaagctgagaaagttactcagatgcaaacacggtccatttcttatggaaaatgaagggcatctcagagggaagacccaagaacaatatattaaaatgagctggggagccgttcccagggagaactgtgccctaatcaagaaacgtatctgcccctggagccaagggaaccgacaacatttgctctgtgggatttcagaatcgttatggaacagtgactgatatgtgcctcatggtcctcctctttttgaatgggagtgtctattacagttatcctgtacctatcccaccattgtatatattgggtgtatgttggggggcatgtaacttgtcatttagctcacaggtatctggatcaagaaactgaaaaactgtacccaaggaacctcagccacacctgaacctgatacagaagacttgagattctggattggagcttgatgccacaattttggatgagaaatttggaggtcctggaataggggtgaacacattttgcatggggtggtaatgtgaatactttgtgaccagaagacacactgtgttaggtagaaaaatgctacagatgtcttcatccctgtatatgtgtccttcttcagtctttatttctctttgtgtttcagttaggataatttctattgatctgtcttcaaattcactgatgttttttctctcaccctggctttgtcaagtctactgctgaacccattgaaggcattcttcaactcagttatgttttatttttatttgtaatatttccatttgattcttacaattttcatatatctgctgaaattccccatcttttcatgcatgttcatgttttcccctttaccctttgtcttagtcagtttgagctgctataataaagcaccatagacttggtggcttataaacaacagaaatttattcctcacagttctggagcctggaagtctgagatcagaatctagcaaggttaggtcttggtgacggccctcttcaaggttgcaaactgctcacttcttgcattttcccatgtctacagctagagaactctttgggatcccttttataagggcaccaatcccattcatgagttctccacccacattacctaactaccacccaaaggctccacctcctaataccatcacattgaggattaggattttaacatatgaattttgggggggatgcaatcattcagcccataataccctctaacatattaatcatagttatttttaactccctgtctgatagttccaactactaggtcaactgagtctaggtctgttgttgtcttctcttgctcttttgcatctaataatttttggctgaatgtcacagatgttgtatgtaggacagtagaaactgaggtaaatagtaattattcctggaaacagccatggttgcccttttgataggccattagcatggggagattgaatccatctaatcaggagttgggctgagtttgtgtttctttgttgccagtgttacctttgctgtaccatagacttaaaattcctctattgttatcttatgcttgaggtaggcactggtttgcccagagaatttttatttttcccagaccacacttgcctttaggcctgtaggcctttcctgtgtgcctgcatctcagggagggtctctctccatgttgttgcctctatgttagtagtagacaactgttattacttggttcttgctgacctggtgagttggggggcaggggttgtcttgggccagcctcagtttttgtcaggccatgaatccctgggtcttgagggtgggattttttagtgatcctgccctcttccactggtagaaggcctttaatgatctgggcccaggatgatttcctgcccttttatcatgggtggaatttttttttccatttccctcactctagtcacagtgaatctttaactgtgtcctgagggcaacagggtttgctgcacttcttttagtggcttaaggattttgttctgtaggggagtagggtttcattggagctttgtgccatttctatgttaacagcagcccccttgcaggcctaccccatggaggtaggctttctccagtcttcttccttgtccccgtgtttcttgagagcactcagtggatgactatggagaagagcctgcaagcagagaccaactacccttaggtctacagctctcatgagtctcccgcactcagcctttagcaattcattaaaaattcttgttgaattcttactgcttgtatagtggcctcatcttccttcctgctgtaccacagatggcccaggagaggcacttgtcttttattatatttcaagctagttggttgctctgtaatcttagctctctgatgggttcgagaaaacttatgtttttgcagattacccagctttgttcttgttataaagatgggagcagtgttctttccagatgtctacatgctaggcagaaactagaagtctggacagtctccatggtctcctactatcagaatatgtgcccttttcagtgtgactttgccacttcacccatcaagaggtagaatctatttcttcaacccctgcaactgagcttggctattttgttggccaatgggacattaacaagtatgatacaagcagaggcttgagaagtgcctgcacaatgaggcttgcccacttttgcagctctttggaatcctgaacccatgtgtggaaaagcctgaactgtgctgttggaaaatgagagcgatcacatggagcagtaatggagcaaagaccagccatcccagttgagataccctacaccaaccagattttcaactgctggacatatgaatgaagctatcctaggcatgcagtcttggtcaaggcaactttggctggcagtctctgagatgaccctgaatgatccccacctcctggtattctcactcttatataatcccctcctcttgagtttggactggaattagtgacttggttctagtgaatagaatgaggcagaggtaatgggatgtcatgttcaagattggttacaaaaagactgtggcttccattttgggtgcttgcttactctctcagatggctcatcataggggaaacctgctgctacatcatgagatagccctgtggaaaggtccacatgagtgaactttgaagcatatcctcccccagtttagcctttagatgaggaccacagccaaatagcttgactgtaagccagatagcttgactcatgagggaccttcagccagaggcatcttttgagccatacgaattcctgacccatagaaactgcaagacaataaatgttgttttaagttgctaaattttagggtaatttgttacacagtaataggttaataatacactggcccagattaggaaggttctgccatccatcccagccatcccaaacaactaccagaataatggattaaaacgttaactgttttaagtcactaagttttgggcagcatgataacaacccagcaaaaagctaactgatacattgattatttattgcatttcttcctccactattcttctctaacagatgaccaatactaataaactactgtgaacactt

SEQ ID NO: 203901 - DNA, 2098 bp, Homo sapiens
  Payload ID: 20217
  Gene Name: zinc finger protein 812
  Uniprot ID: P0C7V5
  ENST ID: ENST00000457674
  CDS Start-End: 520-1884
gtcaaatacagaatgtgatgttccattccagccaatggaaaccggacgctgcagtagggtggacacgtcaggttataaatgaccctgtttcctttgtttagtgtactctagtggcaaaactgctggctagtgtacctgttctgccaaaagtaaaatgggcttactgaggaaattaaatttatgttcaagtgctatttctttatgcaccggggaacaagcatttctaacaacctggtcctacgtggctgaaactggatcccagaagccccgtccttcccgaagctcgtagcggaagtgacatcagcccgccgccactatcttttcccgcgctggctgcccacggtcagtgctgtttcacctttatcttggtggagtcgaccccggctgtggacttcaaataaccctgtacaaagaggaatggagattgcctctattcacctagattcataagttgccctgaggcaatcttggcatcaaggaagagagcattgaggcacaactgaccatcagcttcagagaatggcagtcactgatttgtcccatgggttttttcccagggaaccaatctgcccttttgaagaaaagacaaagataggaacgatggtggaggactacctggcaaattcttatcaggattcagtgacgtttgatgatgtggctgtggagttcaccccagaggagtgggctttactggacacaactgagaaatgcctctacagagatgtgatgttggagaactatgtgaacctggcctctgtggaagctacagtggatggaaactctgagaattgtggagaggtcttcagtgaatggttttgccttaaaacacacatgagagctcagaatggagggaacatctttgagggtaattgttatggaaaagacatcctcagtgtgcacaaggaagcctctattggacaggaactttccaaatttaatccatgtggaaaagtcttcaccttaactccagatcttgctgcacatcttggaattctcaatgcaagacaaccatacaaatgtaaggaatgtagaaaaggctttaagtattttgcaagccttgataatcacatgggaatccacattggagagaaattctgtgaatttcaggaatgtaggagagccatcactcattcctcacacctaaagcagtgtgtaacagttcatactggaaagaaatctaaaaagactaagaaacatgggaaatccttcactaatttttctcaactttctgcacatgtgaaaattcataaaggagagaagtcctttgaatgtaaagaatgtggaagatcctttagaaattcctcatcctttaatgttcacattcaaattcacactggaataaaaccacacaaatatacggaatgtgggaaagccttcactaggtcaactcaccttactcaacatgtaagaactcacactggaataaaaccctatgaatgtaaggaatgtggccaagccttcactcagtacacgggccttgctatacacatacgaaatcacactggagagaaacactatcagtgtaaggaatgtgggaaagccttcaatggatcctcaacccttactcaacataaaataattcacacaggagagaagccttatggatgtgttgaatgtgggaagaccttcattacttcttcctatcgtagtaaacatttgaaaactcaccatgaagaaaggccctttgtatgcaagatatgtgggaaagcatttctatattcctcaccccttaatgttcacctgcaaactcataccagagagaaagccctcatatgtaaagaatgtgggaaagcttttgctgtttcctcacacctaagtagacatgaaagaattcacactggggaggaaccctatgaatataagggtatgaatgttaccatttagctcattggttgccatctttaattagtggcagtgacactaaagatattcagatttgtcctaaatgccttttggaggttgtaatggctcatgaattggccttgggtgccatcacaagggtctgaaattaaacctacaggttctgaatacaacatcatggttgcctgagtctgggcatctgtgaagaagggtaatggatggtgaggtcagtactgca

SEQ ID NO: 203902 - DNA, 2011 bp, Homo sapiens
  Payload ID: 20217
  Gene Name: zinc finger protein 812
  Uniprot ID: P0C7V5
  ENST ID: ENST00000453792
  CDS Start-End: 647-2011
ctttgcttcttttaaaaagttctgacttggtagccaaccgggtcaaatacagaatgtgatgttccattccagccaatggaaaccggacgctgcagtagggtggacacgtcaggttataaatgaccctgtttcctttgtttagtgtactctagtggcaaaactgctggctagtgtacctgttctgccaaaagtaaaatgggcttactgaggaaattaaatttatgttcaagtgctatttctttatgcaccggggaacaagcatttctaacaacctggtcctacgtggctgaaactggatcccagaagccccgtccttcccgaagctcgtagcggaagtgacatcagcccgccgccactatcttttcccgcgctggctgcccacggtcagtgctgtttcacctttatcttggtggagtcgaccccggctgtggaaaaggatttctgccattctggtaaggttggctctggccccgcatcctcccgcgtcaggaacctggcgattccggagtgttcttggacttcaaataaccctgtacaaagaggaatggagattgcctctattcacctagattcataagttgccctgaggcaatcttggcatcaaggaagagagcattgaggcacaactgaccatcagcttcagagaatggcagtcactgatttgtcccatgggttttttcccagggaaccaatctgcccttttgaagaaaagacaaagataggaacgatggtggaggactacctggcaaattcttatcaggattcagtgacgtttgatgatgtggctgtggagttcaccccagaggagtgggctttactggacacaactgagaaatgcctctacagagatgtgatgttggagaactatgtgaacctggcctctgtggaagctacagtggatggaaactctgagaattgtggagaggtcttcagtgaatggttttgccttaaaacacacatgagagctcagaatggagggaacatctttgagggtaattgttatggaaaagacatcctcagtgtgcacaaggaagcctctattggacaggaactttccaaatttaatccatgtggaaaagtcttcaccttaactccagatcttgctgcacatcttggaattctcaatgcaagacaaccatacaaatgtaaggaatgtagaaaaggctttaagtattttgcaagccttgataatcacatgggaatccacattggagagaaattctgtgaatttcaggaatgtaggagagccatcactcattcctcacacctaaagcagtgtgtaacagttcatactggaaagaaatctaaaaagactaagaaacatgggaaatccttcactaatttttctcaactttctgcacatgtgaaaattcataaaggagagaagtcctttgaatgtaaagaatgtggaagatcctttagaaattcctcatcctttaatgttcacattcaaattcacactggaataaaaccacacaaatatacggaatgtgggaaagccttcactaggtcaactcaccttactcaacatgtaagaactcacactggaataaaaccctatgaatgtaaggaatgtggccaagccttcactcagtacacgggccttgctatacacatacgaaatcacactggagagaaacactatcagtgtaaggaatgtgggaaagccttcaatggatcctcaacccttactcaacataaaataattcacacaggagagaagccttatggatgtgttgaatgtgggaagaccttcattacttcttcctatcgtagtaaacatttgaaaactcaccatgaagaaaggccctttgtatgcaagatatgtgggaaagcatttctatattcctcaccccttaatgttcacctgcaaactcataccagagagaaagccctcatatgtaaagaatgtgggaaagcttttgctgtttcctcacacctaagtagacatgaaagaattcacactggggaggaaccctatgaatataagggtatgaatgttaccatttag

SEQ ID NO: 203903 - DNA, 565 bp, Homo sapiens
  Payload ID: 20217
  Gene Name: zinc finger protein 812
  ENST ID: ENST00000590544
  CDS Start-End: 469-565
gtcaaatacagaatgtgatgttccattccagccaatggaaaccggacgctgcagtagggtggacacgtcaggttataaatgaccctgtttcctttgtttagtgtactctagtggcaaaactgctggctagtgtacctgttctgccaaaagtaaaatgggcttactgaggaaattaaatttatgttcaagtgctatttctttatgcaccggggaacaagcatttctaacaacctggtcctacgtggctgaaactggatcccagaagccccgtccttcccgaagctcgtagcggaagtgacatcagcccgccgccactatcttttcccgcgctggctgcccacggtcagtgctgtttcacctttatcttggtggagtcgaccccggctgtgcagacaagaagctacagtggatggaaactctgagaattgtggagaggtcttcagtgaatggttttgccttaaaacacacatgagagctcagaatggagggaacatctttgagggtaattgttatggaaaagacatcctcagtgtgcacaaggaagcctctattggacaggaacttt

SEQ ID NO: 203904 - DNA, 587 bp, Homo sapiens
  Payload ID: 20217
  Gene Name: zinc finger protein 812
  ENST ID: ENST00000585964
  CDS Start-End: 502-587
actctagtggcaaaactgctggctagtgtacctgttctgccaaaagtaaaatgggcttactgaggaaattaaatttatgttcaagtgctatttctttatgcaccggggaacaagcatttctaacaacctggtcctacgtggctgaaactggatcccagaagccccgtccttcccgaagctcgtagcggaagtgacatcagcccgccgccactatcttttcccgcgctggctgcccacggtcagtgctgtttcacctttatcttggtggagtcgaccccggctgtggaaaaggatttctgccattctggtaaggttggctctggccccgcatcctcccgcgtcaggaacctggcgattccggagtgttcttggacttcaaataaccctgtacaaagaggaatggagattgcctctattcacctagattcataagttgccctgaggcaatcttggcatcaaggaagagagcattgaggcacaactgaccatcagcttcagagaatggcagtcactgatttgtcccatgggttttttcccagggaaccaatctgcccttttgaagaaaagacaaagataggaacgatggt

SEQ ID NO: 203905 - DNA, 6151 bp, Homo sapiens
  Payload ID: 20218
  Gene Name: zinc finger protein 813
  Uniprot ID: Q6ZN06
  ENST ID: ENST00000396403
  CDS Start-End: 129-1982
agattcgcgaaaacccggaagcggatcgcgtggagtgacggtcccacggcagcgcgattgacttctaaagactcttggtatgtgaggaagaaacctggaagaggaagaggaaagcaaaggagtcagggatggctcttcctcagggtctattgacattcagggatgtggccatagaattctctcaggaggagtggaaatgcctggaccctgctcagaggactctatacagggacgtgatgctggagaattataggaacctggtctccctggatatctcttccaaatgcatgatgaaggagttctcatcaacagcacaaggcaatagagaagtgatccacacagggacattgcaaagacatgaaagtcatcacactggagactttcgctttcaggaaattgataaagatattcataacttagagtttcagtggcaagaagatgaaagaaatagccatgaagcacccatgacagaaatcaaaaagttgactggtagtgcagaccgatatgatcaaaggcatgctggaaacaagcctattaaagatcagcttggatcaagctttcattcgcatctgcctgaactccacatgtttcagacccaagggaaaattggtaatcaagtggagaagtctatcaacgatgcttcctcaatttcaacatcccaaagaatttcttgtaggcccaaaacccatatttctaataactatgggaataatttccggaattcttcgttactcacacaaaaacaggaggtacacatgagagaaaagtctttccaatgtaatgagagtggcaaagcctttaattatagctcactcttaaggaaacatcaaataatccatttaggagagaaacaatataaatgtgatgtatgtggcaaggtctttaatcggaagcgaaacctagtgtgccatcgtagatgtcacactggggagaaaccttacaggtgtaatgagtgtggcaagactttcagtcagacgtattcccttacatgccatcgtagacttcatactggagagaaaccttacaaatgtgaagaatgtgacaaagctttcagtttcaaatcaaaccttaaaagacataggagaattcatgctggagaaaaaccatacaagtgtaatgaatgtggcaagacctttagtcagacgtcatcccttacatgccatcgtagacttcatactggagagaaacctttcaagtgtaatgagtgtggcaagacctttagtcggaagtcatcccttacatgccatcatagacttcatacgggagagaaaccttataagtgtaatgaatgtggcaagaccttcagtcaggagttaacccttaaatgccatcgtagacttcataccggagagaagccttacaagtgtaatgaatgtggcaaggtttttaataaaaaggcaaaccttgcacgtcatcatagacttcatagtggagagaaaccctacaagtgtactgagtgtgtcaagacgttcagtcgaaattcagcccttgtaattcataaggctattcatattggagagaaacgttacaagtgtaatgagtgtggcaagacgttcagtcgaatttcagccctcgtaattcatacggcaattcatactggagagaaaccttacaagtgtaatgaatgtggcaagggttttaatcggaaaacacaccttgcatgtcatcatagacttcatactggagagaaaccttacaagtgtaatgaatgtggcaaggtttttaatcgaaaaacacaccttgcacatcatcatagacttcatactggagataaaccttacaagtgtaatgaatgtggcaaggtttttaatcaaaaagcacaccttgcacgtcaccatagacttcatactggagagaaaccttacaagtgtaatgaatgtggcaaggtttttaatcaaaaagcaaaccttgcacgtcatcatagacttcatactggagagaaaccttacaagtttaatgagtgtggcaaagcttttaattgaaaagcaaagcttgcacatcatcatacaattcatactggaaagaaacaagtgcaatgagtgtggcaagaccttctgtcacaattcagtccttgtaattcataagaattcatactggagagaaacaagtgtaatgaacgttgcaaaatttttaatcaacaagcacaccttccacgtcatcatagacttcatagtggagagaaaccttagaaatgtgaagcatgtgacaaagtttacagtggcaaatcgagcctcaaaagacaggagaattcatactggagagaaagcttacaaaggtgaagaatatcacagagttttcagtcacaagtcaaaccttgaaagacataaaataaatcatactgcagagaaaccataaaattgtaagagttcgtgacaaggctttcgggcatgactcacacctggcacaacatcctagaatttatactggagagaaaccttacaagtgtaatgagtctggcaaagccttaatgagcagtcaacacttactcaccatcaggcaatccatggtgaaggaaacttgactaatgtaatgattgtcaccaagtcttcagtaacgctacaaccattgcaaatcattggagaacccataaggaagagagatcatacaagtgtaataatcggcaaatttttcagacatcgtccataccttgcagttcattggcgaactcatactggagacaaaccttataaatgtcatgattgaggcaaggtcttcagtcaagcttcatcctatgcaaaacataggagaattcatacaggagagaaacctcacgtgtgatgattgtggcaaagcctttacttcacgttcacacctccttagacatcagagaatgcacactggacggaaatcttacaaatgtcatcagtgtggcaaggttttcagtctgacttcactccttgcagaatatcagaaaattcattttgagataattgttccaaatgcaatgagtagagcaaaccatcaagcagtaattgacattaaagtgtttatgttaagaggattgggccaggtacagtgtctcacacctgtaatcccagcactttgggaggccaaggcgggtagatcacttgaggtcaggagtttcagatcagtctggccaacaaacatgagccacttttcccagtttgctttttgttctttaacaaaaactgatagggatttttatgggtaccgtgttgaatctaaatcacattgggttatataatcatttaacaatattaatttttccaatccatcaatatgggttatatgtctgtatatgtttttaatcatattgatgtatatttgtagatttcaaggtacaaacttctcacctttttacttttatttctatttctttaagttctctagcaaatggaagtgtttttaaattttcttttaaaattgtttattgttacaaacttctcatctttttgcttttattcctaagtatttcttactttaagttctctagcaaatggaagtgtttttaaattttcttttaaaattgtttattgttaatgtatggaaattcagctaatttttggtgctgatattgtactgtgcagatacactgaatctgtttattacttccagtagtattttggttgagtctttgtgattttctacacagaagatcatgtcatctacaaacacatataattttacttctttctttctgatttggatgggtttgatttcttttgctatttcattgctctggctaggacagccagtatttattgaatagaaggggtgagagcattcttccatcatgtgagatcctacaggaaaatcattccatgttccctgcttcgttatctactcgttggtcatttcatggatggcctttctattgttgaggtaaatttccttttctgtctattttgttcagaatttctatgatgagtggattttgaattttgtgaaatactttttctccatctattgagatgatgtggttttcatctttcattctgttcaagtggcatatcacattgatttgcttgactatgttgaaccatccttgcatcccagaaataagtggcacttgagtatctacagtcctttttacatcctcttgaatacagctttttagtacaaggggtcttcaagaagttcatggaaaaatacatattttgcatattatgagaaaattgtgtatgaatttcccagtttttgcaccaaaataaactggtacgaatctgttatgtctgaacaggtcctagtttgaggcacccagaaggataagacatgagttttaaaagagactttctctgccgggcgcagtggctcatgcctgtaatcccaacactttgggaggccaaggtgggtggatcacctgagatccagagttcgagaccagcctcaccaacatggagaaacagcatctctactaaaaatacaaaattagccaggcatggtggcaaatgcctgtaatcccagatactctggaggctgaggcaggagaatggcttgaacccgggaggcagagattgctgtgagccgagattgcaccattgcactccagcctggtcaacaagagcgaaactctgtctcaaaaaaaaaaaaaagaaaagaaaagaaaagagactctatcaaagcaatataaatcctgctaaaattgaaacaaaaaggagcatcaaatttacagtgagaccagatgcagtggctcaggcctgtaatcccagcactttcagaggccaagacaggtgggtcatgtaagcccaggtattcaagacaagcctgggcaacatggtgaaacccccttgtctacaaaaaatacaaaaattagctgggcacggtagcacatgcatgcagggccagctgctgtggagtctgtggtaggaggatagctcgagcctgggaggttgaggctgcagtgagctatgatcatgccactgcattccagcatgggtgatggagcgagatactggctcaaaaaaaaaaatacttcttgtaaagtttgggtagaggaataatgaaatcattgatgctttatgaaaagattatggagatgatgcccagaagaaataaacagtttgtaaatggataacttagtttgagttgggacaagacaatgttgaaggtgatgcatggagtggcaggcacaccatccacatcagtttttttgtttgtttttgttgttgttgtttttttgagatggtgtctcgctctgtctcccaggctggaatgcagtggtgcaatctcggctcactgcaacctctgcctcccgggttcaagtgattctcctgtctctgcctccttagtagctgggactacaggcgcgtgccaccacatcagctaatttttgtatttttagtaagacggggtttcaccatgttggcaaggctggtcttgaactcctgacctcacgatctgcccacctcagcctcccaaagtgtggagattacaggcatgagccaccatgccccttgcacatcagttttacaaaaaaatttatcttgtttgtgccacaatgaagaggactgacaggtaacagcagaaacaatagtcaggagtttgagaacaggctgattaacatggtgaaaccccgtctctactaaaaatacaaaaattagctgggtgtggtggcgggtgcttgtaatcccagttactcaggaggctgaggctgcattatcgctttaacctggggggcggaggttgcagtgagccaagatgggggcaataagagcaaaactttgtctcaaaaaaaaataaataaataaaaaataaaatatgtcaagccccttctcttcctgtctcctctcgtggtgtgtacttgactccccttctcgccagatctcacaggactttcagatttaagcaatacctggccaagaaacaaaagcaaaatcattccattcccccagtggattcagatcaaaactggtaataaaatcaggtacgactccaaaaggagacattggagaagaacgaagcggggtctataaggaattgcacgtgagatggcacacatatttatgctgtgtgagcattacaatcgcgttaccatatcaagctgaaaatgtcaccactatctggagtgttggaaatgttttattgggaatatgttttttctctgaatctgctatgaacacgtcagttgggtgggttcagtaataaatatgtgagacttttcatttcaaaataaaaaaggcaaatgatgtaa

SEQ ID NO: 203906 - DNA, 559 bp, Homo sapiens
  Payload ID: 20218
  Gene Name: zinc finger protein 813
  ENST ID: ENST00000490956
  CDS Start-End: 121-559
gaaaacccggaagcggatcgcgtggagtgacggtcccacggcagcgcgattgacttctaaagactcttggtatgtgaggaagaaacctggaagaggaagaggaaagcaaaggagtcagggatggctcttcctcagggtctattgacattcagggatgtggccatagaattctctcaggaggagtggaaatgcctggaccctgctcagaggactctatacagggacgtgatgctggagaattataggaacctggtctccctggacacagggtttctccttttttgtctggccgatctcaaactcctgccctcaggtgatccatcaacctcagcctccgaaactgctgcgattacagatatctcttccaaatgcatgatgaaggagttctcatcaacagcacaaggcaatagagaagtgatccacacagggacattgcaaagacatgaaagtcatcacactggagactttcgctttcaggaaattgataaagatattcataacttagagtttcagtggcaagaagatgaaagaaatagccatgaagcacccatgacagaaa

SEQ ID NO: 203907 - DNA, 535 bp, Homo sapiens
  Payload ID: 20218
  Gene Name: zinc finger protein 813
  ENST ID: ENST00000468450
  CDS Start-End: 161-535
agattcgcgaaaacccggaagcggatcgcgtggagtgacggtcccacggcagcgcgattgacttctaaagactcttggtatgtgaggaagaaacctggaagaggaagaggaaagcaaaggagtcagggatggctcttcctcagatatctcttccaaatgcatgatgaaggagttctcatcaacagcacaaggcaatagagaagtgatccacacagggacattgcaaagacatgaaagtcatcacactggagactttcgctttcaggaaattgataaagatattcataacttagagtttcagtggcaagaagatgaaagaaatagccatgaagcacccatgacagaaatcaaaaagttgactggtagtgcagaccgatatgatcaaaggcatgctggaaacaagcctattaaagatcagcttggatcaagctttcattcgcatctgcctgaactccacatgtttcagacccaagggaaaattggtaatcaagtggagaagtctatcaacgatgcttcctcaatttcaacatcccaa

SEQ ID NO: 203908 - DNA, 3146 bp, Homo sapiens
  Payload ID: 20219
  Gene Name: zinc finger protein 814
  Uniprot ID: B7Z6K7
  ENST ID: ENST00000435989
  CDS Start-End: 236-2803
attttgattggtgttggatttatttgtaggagaggctcctgagcgctaggtccgcactgtggtgactgaacccagaagtcggggagcagttgtcctccgctgcacagaggctactctggagctctgtgacggcgcccagcgtgacccactcctgggccaggatacggaccgtcgtgcccatatctcctggctggtcgccctatcctcccgactctgcttaaaaccacgtggttcgatggctgccgcggctacgctgaggctctccgctcagggcacagtgacttttgaagatgtggctgtgaactttacctgggaggaatggaatctccttagtgaggctcagagatgcctgtaccgtgatgtgacgctggagaacctggcacttatatcctccctgggttgttggtgtggagtggaagatgaggcggcaccttctaagcagagtatttatatacaaagagagactcaggtcaggactcctatggcaggtgtgtctcccaagaaggcccacccctgtgagatgtgtggcccgatcttgggagacattttgcatgtggcagatcatcagggaacacatcacaagcagaaactgcacaggtgtgaggcctgggggaataaattgtatgacagtggaaactttcatcagcaccagaatgagcacattggagagaaaccctacagagggagtgttgaggaggcgttgtttgcaaagaggtgtaagttgcatgtgtcaggggagtcatctgtcttcagtgagagtgggaaggactttttgcccaggtcaggattactccagcaggaggccagtcacactggggagaagtcaaacagcaaaactgagtgtgtgtctcccattcagtgtgggggagctcactacagctgtggagaatccatgaaacattttagcaccaaacatatactcagtcagcaccagagactgctcactagagaagagtgttatgtgtgctgtgaatgtgggaagtcctttagcaaatatgctagcttgagtaatcatcagagagttcacactgaaaaaaaacatgaatgtggagaatgtgggaaatcctttagcaaatatgttagcttcagtaatcatcagagagttcacactgaaaaaaaacatgaatgtggagaatgtgggaaatcctttagcaaatatgttagcttcagtaatcatcagagagttcacactgggaaaagaccttatgaatgtggagaatgtgggaaatcgtttagcaaatatgctagcttcagtaatcatcagagagttcacactgaaaaaaaacattatgaatgtggagaatgtgggaaatcctttagcaaatatgttagcttcagtaatcatcagagagttcacactgggaaaagaccttatgaatgtggagaatgtgggaaatcgtttagcaaatatgctagcttcagtaatcatcagagagttcacactgacaaaaaacattatgaatgtggagaatgtgggaaatcctttagtcaaaagagcagcctcattcaacatcagcgatttcacactggagaaaaaccttatgggtgtgaagaatgtgggaaatcttttagttcagaaggacatcttaggagccatcaacgagttcacgccggagaaagacctttcaagtgtggagaatgtgtgaaatctttcagtcataagcgcagccttgttcaccatcagcgagttcacagtggagaaagaccttatcagtgtggagaatgtgggaaatctttcagtcaaaagggcaacctcgttctacaccagcgagttcacactggagcaagaccttatgagtgtggagaatgtgggaaatcatttagttcaaaaggacatcttaggaaccatcagcaaattcacactggggacagactttatgagtgtggagagtgtgggaaatcttttagtcataaaggcaccctcattctacatcagcgagttcaccctagagaaagatcttatgggtgtggagaatgtgggaaatcttttagttcaatcgggcaccttaggagccatcagcgcgttcatactggagagaggccttatgagtgtggagaatgtgggaaatcttttagtcataagcgcagccttgttcaccatcagcgcatgcacactggagaaagaccttacaagtgtggagactgtgggaaatcttttaatgaaaaaggacaccttaggaatcatcagcgagttcacactacagaaagaccttttaagtgtggggaatgtgggaaatgttttagtcacaagggtaacctcattctacaccagcatggccatactggagaaagaccttatgtatgtagggaatgtggaaaattatttaagaagaagtctcacctccttgtacaccagagaattcacaatggagaaaagccatatgcttgtgaagcttgtcagaaattttttagaaacaagtaccaactcattgcacatcagagagttcacactggagaaaggccttatgaatgcaatgattgtggaaaatcatttacccacagctctacattctgtgttcataagcgaattcacactggagaaaagccttatgagtgcagtgaatgtggaaaatctttcgctgaaagctccagtttcacaaaacacaaaagagttcacactggagaaaagccttatgagtgcagtgaatgtggaaaatcttttgctgaaagctccagtctcactaaacacaagagagttcacactggagaaaagccttataaatgtgagaaatgtgggaaattatttaacaagaagtctcacctccttgtacaccagagttcacactggagaaaagccatatgagtgtgaggattgtcagaaagtttttagcaagaaggaccacctcattgcacaccagagagttcacactggagaaaggccatatgaatgcagtgattgtgggaagtcatctacccacagctctgcattctgtgttcataagagagttcacactggtcacaccaccttatgagtgcagtgaatgtgggaaatcctttgctgaaactttcagtctcattaaacacaggagagttcacactggagtaaggtcttgtgattgcagcaaatgtgggaaaaaagttacctgaaggtcttttctccttgaatatcagagagttcacactagacaaataaaatacatttgggc

SEQ ID NO: 203909 - DNA, 771 bp, Homo sapiens
  Payload ID: 20219
  Gene Name: zinc finger protein 814
  ENST ID: ENST00000597807
  CDS Start-End: 168-356
aacccagaagtcggggagcagttgtcctccgctgcacagaggctactctggagctctgtgacggcgcccagcgtgacccactcctgggccaggatacggaccgtcgtgcccatatctcctggctggtcgccctatcctcccgactctgcttaaaaccacgtggttcgatggctgccgcggctacgctgaggctctccgctcagggcacagtgacttttgaagatgtggctgtgaactttacctgggaggaatggaatctccttagtgaggctcagagatgcctgtaccgtgatgtgacgctggagaacctggcacttatatcctccctgggtaagttgctcacactcaccctgtgacctgagctagtctctgttttcccctatctttccccattggtaagactttctcatgtcaggagcatggacacagcttcctgcttcagttctgtgggtaggttcttggttggtaggtctgaggtgtacatactgccctactcctttcttggagcagccccaacacctgctttactgcaggctcccagggagggattcccagtcagaagcccaccttgttagtcctgtggatgtttgggtgtccttgtccagatttcaggttcctgtgtacccacagtctacttcctttctctagctgctattttcttatgccttcctgtggcaggaattgccttcacagactacatcactgcctatatagaccagaggctgttcttgcaagaccttctttagaaattctccttgaaatactcagttt

SEQ ID NO: 203910 - DNA, 909 bp, Homo sapiens
  Payload ID: 20219
  Gene Name: zinc finger protein 814
  ENST ID: ENST00000595295
  CDS Start-End: 20-139
cttaaaaccacgtggttcgatggctgccgcggctacgctgaggctctccgctcagcagcttcttcttggcacaatcctgaactgggcagaacgtccttcccaaactcgcggaagacaaatggctcctgtgacaccctgagcttacgtttctttacaaacgatgcttctctgacactctttctgtagaatttctctccaatatgctgcttctggtgctgatgaaggtatgcagtgtcatccaagttttttccacatgctccactcctgttcagcttctgcttgtgatgagtttcctggtggtcagcaaagtgaaaaacatcctccaagatgaggccacacatttcacaggggtgagccttcttaggagaaacacctgccctaggagtcctgctctgagactctctttgtacagaaattctctgcttacaaggtgcctcctcatcttttgatccacaccaacaacctgaaagcaagaaaatgctggtcaagtgcaaagtacctccggcgggaaggcacagcccacccacaagtacgtctcacaaattgaggaattaatctatagaaatatttgcaggaacacaatgttggcttcaagttgaagatggggctgctggctgggcatggtggctcacacctgtaatcccagcactttgggaggctgaggcgggtggatcacctgaggtcagaagttcaagaccagcatgaacaacatggtgaaaccccatctctactaaaaatacaaaaattagctggatgtggttgtggacacctgtaatcccagctactcgggaggctaaagcaggagaatcatttgaacccagaaggcagaggtttgtagtgagcagtgattacgccactgcaccccagcctggacaacagagtgagactcaatcacaaaaaaaaaaaaaa

SEQ ID NO: 203911 - DNA, 2090 bp, Homo sapiens
  Payload ID: 20219
  Gene Name: zinc finger protein 814
  ENST ID: ENST00000597832
  CDS Start-End: 218-424
tttatttgtaggagaggctcctgagcgctaggtccgcactgtggtgactgaacccagaagtcggggagcagttgtcctccgctgcacagaggctactctggagctctgtgacggcgcccagcgtgacccactcctgggccaggatacggaccgtcgtgcccatatctcctggctggtcgccctatcctcccgactctgcttaaaaccacgtggttcgatggctgccgcggctacgctgaggctctccgctcagggcacagtgacttttgaagatgtggctgtgaactttacctgggaggaatggaatctccttagtgaggctcagagatgcctgtaccgtgatgtgacgctggagaacctggcacttatatcctccctggtctatgcaacaaggtccagccagatgaagcctgtagccaggtagaactgtggtaatatcacctcctgactttgatccgttttatctctaagcatttcacaacctggtagcaaatcctgggttaatcttacaagggtgtttacattggttgacagaaatgggaatacctccatataacctgtcatggacttggtatcctggcttcagagattctccagggtcctcggatcaaaggactgaaaaaaatggcacttaagagtcccaggacaccacaagctagagaacctgtagatggcgtcaggaccaatgagggaatggaacaccctccacttccctgtgtgggttccctaagtgcttctgcagccaggagtgcctgaggggaaaggcagacattacaaacatgtcacaggatttgataagctcaggactccctgaaccctttcttgtccctggaaccaggtaaccctaaggctggttgtctgacctgcttttctcagtgcaaaatgtcatctctaccatctatgtgatctacaaaacggattcaacctcccaaggccccaaagtcctcatcctctctctctatgatgttcttcctttgattggcctttgggaaacttcttaaaagcctggatttggatcatgtccctcctttcttcaaaactctccatggcttctagaatcctcatgatgaatgcacagcccctggcctgcttgctctaccaggaagagctccatctcacacgttgttcctgacagatgcctgtgaaccccaggttccatccttccagctctgtccatctgcaggccattgcctgcacccctacctgtgcctgtcactctccccactgcatcccactggtgtcagaaacaggtgaaaccgactttgcaaaattataactgacgaaattatgacagtgaaagaaatcagacctaaccgactccatcttgcttccaacctttcagccgtcttttttcattcctgggcataggctgaattaactttggaaaagaattcagttcatggtttcactctgaaacaaaattgataatagccctttcctgaaaagacccctttcttgcctggggaccagcctgtctttgcaggactaacaaattagctacaagaatagaaattacggtttaggggtcatgcagcttctggctccaagagtctgaacctccccaagttgctcctgaagataaccttactattgtaaaacctaatgtgagtttctggggtgctagttgagttggtctcccctgtgtgagacacccatgggaagccatgggcggcctctgaggagaaaagtctccttattgccttcatgtctttatgccccgagagcataactcttcagcagcattccatgggttgctcagggagatcacactcccttgaagcagtggagcataatcaaacatcttggctcctcctgaaacccgcagccacccgtttcagttaagttaaagatcttaagtagtttagacacacgcctttgttcaaggaaattcacagaaacggccagtgctttacatcttatggaatgactcacgagttctcctttactgattaatccttttcctgatcgcttcctccccctccaatcagccataagaacaaagagcttgtaaaccaataaactgggtggagcccaagagctctgggccgccaggaagcctccaatgctctggccacctggacccgcctttt

SEQ ID NO: 203912 - DNA, 648 bp, Homo sapiens
  Payload ID: 20219
  Gene Name: zinc finger protein 814
  ENST ID: ENST00000597342
  CDS Start-End: 157-498
cggggagcagttgtcctccgctgcacagaggctactctggagctctgtgacggcgcccagcgtgacccactcctgggccaggatacggaccgtcgtgcccatatctcctggctggtcgccctatcctcccgactctgcttaaaaccacgtggttcgatggctgccgcggctacgctgaggctctccgctcaggagtctcactctgtcatccagactggagtgcagtggcgtgatcacagctcaccacaacctccgcctacaggagatattttgatacagggcacagtgacttttgaagatgtggctgtgaactttacctgggaggaatggaatctccttagtgaggctcagagatgcctgtaccgtgatgtgacgctggagaacctggcacttatatcctccctggatcctgcactggatggatcagcggacaacacacagaccggtaatctgggtcaatcagttctgccatcccacccagaacagaaaacagcatgaaaaactcactttaaccccctatgaatccatctccaaccagactgatcagcactccccacttcccaagcccctacccgccaaattttgaaaactctgatcccagaatgctcagggagactgatttgaataataaaactcctgtctcccgaa

SEQ ID NO: 203913 - DNA, 528 bp, Homo sapiens
  Payload ID: 20219
  Gene Name: zinc finger protein 814
  ENST ID: ENST00000596604
  CDS Start-End: 119-373
ggagctctgtgacggcgcccagcgtgacccactcctgggccaggatacggaccgtcgtgcccatatctcctggctggtcgccctatcctcccgactctgcttaaaaccacgtggttcgatggctgccgcggctacgctgaggctctccgctcagggcacagtgacttttgaagatgtggctgtgaactttacctgggaggaatggaatctccttagtgaggctcagagatgcctgtaccgtgatgtgacgctggagaacctggcacttatatcctccctggatcctgcactggatggatcagcggacaacacacagaccggtaatctgggtcaatcagttctgccatcccacccagaacagaaaacagcatgaaaaactcactttaaccccctatgaatccatctccaaccagactgatcagcactccccacttcccaagcccctacccgccaaattttgaaaactctgatcccagaatgctcagggagactgatttgaataataaaactcctgtctcccgaacagca

SEQ ID NO: 203914 - DNA, 389 bp, Homo sapiens
  Payload ID: 20219
  Gene Name: zinc finger protein 814
  ENST ID: ENST00000595048
  CDS Start-End: 1-284
ggctctccgctcagggcacagtgacttttgaagatgtggctgtgaactttacctgggaggaatggaatctccttagtgaggctcagagatgcctgtaccgtgatgtgacgctggagaacctggcacttatatcctccctggggatgacatttctccatgtttgtcaggccttggactctctacgtcaggtgatccatccacccacctcggcctcccaaagtgctgggattacaggatctcactctattccccaggctagagtgcgatggcaccatctcggctgattgcaacctccattttccaggaaggctctttaattccccctgattacaaaggttttgtgtgaacataatttggtgtaataaaaaaaaatttacaccacaagagac

SEQ ID NO: 203915 - DNA, 757 bp, Homo sapiens
  Payload ID: 20219
  Gene Name: zinc finger protein 814
  ENST ID: ENST00000597348
  CDS Start-End: 236-475
attttgattggtgttggatttatttgtaggagaggctcctgagcgctaggtccgcactgtggtgactgaacccagaagtcggggagcagttgtcctccgctgcacagaggctactctggagctctgtgacggcgcccagcgtgacccactcctgggccaggatacggaccgtcgtgcccatatctcctggctggtcgccctatcctcccgactctgcttaaaaccacgtggttcgatggctgccgcggctacgctgaggctctccgctcagggcacagtgacttttgaagatgtggctgtgaactttacctgggaggaatggaatctccttagtgaggctcagagatgcctgtaccgtgatgtgacgctggagaacctggcacttatatcctccctgggttgttggtgtggagtggaagatgaggcggcaccttctaagcagagtatttatatacaaagagagactcagggatgacatttctccatgtttgtcaggccttggactctctacgtcaggtgatccatccacccacctcggcctcccaaagtgctgggattacaggtgtgagccactgcgcctgacccttgcaggcaggatctcactctattccccaggctagagtgcgatggcaccatctcggctgattgcaacctccattttccaggaaggctctttaattccccctgattacaaaggttttgtgtgaacataatttggtgtaataaaaaaaaatttacaccacaagagacaaacata

SEQ ID NO: 203916 - DNA, 579 bp, Homo sapiens
  Payload ID: 20219
  Gene Name: zinc finger protein 814
  ENST ID: ENST00000595894
  CDS Start-End: 6-281
gttcgatggctgccgcggctacgctgaggctctccgctcagggcacagtgacttttgaagatgtggctgtgaactttacctgggaggaatggaatctccttagtgaggctcagagatgcctgtaccgtgatgtgacgctggagaacctggcacttatatcctccctggggatgacatttctccatgtttgtcaggccttggactctctacgtcaggtgatccatccacccacctcggcctcccaaagtgctgggattacaggtgtgagccactgcgcctgacccttgcagcagcttcttcttggcacaatcctgaactgggcagaacgtccttcccaaactcgcggaagacaaatggctcctgtgacaccctgagcttacgtttctttacaaacgatgcttctctgacactctttctgtagaatttctctccaatatgctgcttctggtgctgatgaagtctatgcaacaaggtccagccagatgaagcctgtagccaggtagaactgtgaaatgggaatacctccatataacctgtcatggacttggtatcctggcttcagagattctccagggtcct

SEQ ID NO: 203917 - DNA, 461 bp, Homo sapiens
  Payload ID: 20219
  Gene Name: zinc finger protein 814
  ENST ID: ENST00000600634
  CDS Start-End: 16-291
aaaccacgtggttcgatggctgccgcggctacgctgaggctctccgctcagggcacagtgacttttgaagatgtggctgtgaactttacctgggaggaatggaatctccttagtgaggctcagagatgcctgtaccgtgatgtgacgctggagaacctggcacttatatcctccctggggatgacatttctccatgtttgtcaggccttggactctctacgtcaggtgatccatccacccacctcggcctcccaaagtgctgggattacaggtgtgagccactgcgcctgacccttgcaggatctcactctattccccaggctagagtgcgatggcaccatctcggctgattgcaacctccattttccaggaaggctctttaattccccctgattacaaaggttttgtgtgaacataatttggtgtaataaaaaaaaatttacaccacaagagacaaacat

SEQ ID NO: 203918 - DNA, 2006 bp, Homo sapiens
  Payload ID: 20219
  Gene Name: zinc finger protein 814
  ENST ID: ENST00000614383
  CDS Start-End: 273-2006
aatgggtccggacttccggcgccctctggtggcggccattttgattggtgttggatttatttgtaggagaggctcctgagcgctaggtccgcactgtggtgactgaacccagaagtcggggagcagttgtcctccgctgcacagaggctactctggagctctgtgacggcgcccagcgtgacccactcctgggccaggatacggaccgtcgtgcccatatctcctggctggtcgccctatcctcccgactctgcttaaaaccacgtggttcgatggctgccgcggctacgctgaggctctccgctcagggcacagtgacttttgaagatgtggctgtgaactttacctgggaggaatggaatctccttagtgaggctcagagatgcctgtaccgtgatgtgacgctggagaacctggcacttatatcctccctgggttgttggtgtggagtggaagatgaggcggcaccttctaagcagagtatttatatacaaagagagactcaggtcaggactcctatggcaggtgtgtctcccaagaaggcccacccctgtgagatgtgtggcccgatcttgggagacattttgcatgtggcagatcatcagggaacacatcacaagcagaaactgcacaggtgtgaggcctgggggaataaattgtatgacagtggaaactttcatcagcaccagaatgagcacattggagagaaaccctacagagggagtgttgaggaggcgttgtttgcaaagaggtgtaagttgcatgtgtcaggggagtcatctgtcttcagtgagagtgggaaggactttttgcccaggtcaggattactccagcaggaggccagtcacactggggagaagtcaaacagcaaaactgagtgtgtgtctcccattcagtgtgggggagctcactacagctgtggagaatccatgaaacattttagcaccaaacatatactcagtcagcaccagagactgctcactagagaagagtgttatgtgtgctgtgaatgtgggaagtcctttagcaaatatgctagcttcagtaatcatcagagagttcacactgacaaaaaacattatgaatgtggagaatgtgggaaatcctttagtcaaaagagcagcctcattcaacatcagcgatttcacactggagaaaaaccttatgggtgtgaagaatgtgggaaatcttttagtcataagcgcagccttgttcaccatcagcgagttcacagtggagaaagaccttatcagtgtggagaatgtgggaaatctttcagtcaaaagggcaacctcgttctacaccagcgagttcacactggagcaagaccttatgagtgtggagaatgtgggaaatcatttagtcataagcgcagccttgttcaccatcagcgcatgcacactggagaaagaccttacaagtgtggagactgtgggaaatcttttaatgaaaaaggacaccttaggaatcatcagcgagttcacactacagaaagaccttttaagtgtggggaatgtgggaaatgttttagtcacaagggtaacctcattctacaccagcatggccatactggagaaagaccttatgtatgtagggaatgtggaaaattatttaagaagaagtctcacctccttgtacaccagagaattcacaatggagaaaagccatatgcttgtgaagcttgtcagaaattttttagaaacaactctacattctgtgttcataagcgaattcacactggagaaaagccttatgagtgcagtgaatgtggaaaatctttcgctgaaagctccagtttcacaaaacacaaaagagttcacactggagaaaagccttatgagtgcagtgaatgtggaaaatcttttgctgaaagctccagtctcactaaacacaagagagttcacactggagaaaagccttataaatgtgagaaatgtgggaaattatttaacaagaagtctcacctccttgtacaccagagttcacactggagaaaagccatatga

SEQ ID NO: 203919 - DNA, 484 bp, Homo sapiens
  Payload ID: 20220
  Gene Name: zinc finger protein 816
  ENST ID: ENST00000332302
  CDS Start-End: 189-484
ctagttgtctggtgctgctatataggggacgtggggtccccacagacctgcaggttccggcccctcttttctcaacccagagcaaattgaaacgtccgggtcttcctgtggaactttcttatctctgcatggtctctggtgcagtgggtagcaaaggaccatctttctctcgggatttccaaagactcatgttacgtgaggaagccaccaagaagagcaaagaaaaggagccagggatggctcttcctcagatggagtcctactctgcagcccaagctggagtgcaatggcacgatcttggctcactgcaacattcgtctcttgttctcaagttattctcgtgcatcagcctcccagggacgcttgactttcagggatgtggctatagagttctctttggaggagtggaaatgcctgaaccctgcacagagggctttatacagggctgtgatgttggagaactacaggaacctggagtttgtgg

SEQ ID NO: 203920 - DNA, 2697 bp, Homo sapiens
  Payload ID: 20220
  Gene Name: zinc finger protein 816
  Uniprot ID: Q0VGE8
  ENST ID: ENST00000357666
  CDS Start-End: 302-2257
cgtggactgaaagttgcacggcggcgtgtgcgtttcctagttgtctggtgctgctatataggggacgtggggtccccacagacctgcaggttccggcccctcttttctcaacccagagcaaattgaaacgtccgggtaacacaccgctgtgccacggttttggcgagggctgacaattgtgagctgtagaagtaccagcctaacaactgttcaagtgactcctgacctagatgggtggtttcatgcacctccagtacaactgtggctcctagcagctgtggcacaggatttccaaagactcatgttacgtgaggaagccaccaagaagagcaaagaaaaggagccagggatggctcttcctcagggacgcttgactttcagggatgtggctatagagttctctttggaggagtggaaatgcctgaaccctgcacagagggctttatacagggctgtgatgttggagaactacaggaacctggagtttgtggatagctctttaaaatccatgatggagttctcatcaaccaggcacagtattacaggagaagtgatccacacagggacgttgcaaagacataaaagtcatcacattggagatttttgcttcccagaaatgaagaaagatattcatcactttgagtttcagtggcaagaagttgaaagaaatggccatgaagcacccatgacaaaaatcaaaaagttgactggtagtacagaccgaagtgatcacaggcatgctggaaacaagcctattaaagatcagcttggattaagctttcattcgcatctgcctgaactccacatgtttcagactaaagggaaaattagtaaccaattggacaagtctatcggtgcttcctcagcttcagaatcccaaagaatttcttgtaggctcaaaactcatatttctaataagtatgggaagaatttcctccattcttcattcacacaaatacaggaaatatgcatgagagaaaaaccttgccaaagtaatgagtgtggcaaagcctttaattatagctcactcttaaggagacaccacataacccattcaagagagagagaatataaatgtgatgtatgtggcaagatctttaatcagaagcaatacattgtatatcatcatagatgtcacactggtgagaaaacttacaagtgtaatgagtgtgggaagaccttcactcagatgtcatcccttgtatgccatcgtagacttcatactggagagaaaccttacaagtgtaatgagtgtggcaagaccttcagtgagaagtcatcccttagatgccatcgtagacttcatactggagagaaaccttacaagtgtaatgagtgtggcaagacttttggtcgaaattcagcccttgtaattcataaggcaattcatactggagagaaaccttacaagtgtaatgagtgtggcaagaccttcagtcagaaatcatcccttcaatgccatcatatacttcacactggagagaaaccttacaaatgtgaagaatgtgacaatgtttacattcgcagatcacaccttgaaagacataggaagattcatactggagagggatcatacaaatgtaaggtttgtgacaaggttttccggagtgattcataccttgcagaacatcagagagttcatactggagagaaaccatacaagtgtaataaatgtggcaggagtttcagtcggaagtcatcccttcaataccatcatacacttcacactggagagaaaccttacacatgtaatgaatgtggcaaggtttttagtcgaagagaaaaccttgcacgtcatcatagacttcatgctggagagaaaccttacaaatgtgaagaatgtgacaaagttttcagtcgcagatcacaccttgaaagacataggagaattcatactggggaaaaaccatacaaatgtaaggtttgtgacaaggctttccggagtgattcatgccttgcaaaccatacgagagttcatactggagagaaaccttacaagtgtaataaatgtgcgaaggtttttaatcaaaaaggaatccttgcacaacatcagagagttcatactggagagaaaccttacaagtgtaatgaatgtggcaaggtttttaatcaaaaagcaagccttgcaaaacatcagagagttcatactgcagagaaaccttacaagtgtaatgagtgtggcaaagcctttactggacagtcaacacttattcaccatcaagcaatccatgggtgtagggaaactttacaaatgtaatgattgtcacaaagtcttcagtaatgctacaaccattgcaaatcattacagaatccatattgaagagagatctacaagtgtaataaatgtggcaaatttttcagacgtcattcataacttgtagttcatcagtgaactcatactggagagaaaccttacaaatatcatgactgtgacaaggtcttcagtcaagcttcatcctatgcaaaacatagaattcatacaggagagaaacctcacaagtgtgatgattgtggcaaagcctttacttcatgttcacacctcattagacatcagagaattcatactggacagatgccttacaaatgtaagggtggcaaggtcttcactctgtggtcattccatgcagaacatcagaaaattcatttttgagataattgttccaaataaaatgaatataaaaaatcataaaactttaa

SEQ ID NO: 203921 - DNA, 2504 bp, Homo sapiens
  Payload ID: 20220
  Gene Name: zinc finger protein 816
  Uniprot ID: Q0VGE8
  ENST ID: ENST00000444460
  CDS Start-End: 172-2127
cacagacccggaagcggatggcgtggactgaaagttgcacggcggcgtgtgcgtttcctagttgtctggtgctgctatataggggacgtggggtccccacagacctgcaggttccggcccctcttttctcaacccagagcaaattgaaacgtccgggatttccaaagactcatgttacgtgaggaagccaccaagaagagcaaagaaaaggagccagggatggctcttcctcagggacgcttgactttcagggatgtggctatagagttctctttggaggagtggaaatgcctgaaccctgcacagagggctttatacagggctgtgatgttggagaactacaggaacctggagtttgtggatagctctttaaaatccatgatggagttctcatcaaccaggcacagtattacaggagaagtgatccacacagggacgttgcaaagacataaaagtcatcacattggagatttttgcttcccagaaatgaagaaagatattcatcactttgagtttcagtggcaagaagttgaaagaaatggccatgaagcacccatgacaaaaatcaaaaagttgactggtagtacagaccgaagtgatcacaggcatgctggaaacaagcctattaaagatcagcttggattaagctttcattcgcatctgcctgaactccacatgtttcagactaaagggaaaattagtaaccaattggacaagtctatcggtgcttcctcagcttcagaatcccaaagaatttcttgtaggctcaaaactcatatttctaataagtatgggaagaatttcctccattcttcattcacacaaatacaggaaatatgcatgagagaaaaaccttgccaaagtaatgagtgtggcaaagcctttaattatagctcactcttaaggagacaccacataacccattcaagagagagagaatataaatgtgatgtatgtggcaagatctttaatcagaagcaatacattgtatatcatcatagatgtcacactggtgagaaaacttacaagtgtaatgagtgtgggaagaccttcactcagatgtcatcccttgtatgccatcgtagacttcatactggagagaaaccttacaagtgtaatgagtgtggcaagaccttcagtgagaagtcatcccttagatgccatcgtagacttcatactggagagaaaccttacaagtgtaatgagtgtggcaagacttttggtcgaaattcagcccttgtaattcataaggcaattcatactggagagaaaccttacaagtgtaatgagtgtggcaagaccttcagtcagaaatcatcccttcaatgccatcatatacttcacactggagagaaaccttacaaatgtgaagaatgtgacaatgtttacattcgcagatcacaccttgaaagacataggaagattcatactggagagggatcatacaaatgtaaggtttgtgacaaggttttccggagtgattcataccttgcagaacatcagagagttcatactggagagaaaccatacaagtgtaataaatgtggcaggagtttcagtcggaagtcatcccttcaataccatcatacacttcacactggagagaaaccttacacatgtaatgaatgtggcaaggtttttagtcgaagagaaaaccttgcacgtcatcatagacttcatgctggagagaaaccttacaaatgtgaagaatgtgacaaagttttcagtcgcagatcacaccttgaaagacataggagaattcatactggggaaaaaccatacaaatgtaaggtttgtgacaaggctttccggagtgattcatgccttgcaaaccatacgagagttcatactggagagaaaccttacaagtgtaataaatgtgcgaaggtttttaatcaaaaaggaatccttgcacaacatcagagagttcatactggagagaaaccttacaagtgtaatgaatgtggcaaggtttttaatcaaaaagcaagccttgcaaaacatcagagagttcatactgcagagaaaccttacaagtgtaatgagtgtggcaaagcctttactggacagtcaacacttattcaccatcaagcaatccatgggtgtagggaaactttacaaatgtaatgattgtcacaaagtcttcagtaatgctacaaccattgcaaatcattacagaatccatattgaagagagatctacaagtgtaataaatgtggcaaatttttcagacgtcattcataacttgtagttcatcagtgaactcatactggagagaaaccttacaaatatcatgactgtgacaaggtcttcagtcaagcttcatcctatgcaaaacatagaattcatacaggagagaaacctcacaagtgtgatgattgtggcaaagcctttacttcatgttcacacctcattagacatcagagaattcatactggacagatgccttacaaatgtaagggtggcaaggtcttcactctgtggtcattccatgcagaacatca

SEQ ID NO: 203922 - DNA, 553 bp, Homo sapiens
  Payload ID: 20220
  Gene Name: zinc finger protein 816
  ENST ID: ENST00000457013
  CDS Start-End: 211-553
aggtcccgcttctgtcctgcgccgattggcacagacccggaagcggatggcgtggactgaaagttgcacggcggcgtgtgcgtttcctagttgtctggtgctgctatataggggacgtggggtccccacagacctgcaggttccggcccctcttttctcaacccagagcaaattgaaacgtccgggtgagagtccgatttccaaagactcatgttacgtgaggaagccaccaagaagagcaaagaaaaggagccagggatggctcttcctcagggacgcttgactttcagggatgtggctatagagttctctttggaggagtggaaatgcctgaaccctgcacagagggctttatacagggctgtgatgttggagaactacaggaacctggagtttgtggatagctctttaaaatccatgatggagttctcatcaaccaggcacagtattacaggagaagtgatccacacagggacgttgcaaagacataaaagtcatcacattggagatttttgcttcccagaaatgaagaaagatattcatcactttgagt

SEQ ID NO: 203923 - DNA, 491 bp, Homo sapiens
  Payload ID: 20220
  Gene Name: zinc finger protein 816
  ENST ID: ENST00000438970
  CDS Start-End: 161-391
aagcggatggcgtggactgaaagttgcacggcggcgtgtgcgtttcctagttgtctggtgctgctatataggggacgtggggtccccacagacctgcaggttccggcccctcttttctcaacccagagcaaattgaaacgtccgggatttccaaagactcatgttacgtgaggaagccaccaagaagagcaaagaaaaggagccagggatggctcttcctcagggacgcttgactttcagggatgtggctatagagttctctttggaggagtggaaatgcctgaaccctgcacagagggctttatacagggctgtgatgttggagaactacaggaacctggagtttgtggaattttgctcttgttgcccaggctggagtgcaatgtggtgatctccgcatgctgcaacctctgcctcctggcttcaagcaattctgctgcctcagcctcctgagtagctgggattacaggcacccaccaccatgactggct

SEQ ID NO: 203924 - DNA, 529 bp, Homo sapiens
  Payload ID: 20220
  Gene Name: zinc finger protein 816
  ENST ID: ENST00000535506
  CDS Start-End: 178-471
gacccggaagcggatggcgtggactgaaagttgcacggcggcgtgtgcgtttcctagttgtctggtgctgctatataggggacgtggggtccccacagacctgcaggttccggcccctcttttctcaacccagagcaaattgaaacgtccgggtgagagtccgatttccaaagactcatgttacgtgaggaagccaccaagaagagcaaagaaaaggagccagggatggctcttcctcagggacgcttgactttcagggatgtggctatagagttctctttggaggagtggaaatgcctgaaccctgcacagagggctttatacagggctgtgatgttggagaactacaggaacctggagtttgtgggtgaggaaaatgtccctccagacatgaggaatctgcacttgtctatcttggctctttctggttttatattctcttttgtgattttgccccatacatgcttttgatgtacatgtcattgttttctgcggtgatgaccctcctatctgtcatggacagcttctt

SEQ ID NO: 203925 - DNA, 562 bp, Homo sapiens
  Payload ID: 20220
  Gene Name: zinc finger protein 816
  ENST ID: ENST00000391786
  CDS Start-End: 141-317
aagttgcacggcggcgtgtgcgtttcctagttgtctggtgctgctatataggggacgtggggtccccacagacctgcaggttccggcccctcttttctcaacccagagcaaattgaaacgtccgggatttccaaagactcatgttacgtgaggaagccaccaagaagagcaaagaaaaggagccagggatggctcttcctcagggatgtggctatagagttctctttggaggagtggaaatgcctgaaccctgcacagagggctttatacagggctgtgatgttggagaactacaggaacctggagtttgtggatagctctttaaaatccatgatggagttctcatcaaccaggcacagtattacaggagaagtgatccacacagggacgttgcaaagacataaaagtcatcacattggagatttttgcttcccagaaatgaagaaagatattcatcactttgagtttcagtggcaagaagttgaaagaaatggccatgaagcacccatgacaaaaatcaaaaagttgactggtagtacagaccgaagtgatcacaggcatg

SEQ ID NO: 203926 - DNA, 582 bp, Homo sapiens
  Payload ID: 20220
  Gene Name: zinc finger protein 816
  ENST ID: ENST00000270457
  CDS Start-End: 161-454
aagcggatggcgtggactgaaagttgcacggcggcgtgtgcgtttcctagttgtctggtgctgctatataggggacgtggggtccccacagacctgcaggttccggcccctcttttctcaacccagagcaaattgaaacgtccgggatttccaaagactcatgttacgtgaggaagccaccaagaagagcaaagaaaaggagccagggatggctcttcctcagggacgcttgactttcagggatgtggctatagagttctctttggaggagtggaaatgcctgaaccctgcacagagggctttatacagggctgtgatgttggagaactacaggaacctggagtttgtgggtgaggaaaatgtccctccagacatgaggaatctgcacttgtctatcttggctctttctggttttatattctcttttgtgattttgccccatacatgcttttgatgtacatgtcattgttttctgcggtgatgaccctcctatctgtcatggacagcttcttagagactcttctttggagtggttttacataaaaacagaaaattcacgaacactttgactaatacaattga

SEQ ID NO: 203927 - DNA, 1874 bp, Homo sapiens
  Payload ID: 20221
  Gene Name: zinc finger protein 821
  ENST ID: ENST00000313565
  CDS Start-End: 424-1536
agctgcgggtgcgcgagccgcgcgctcccgccgcccgcgtcgccatctttttccccctccgtctgtctgtctgctgttggctttgtccgtctgcagcgccgcccctcggctccccgccaccggctcggctcggcccggagccccttccgctcgccggggcccagtcccggagcgccccggcccggctggcttgggctgcggtcccgggtccattgtccggcggtccgtctgtccggaggcggggcccagggacccagagcgcagcgcagcgccgaggcgccggatacagatcacttggattcagtcgagtttgctttgctccgtgggaactgcaccagagctggaggttagcatcttgcaaggaggtagtaacatatccagtcgtgaaactgggaaagaccagagctcttgcatcagggaaacatgtcccgtcggaaacagacaaatccaaataaagttcactgtgacagtgagggtgatgaagaggagacgacacaagatgaagtctcttcccacacatcagaggaagatggaggggtggtcaaagtggagaaagagttagaaaatacagaacagcctgttggtgggaacgaagtggtagagcacgaggtcacagggaatttgaattctgaccccttgcttgaactctgccagtgtcccctctgccagctagactgcgggagccgggagcagttgattgctcacgtgtaccagcacactgcagcagtggtgagcgccaagagctacatgtgtcctgtctgtggccgggcccttagctccccggggtcattgggtcgccacctcttaatccactcggaggaccagcgatctaactgtgctgtgtgtggagcccggttcaccagccatgccacttttaacagtgagaaacttcctgaagtactaaatatggaatccctacccacagtccacaatgagggtccctccagtgctgaggggaaggatattgcctttagtcctccagtgtaccctgctggaattctgcttgtgtgcaacaactgtgctgcctaccgtaaactgctggaagcccagactcccagtgtacgcaagtgggctctacgtcgacagaatgagcctttggaagtacggctgcagcggctggaacgagagcgcacggccaagaagagccggcgggacaatgagacccccgaggagcgggaggtgaggcgcatgagggaccgtgaagccaagcgcttgcagcgcatgcaggagacagacgagcagcgggcacgccggctgcagcgggatcgggaggccatgaggctgaagcgggccaatgaaaccccggaaaagcggcaggcccggctcatccgagagcgagaggccaagcggctcaagaggaggctggagaaaatggacatgatgttgcgagctcagtttggccaggacccttctgccatggcagccttagcagctgaaatgaacttcttccagctgcctgtaagtggggtggagttggacagccagcttctgggcaagatggcctttgaagagcagaacagcagctctctgcactgaaccacaccctcctgcctgccctccttcccacctacctacccacccacccacacccacagccacgaggaccagtgctgctgccacccacgaggccctgtccttgctgccagaggcaggcctgggtttattgcaggtggacctgagcagcccttgcatatgggaacaggatgatggggtcaggagggacctggctcaaggcagctctggacaagggagcaggcagtccagagaactggcctccccagcccactgccacaggctgtgcttctaggactgtggggcccctgtgtggcccatgaagttgtgaagtcaaataaattaattttatctttactgcc

SEQ ID NO: 203928 - DNA, 2000 bp, Homo sapiens
  Payload ID: 20221
  Gene Name: zinc finger protein 821
  Uniprot ID: O75541
  ENST ID: ENST00000425432
  CDS Start-End: 424-1662
agctgcgggtgcgcgagccgcgcgctcccgccgcccgcgtcgccatctttttccccctccgtctgtctgtctgctgttggctttgtccgtctgcagcgccgcccctcggctccccgccaccggctcggctcggcccggagccccttccgctcgccggggcccagtcccggagcgccccggcccggctggcttgggctgcggtcccgggtccattgtccggcggtccgtctgtccggaggcggggcccagggacccagagcgcagcgcagcgccgaggcgccggatacagatcacttggattcagtcgagtttgctttgctccgtgggaactgcaccagagctggaggttagcatcttgcaaggaggtagtaacatatccagtcgtgaaactgggaaagaccagagctcttgcatcagggaaacatgtcccgtcggaaacagacaaatccaaataaagttcactgggatcaagtatttgctgggctagaagagcaagcccgccaggcgatgatgaaaactgattttcctggagaccttggcagtcagcgacaagctatccaacaactaagagatcaggactccagtagcagtgacagtgagggtgatgaagaggagacgacacaagatgaagtctcttcccacacatcagaggaagatggaggggtggtcaaagtggagaaagagttagaaaatacagaacagcctgttggtgggaacgaagtggtagagcacgaggtcacagggaatttgaattctgaccccttgcttgaactctgccagtgtcccctctgccagctagactgcgggagccgggagcagttgattgctcacgtgtaccagcacactgcagcagtggtgagcgccaagagctacatgtgtcctgtctgtggccgggcccttagctccccggggtcattgggtcgccacctcttaatccactcggaggaccagcgatctaactgtgctgtgtgtggagcccggttcaccagccatgccacttttaacagtgagaaacttcctgaagtactaaatatggaatccctacccacagtccacaatgagggtccctccagtgctgaggggaaggatattgcctttagtcctccagtgtaccctgctggaattctgcttgtgtgcaacaactgtgctgcctaccgtaaactgctggaagcccagactcccagtgtacgcaagtgggctctacgtcgacagaatgagcctttggaagtacggctgcagcggctggaacgagagcgcacggccaagaagagccggcgggacaatgagacccccgaggagcgggaggtgaggcgcatgagggaccgtgaagccaagcgcttgcagcgcatgcaggagacagacgagcagcgggcacgccggctgcagcgggatcgggaggccatgaggctgaagcgggccaatgaaaccccggaaaagcggcaggcccggctcatccgagagcgagaggccaagcggctcaagaggaggctggagaaaatggacatgatgttgcgagctcagtttggccaggacccttctgccatggcagccttagcagctgaaatgaacttcttccagctgcctgtaagtggggtggagttggacagccagcttctgggcaagatggcctttgaagagcagaacagcagctctctgcactgaaccacaccctcctgcctgccctccttcccacctacctacccacccacccacacccacagccacgaggaccagtgctgctgccacccacgaggccctgtccttgctgccagaggcaggcctgggtttattgcaggtggacctgagcagcccttgcatatgggaacaggatgatggggtcaggagggacctggctcaaggcagctctggacaagggagcaggcagtccagagaactggcctccccagcccactgccacaggctgtgcttctaggactgtggggcccctgtgtggcccatgaagttgtgaagtcaaataaattaattttatctttactgcc

SEQ ID NO: 203929 - DNA, 1822 bp, Homo sapiens
  Payload ID: 20221
  Gene Name: zinc finger protein 821
  ENST ID: ENST00000446827
  CDS Start-End: 377-1489
ctaaatttagatttcggagattgtgttgtctaagggtttgtctgagccgcctcggaagacctccggctcttgtcaggctcttgtctggtaattcctgggaatttacctgggctcatgcttgaagaagcagagggaccatctcggctgattagacacgccccagacccaaccccaggggtcaggtgaacagccaggcggctaagtgaccagctttcttgtcctctcctttttggcagatacagatcacttggattcagtcgagtttgctttgctccgtgggaactgcaccagagctggaggttagcatcttgcaaggaggtagtaacatatccagtcgtgaaactgggaaagaccagagctcttgcatcagggaaacatgtcccgtcggaaacagacaaatccaaataaagttcactgtgacagtgagggtgatgaagaggagacgacacaagatgaagtctcttcccacacatcagaggaagatggaggggtggtcaaagtggagaaagagttagaaaatacagaacagcctgttggtgggaacgaagtggtagagcacgaggtcacagggaatttgaattctgaccccttgcttgaactctgccagtgtcccctctgccagctagactgcgggagccgggagcagttgattgctcacgtgtaccagcacactgcagcagtggtgagcgccaagagctacatgtgtcctgtctgtggccgggcccttagctccccggggtcattgggtcgccacctcttaatccactcggaggaccagcgatctaactgtgctgtgtgtggagcccggttcaccagccatgccacttttaacagtgagaaacttcctgaagtactaaatatggaatccctacccacagtccacaatgagggtccctccagtgctgaggggaaggatattgcctttagtcctccagtgtaccctgctggaattctgcttgtgtgcaacaactgtgctgcctaccgtaaactgctggaagcccagactcccagtgtacgcaagtgggctctacgtcgacagaatgagcctttggaagtacggctgcagcggctggaacgagagcgcacggccaagaagagccggcgggacaatgagacccccgaggagcgggaggtgaggcgcatgagggaccgtgaagccaagcgcttgcagcgcatgcaggagacagacgagcagcgggcacgccggctgcagcgggatcgggaggccatgaggctgaagcgggccaatgaaaccccggaaaagcggcaggcccggctcatccgagagcgagaggccaagcggctcaagaggaggctggagaaaatggacatgatgttgcgagctcagtttggccaggacccttctgccatggcagccttagcagctgaaatgaacttcttccagctgcctgtaagtggggtggagttggacagccagcttctgggcaagatggcctttgaagagcagaacagcagctctctgcactgaaccacaccctcctgcctgccctccttcccacctacctacccacccacccacacccacagccacgaggaccagtgctgctgccacccacgaggccctgtccttgctgccagaggcaggcctgggtttattgcaggtggacctgagcagcccttgcatatgggaacaggatgatggggtcaggagggacctggctcaaggcagctctggacaagggagcaggcagtccagagaactggcctccccagcccactgccacaggctgtgcttctaggactgtggggcccctgtgtggcccatgaagttgtgaagtcaaataaattaattttatcttta

SEQ ID NO: 203930 - DNA, 1549 bp, Homo sapiens
  Payload ID: 20221
  Gene Name: zinc finger protein 821
  ENST ID: ENST00000562808
  CDS Start-End: 261-449
agatacagatcacttggattcagtcgagtttgctttgctccgtgggaactgcaccagagctggaggtctgaaaaagaactgtgtttgatatgcagatatgctagaagactgcctgaaagctgcttcctttgccacttcctgtggaggcctgtctttgccatttgcggtttctttattcttttggttagcatcttgcaaggaggtagtaacatatccagtcgtgaaactgggaaagaccagagctcttgcatcagggaaacatgtcccgtcggaaacagacaaatccaaataaagttcactgggatcaagtatttgctgggctagaagagcaagcccgccaggcgatgatgaaaactgattttcctggagaccttggcagtcagcgacaagctatccaacaactaagagatcaggactccagtagcagtgagttctgcaccttctggtgacagtgagggtgatgaagaggagacgacacaagatgaagtctcttcccacacatcagaggaagatggaggggtggtcaaagtggagaaagagttagaaaatacagaacagcctgttggtgggaacgaagtggtagagcacgaggtcacagggaatttgaattctgaccccttgcttgaactctgccagtgtcccctctgccagctagactgcgggagccgggagcagttgattgctcacgtgtaccagcacactgcagcagtggtgagcgccaagagctacatgtgtcctgtctgtggccgggcccttagctccccggggtcattgggtcgccacctcttaatccactcggaggaccagcgatctaactgtgctgtgtgtggagcccggttcaccagccatgccacttttaacagtgagaaacttcctgaagtactaaatatggaatccctacccacagtccacaatgagggtccctccagtgctgaggggaaggatattgcctttagtcctccagtgtaccctgctggaattctgcttgtgtgcaacaactgtgctgcctaccgtaaactgctggaagcccagactcccagtgtacgcaagtgggctctacgtcgacagaatgagcctttggaagtacggctgcagcggctggaacgagagcgcacggccaagaagagccggcgggacaatgagacccccgaggagcgggaggtgaggcgcatgagggaccgtgaagccaagcgcttgcagcgcatgcaggagacagacgagcagcgggcacgccggctgcagcgggatcgggaggccatgaggctgaagcgggccaatgaaaccccggaaaagcggcaggcccggctcatccgagagcgagaggccaagcggctcaagaggaggctggagaaaatggacatgatgttgcgagctcagtttggccaggacccttctgccatggcagccttagcagctgaaatgaacttcttccagctgcctgtaagtggggtggagttggacagccagcttctgggcaagatggcctttgaagagcagaacagcagctctctgcactgaaccacaccctcctgcctgccctccttcccac

SEQ ID NO: 203931 - DNA, 1858 bp, Homo sapiens
  Payload ID: 20221
  Gene Name: zinc finger protein 821
  Uniprot ID: O75541
  ENST ID: ENST00000565601
  CDS Start-End: 409-1647
agtccccgcgtctgggtctcgcagaaaagcttctaaatttagatttcggagattgtgttgtctaagggtttgtctgagccgcctcggaagacctccggctcttgtcaggctcttgtctggtaattcctgggaatttacctgggctcatgcttgaagaagcagagggaccatctcggctgattagacacgccccagacccaaccccaggggtcaggtgaacagccaggcggctaagtgaccagctttcttgtcctctcctttttggcagatacagatcacttggattcagtcgagtttgctttgctccgtgggaactgcaccagagctggaggttagcatcttgcaaggaggtagtaacatatccagtcgtgaaactgggaaagaccagagctcttgcatcagggaaacatgtcccgtcggaaacagacaaatccaaataaagttcactgggatcaagtatttgctgggctagaagagcaagcccgccaggcgatgatgaaaactgattttcctggagaccttggcagtcagcgacaagctatccaacaactaagagatcaggactccagtagcagtgacagtgagggtgatgaagaggagacgacacaagatgaagtctcttcccacacatcagaggaagatggaggggtggtcaaagtggagaaagagttagaaaatacagaacagcctgttggtgggaacgaagtggtagagcacgaggtcacagggaatttgaattctgaccccttgcttgaactctgccagtgtcccctctgccagctagactgcgggagccgggagcagttgattgctcacgtgtaccagcacactgcagcagtggtgagcgccaagagctacatgtgtcctgtctgtggccgggcccttagctccccggggtcattgggtcgccacctcttaatccactcggaggaccagcgatctaactgtgctgtgtgtggagcccggttcaccagccatgccacttttaacagtgagaaacttcctgaagtactaaatatggaatccctacccacagtccacaatgagggtccctccagtgctgaggggaaggatattgcctttagtcctccagtgtaccctgctggaattctgcttgtgtgcaacaactgtgctgcctaccgtaaactgctggaagcccagactcccagtgtacgcaagtgggctctacgtcgacagaatgagcctttggaagtacggctgcagcggctggaacgagagcgcacggccaagaagagccggcgggacaatgagacccccgaggagcgggaggtgaggcgcatgagggaccgtgaagccaagcgcttgcagcgcatgcaggagacagacgagcagcgggcacgccggctgcagcgggatcgggaggccatgaggctgaagcgggccaatgaaaccccggaaaagcggcaggcccggctcatccgagagcgagaggccaagcggctcaagaggaggctggagaaaatggacatgatgttgcgagctcagtttggccaggacccttctgccatggcagccttagcagctgaaatgaacttcttccagctgcctgtaagtggggtggagttggacagccagcttctgggcaagatggcctttgaagagcagaacagcagctctctgcactgaaccacaccctcctgcctgccctccttcccacctacctacccacccacccacacccacagccacgaggaccagtgctgctgccacccacgaggccctgtccttgctgccagaggcaggcctgggtttattgcaggtggacctgagcagcccttgcatatgggaacaggatgatggggtcaggagggacctggctcaaggcagctctggacaa

SEQ ID NO: 203932 - DNA, 1748 bp, Homo sapiens
  Payload ID: 20221
  Gene Name: zinc finger protein 821
  ENST ID: ENST00000564134
  CDS Start-End: 438-854
gcacgcgcctcactagctgcgggtgcgcgagccgcgcgctcccgccgcccgcgtcgccatctttttccccctccgtctgtctgtctgctgttggctttgtccgtctgcagcgccgcccctcggctccccgccaccggctcggctcggcccggagccccttccgctcgccggggcccagtcccggagcgccccggcccggctggcttgggctgcggtcccgggtccattgtccggcggtccgtctgtccggaggcggggcccagggacccagagcgcagcgcagcgccgaggcgccggatacagatcacttggattcagtcgagtttgctttgctccgtgggaactgcaccagagctggaggttagcatcttgcaaggaggtagtaacatatccagtcgtgaaactgggaaagaccagagctcttgcatcagggaaacatgtcccgtcggaaacagacaaatccaaataaagttcactgggatcaagtatttgctgggctagaagagcaagcccgccaggcgatgatgaaaactgattttcctggagaccttggcagtcagcgacaagctatccaacaactaagagatcaggactccagtagcagtgacagtgagggtgatgaagaggagacgacacaagatgaagtctcttcccacacatcagaggaagatggaggggtggtcaaagtggagaaagagttagaaaatacagaacagcctgttggtgggaacgaagtggtagagcacgaggcaaggaatttgaattctgaccccttgcttgaactctgccagtgtcccctctgccagctagactgcgggagccgggagcagttgattgctcacgtgtaccagtgagaaacttcctgaagtactaaatatggaatccctacccacagtccacaatgagggtccctccagtgctgaggggaaggatattgcctttagtcctccagtgtaccctgctggaattctgcttgtgtgcaacaactgtgctgcctaccgtaaactgctggaagcccagactcccagtgtacgcaagtgggctctacgtcgacagaatgagcctttggaagtacggctgcagcggctggaacgagagcgcacggccaagaagagccggcgggacaatgagacccccgaggagcgggaggtgaggcgcatgagggaccgtgaagccaagcgcttgcagcgcatgcaggagacagacgagcagcgggcacgccggctgcagcgggatcgggaggccatgaggctgaagcgggccaatgaaaccccggaaaagcggcaggcccggctcatccgagagcgagaggccaagcggctcaagaggaggctggagaaaatggacatgatgttgcgagctcagtttggccaggacccttctgccatggcagccttagcagctgaaatgaacttcttccagctgcctgtaagtggggtggagttggacagccagcttctgggcaagatggcctttgaagagcagaacagcagctctctgcactgaaccacaccctcctgcctgccctccttcccacctacctacccacccacccacacccacagccacgaggaccagtgctgctgccacccacgaggccctgtccttgctgccagaggcaggcctgggtttattgcaggtggacctgagcagcccttgcatatgggaacaggatgatggggtcaggagggacctggctcaaggcagctctggacaagggagcaggcagtccagagaactggcctccc

SEQ ID NO: 203933 - DNA, 1187 bp, Homo sapiens
  Payload ID: 20221
  Gene Name: zinc finger protein 821
  ENST ID: ENST00000563878
  CDS Start-End: 510-698
gcccgcgtcgccatctttttccccctccgtctgtctgtctgctgttggctttgtccgtctgcagcgccgcccctcggctccccgccaccggctcggctcggcccggagccccttccgctcgccggggcccagtcccggagcgccccggcccggctggcttgggctgcggtcccgggtccattgtccggcggtccgtctgtccggaggcggggcccagggacccagagcgcagcgcagcgccgaggcgccggatacagatcacttggattcagtcgagtttgctttgctccgtgggaactgcaccagagctggaggtctgaaaaagaactgtgtttgatatgcagatatgctagaagactgcctgaaagctgcttcctttgccacttcctgtggaggcctgtctttgccatttgcggtttctttattcttttggttagcatcttgcaaggaggtagtaacatatccagtcgtgaaactgggaaagaccagagctcttgcatcagggaaacatgtcccgtcggaaacagacaaatccaaataaagttcactgggatcaagtatttgctgggctagaagagcaagcccgccaggcgatgatgaaaactgattttcctggagaccttggcagtcagcgacaagctatccaacaactaagagatcaggactccagtagcagtgagttctgcaccttctggtgacagtgagggtgatgaagaggagacgacacaagatgaagtctcttcccacacatcagaggaagatggaggggtggtcaaagtggagaaagagttagaaaatacagaacagcctgttggtgggaacgaagtggtagagcacgaggtcacagggaatttgaattctgaccccttgcttgaactctgccagtgtcccctctgccagctagactgcgggagccgggagcagttgattgctcacgtgtaccagcacactgcagcagtggtgagcgccaagagctacatgtgtcctgtctgtggccgggcccttagctccccggggtcattgggtcgccacctcttaatccactcggaggaccagcgatctaactgtgctgtgtgtggagcccggttcaccagccatgccacttttaacagtgagaaacttcctgaagtactaaatatggaatccctacccacagtccacaatgagggtccctccagtgctgaggg

SEQ ID NO: 203934 - DNA, 867 bp, Homo sapiens
  Payload ID: 20221
  Gene Name: zinc finger protein 821
  ENST ID: ENST00000563827
  CDS Start-End: 206-406
gtgttgtctaagggtttgtctgagccgcctcggaagacctccggctcttgtcaggctcttgtctgatacagatcacttggattcagtcgagtttgctttgctccgtgggaactgcaccagagctggaggttagcatcttgcaaggaggtagtaacatatccagtcgtgaaactgggaaagaccagagctcttgcatcagggaaacatgtcccgtcggaaacagacaaatccaaataaagttcactgggatcaagtatttgctgggctagaagagcaagcccgccaggcgatgatgaaaactgattttcctggagaccttggcagtcagcgacaagctatccaacaactaagagatcaggactccagtagcagtgagttctgcaccttctggtcacagggaatttgaattctgaccccttgcttgaactctgccagtgtcccctctgccagctagactgcgggagccgggagcagttgattgctcacgtgtaccagtgagaaacttcctgaagtactaaatatggaatccctacccacagtccacaatgagggtccctccagtgctgaggggaaggatattgcctttagtcctccagtgtaccctgctggaattctgcttgtgtgcaacaactgtgctgcctaccgtaaactgctggaagcccagactcccagtgtacgcaagtgggctctacgtcgacagaatgagcctttggaagtacggctgcagcggctggaacgagagcgcacggccaagaagagccggcgggacaatgagacccccgaggagcgggaggtgaggcgcatgagggaccgtgaagccaagcgcttgcagcgcatgcaggagacagacgagcagcgggcacgccg

SEQ ID NO: 203935 - DNA, 619 bp, Homo sapiens
  Payload ID: 20221
  Gene Name: zinc finger protein 821
  ENST ID: ENST00000565843
  CDS Start-End: 304-619
gggggaggggaggatgggcgtgggcgtgcagaccggggggtatcagtccccgcgtctgggtctcgcagaaaagcttctaaatttagatttcggagattgtgttgtctaagggtttgtctgagccgcctcggaagacctccggctcttgtcaggctcttgtctgatacagatcacttggattcagtcgagtttgctttgctccgtgggaactgcaccagagctggaggttagcatcttgcaaggaggtagtaacatatccagtcgtgaaactgggaaagaccagagctcttgcatcagggaaacatgtcccgtcggaaacagacaaatccaaataaagttcactgggatcaagtatttgctgggctagaagagcaagcccgccaggcgatgatgaaaactgattttcctggagaccttggcagtcagcgacaagctatccaacaactaagagatcaggactccagtagcagtgacagtgagggtgatgaagaggagacgacacaagatgaagtctcttcccacacatcagaggaagatggaggggtggtcaaagtggagaaagagttagaaaatacagaacagcctgttggtgggaacgaagtggtagagcacgaggcaa

SEQ ID NO: 203936 - DNA, 871 bp, Homo sapiens
  Payload ID: 20221
  Gene Name: zinc finger protein 821
  ENST ID: ENST00000565516
  CDS Start-End: 120-871
ggggaaaatgacatgtgctaacaataaccttttttattgcaggttagcatcttgcaaggaggtagtaacatatccagtcgtgaaactgggaaagaccagagctcttgcatcagggaaacatgtcccgtcggaaacagacaaatccaaataaagttcactgtgacagtgagggtgatgaagaggagacgacacaagatgaagtctcttcccacacatcagaggaagatggaggggtggtcaaagtggagaaagagttagaaaatacagaacagcctgttggtgggaacgaagtggtagagcacgaggtcacagggaatttgaattctgaccccttgcttgaactctgccagtgtcccctctgccagctagactgcgggagccgggagcagttgattgctcacgtgtaccagcacactgcagcagtggtgagcgccaagagctacatgtgtcctgtctgtggccgggcccttagctccccggggtcattgggtcgccacctcttaatccactcggaggaccagcgatctaactgtgctgtgtgtggagcccggttcaccagccatgccacttttaacagtgagaaacttcctgaagtactaaatatggaatccctacccacagtccacaatgagggtccctccagtgctgaggggaaggatattgcctttagtcctccagtgtaccctgctggaattctgcttgtgtgcaacaactgtgctgcctaccgtaaactgctggaagcccagactcccagtgtacgcaagtgggctctacgtcgacagaatgagcctttggaagtacggctgcagcggctggaacgagagcgcacggccaagaagagccggcgggacaatgagacccccgaggagcg

SEQ ID NO: 203937 - DNA, 1719 bp, Homo sapiens
  Payload ID: 20221
  Gene Name: zinc finger protein 821
  ENST ID: ENST00000568666
  CDS Start-End: 510-1719
gcccgcgtcgccatctttttccccctccgtctgtctgtctgctgttggctttgtccgtctgcagcgccgcccctcggctccccgccaccggctcggctcggcccggagccccttccgctcgccggggcccagtcccggagcgccccggcccggctggcttgggctgcggtcccgggtccattgtccggcggtccgtctgtccggaggcggggcccagggacccagagcgcagcgcagcgccgaggcgccggatacagatcacttggattcagtcgagtttgctttgctccgtgggaactgcaccagagctggaggtctgaaaaagaactgtgtttgatatgcagatatgctagaagactgcctgaaagctgcttcctttgccacttcctgtggaggcctgtctttgccatttgcggtttctttattcttttggttagcatcttgcaaggaggtagtaacatatccagtcgtgaaactgggaaagaccagagctcttgcatcagggaaacatgtcccgtcggaaacagacaaatccaaataaagttcactgggatcaagtatttgctgggctagaagagcaagcccgccaggcgatgatgaaaactgattttcctggagaccttggcagtcagcgacaagctatccaacaactaagagatcaggactccagtagcagtgacagtgagggtgatgaagaggagacgacacaagatgaagtctcttcccacacatcagaggaagatggaggggtggtcaaagtggagaaagagttagaaaatacagaacagcctgttggtgggaacgaagtggtagagcacgaggtcacagggaatttgaattctgaccccttgcttgaactctgccagtgtcccctctgccagctagactgcgggagccgggagcagttgattgctcacgtgtaccagcacactgcagcagtggtgagcgccaagagctacatgtgtcctgtctgtggccgggcccttagctccccggggtcattgggtcgccacctcttaatccactcggaggaccagcgatctaactgtgctgtgtgtggagcccggttcaccagccatgccacttttaacagtgagaaacttcctgaagtactaaatatggaatccctacccacagtccacaatgagggtccctccagtgctgaggggaaggatattgcctttagtcctccagtgtaccctgctggaattctgcttgtgtgcaacaactgtgctgcctaccgtaaactgctggaagcccagactcccagtgtacgcaagtgggctctacgtcgacagaatgagcctttggaagtacggctgcagcggctggaacgagagcgcacggccaagaagagccggcgggacaatgagacccccgaggagcgggaggtgaggcgcatgagggaccgtgaagccaagcgcttgcagcgcatgcaggagacagacgagcagcgggcacgccggctgcagcgggatcgggaggccatgaggctgaagcgggccaatgaaaccccggaaaagcggcaggcccggctcatccgagagcgagaggccaagcggctcaagaggaggctggagaaaatggacatgatgttgcgagctcagtttggccaggacccttctgccatggcagccttagcagctgaaatgaacttcttccagctgcctgtaagtggggtggagttggacagccagcttctgggcaagatggcctttg

SEQ ID NO: 203938 - DNA, 672 bp, Homo sapiens
  Payload ID: 20221
  Gene Name: zinc finger protein 821
  ENST ID: ENST00000568322
  CDS Start-End: 357-672
agtgccacaagttcccctgcccctgggtctgcagccaatgttattttatcagttgagaatcatgtcagaaaattaaatactcaaaagaaatctcaagatttcccagctctgaggttctgacagctgaacttggcccctcccaccaaggcccgtggtcacattcaaagcctcgggagccgaagccaccgcgaagcgtgggggaatgaggcgaagaggatacagatcacttggattcagtcgagtttgctttgctccgtgggaactgcaccagagctggaggttagcatcttgcaaggaggtagtaacatatccagtcgtgaaactgggaaagaccagagctcttgcatcagggaaacatgtcccgtcggaaacagacaaatccaaataaagttcactgggatcaagtatttgctgggctagaagagcaagcccgccaggcgatgatgaaaactgattttcctggagaccttggcagtcagcgacaagctatccaacaactaagagatcaggactccagtagcagtgacagtgagggtgatgaagaggagacgacacaagatgaagtctcttcccacacatcagaggaagatggaggggtggtcaaagtggagaaagagttagaaaatacagaacagcctgttggtgggaacgaagtggtagagcacgaggcaa

SEQ ID NO: 203939 - DNA, 906 bp, Homo sapiens
  Payload ID: 20221
  Gene Name: zinc finger protein 821
  ENST ID: ENST00000562985
  CDS Start-End: 307-495
ctcgggagccgaagccaccgcgaagcgtgggggaatgaggcgaagaggatacagatcacttggattcagtcgagtttgctttgctccgtgggaactgcaccagagctggaggtctgaaaaagaactgtgtttgatatgcagatatgctagaagactgcctgaaagctgcttcctttgccacttcctgtggaggcctgtctttgccatttgcggtttctttattcttttggttagcatcttgcaaggaggtagtaacatatccagtcgtgaaactgggaaagaccagagctcttgcatcagggaaacatgtcccgtcggaaacagacaaatccaaataaagttcactgggatcaagtatttgctgggctagaagagcaagcccgccaggcgatgatgaaaactgattttcctggagaccttggcagtcagcgacaagctatccaacaactaagagatcaggactccagtagcagtgagttctgcaccttctggtgacagtgagggtgatgaagaggagacgacacaagatgaagtctcttcccacacatcagaggaagatggaggggtggtcaaagtggagaaagagttagaaaatacagaacagcctgttggtgggaacgaagtggtagagcacgaggtcacagggaatttgaattctgaccccttgcttgaactctgccagtgtcccctctgccagctagactgcgggagccgggagcagttgattgctcacgtgtaccagcacactgcagcagtggtgagcgccaagagctacatgtgtcctgtctgtggccgggcccttagctccccggggtcattgggtcgccacctcttaatccactcggaggaccagcgatctaactgtgctgtgtgtggagcccggttcaccagccatgccacttttaa

SEQ ID NO: 203940 - DNA, 1954 bp, Homo sapiens
  Payload ID: 20221
  Gene Name: zinc finger protein 821
  ENST ID: ENST00000568961
  CDS Start-End: 524-712
cgcgcgctcccgccgcccgcgtcgccatctttttccccctccgtctgtctgtctgctgttggctttgtccgtctgcagcgccgcccctcggctccccgccaccggctcggctcggcccggagccccttccgctcgccggggcccagtcccggagcgccccggcccggctggcttgggctgcggtcccgggtccattgtccggcggtccgtctgtccggaggcggggcccagggacccagagcgcagcgcagcgccgaggcgccggatacagatcacttggattcagtcgagtttgctttgctccgtgggaactgcaccagagctggaggtctgaaaaagaactgtgtttgatatgcagatatgctagaagactgcctgaaagctgcttcctttgccacttcctgtggaggcctgtctttgccatttgcggtttctttattcttttggttagcatcttgcaaggaggtagtaacatatccagtcgtgaaactgggaaagaccagagctcttgcatcagggaaacatgtcccgtcggaaacagacaaatccaaataaagttcactgggatcaagtatttgctgggctagaagagcaagcccgccaggcgatgatgaaaactgattttcctggagaccttggcagtcagcgacaagctatccaacaactaagagatcaggactccagtagcagtcacagggaatttgaattctgaccccttgcttgaactctgccagtgtcccctctgccagctagactgcgggagccgggagcagttgattgctcacgtgtaccagcacactgcagcagtggtgagcgccaagagctacatgtgtcctgtctgtggccgggcccttagctccccggggtcattgggtcgccacctcttaatccactcggaggaccagcgatctaactgtgctgtgtgtggagcccggttcaccagccatgccacttttaacagtgagaaacttcctgaagtactaaatatggaatccctacccacagtccacaatgagggtccctccagtgctgaggggaaggatattgcctttagtcctccagtgtaccctgctggaattctgcttgtgtgcaacaactgtgctgcctaccgtaaactgctggaagcccagactcccagtgtacgcaagtgggctctacgtcgacagaatgagcctttggaagtacggctgcagcggctggaacgagagcgcacggccaagaagagccggcgggacaatgagacccccgaggagcgggaggtgaggcgcatgagggaccgtgaagccaagcgcttgcagcgcatgcaggagacagacgagcagcgggcacgccggctgcagcgggatcgggaggccatgaggctgaagcgggccaatgaaaccccggaaaagcggcaggcccggctcatccgagagcgagaggccaagcggctcaagaggaggctggagaaaatggacatgatgttgcgagctcagtttggccaggacccttctgccatggcagccttagcagctgaaatgaacttcttccagctgcctgtaagtggggtggagttggacagccagcttctgggcaagatggcctttgaagagcagaacagcagctctctgcactgaaccacaccctcctgcctgccctccttcccacctacctacccacccacccacacccacagccacgaggaccagtgctgctgccacccacgaggccctgtccttgctgccagaggcaggcctgggtttattgcaggtggacctgagcagcccttgcatatgggaacaggatgatggggtcaggagggacctggctcaaggcagctctggacaagggagcaggcagtccagagaactggcctccccagcccactgccacaggctgtgcttctaggactgtggggcccctgtgtggcccatgaagttgtgaagtcaaataaattaattttatctttactgcc

SEQ ID NO: 203941 - DNA, 1722 bp, Homo sapiens
  Payload ID: 20221
  Gene Name: zinc finger protein 821
  ENST ID: ENST00000566987
  CDS Start-End: 132-320
gaaaaatccgctggtgtagactgcagggcttgacttccagtgggcatgtgacatgttagcatcttgcaaggaggtagtaacatatccagtcgtgaaactgggaaagaccagagctcttgcatcagggaaacatgtcccgtcggaaacagacaaatccaaataaagttcactgggatcaagtatttgctgggctagaagagcaagcccgccaggcgatgatgaaaactgattttcctggagaccttggcagtcagcgacaagctatccaacaactaagagatcaggactccagtagcagtgagttctgcaccttctggtgacagtgagggtgatgaagaggagacgacacaagatgaagtctcttcccacacatcagaggaagatggaggggtggtcaaagtggagaaagagttagaaaatacagaacagcctgttggtgggaacgaagtggtagagcacgaggtcacagggaatttgaattctgaccccttgcttgaactctgccagtgtcccctctgccagctagactgcgggagccgggagcagttgattgctcacgtgtaccagcacactgcagcagtggtgagcgccaagagctacatgtgtcctgtctgtggccgggcccttagctccccggggtcattgggtcgccacctcttaatccactcggaggaccagcgatctaactgtgctgtgtgtggagcccggttcaccagccatgccacttttaacagtgagaaacttcctgaagtactaaatatggaatccctacccacagtccacaatgagggtccctccagtgctgaggggaaggatattgcctttagtcctccagtgtaccctgctggaattctgcttgtgtgcaacaactgtgctgcctaccgtaaactgctggaagcccagactcccagtgtacgcaagtgggctctacgtcgacagaatgagcctttggaagtacggctgcagcggctggaacgagagcgcacggccaagaagagccggcgggacaatgagacccccgaggagcgggaggtgaggcgcatgagggaccgtgaagccaagcgcttgcagcgcatgcaggagacagacgagcagcgggcacgccggctgcagcgggatcgggaggccatgaggctgaagcgggccaatgaaaccccggaaaagcggcaggcccggctcatccgagagcgagaggccaagcggctcaagaggaggctggagaaaatggacatgatgttgcgagctcagtttggccaggacccttctgccatggcagccttagcagctgaaatgaacttcttccagctgcctgtaagtggggtggagttggacagccagcttctgggcaagatggcctttgaagagcagaacagcagctctctgcactgaaccacaccctcctgcctgccctccttcccacctacctacccacccacccacacccacagccacgaggaccagtgctgctgccacccacgaggccctgtccttgctgccagaggcaggcctgggtttattgcaggtggacctgagcagcccttgcatatgggaacaggatgatggggtcaggagggacctggctcaaggcagctctggacaagggagcaggcagtccagagaactggcctccccagcccactgccacaggctgtgcttctaggactgtggggcccctgtgtggcccatgaagttgtgaagtcaaataaattaattttatcttta

SEQ ID NO: 203942 - DNA, 1032 bp, Homo sapiens
  Payload ID: 20221
  Gene Name: zinc finger protein 821
  ENST ID: ENST00000562797
  CDS Start-End: 395-1032
gccgcccgcgtcgccatctttttccccctccgtctgtctgtctgctgttggctttgtccgtctgcagcgccgcccctcggctccccgccaccggctcggctcggcccggagccccttccgctcgccggggcccagtcccggagcgccccggcccggctggcttgggctgcggtcccgggtccattgtccggcggtccgtctgtccggaggcggggcccagggacccagagcgcagcgcagcgccgaggcgccggatacagatcacttggattcagtcgagtttgctttgctccgtgggaactgcaccagagctggaggttagcatcttgcaaggaggtagtaacatatccagtcgtgaaactgggaaagaccagagctcttgcatcagggaaacatgtcccgtcggaaacagacaaatccaaataaagttcactgtgacagtgagggtgatgaagaggagacgacacaagatgaagtctcttcccacacatcagaggaagatggaggggtggtcaaagtggagaaagagttagaaaatacagaacagcctgttggtgggaacgaagtggtagagcacgaggtcacagggaatttgaattctgaccccttgcttgaactctgccagtgtcccctctgccagctagactgcgggagccgggagcagttgattgctcacgtgtaccagcacactgcagcagtggtgagcgccaagagctacatgtgtcctgtctgtggccgggcccttagctccccggggtcattgggtcgccacctcttaatccactcggaggaccagcgatctaactgtgctgtgtgtggagcccggttcaccagccatgccacttttaacagtgagaaacttcctgaagtactaaatatggaatccctacccacagtccacaatgagggtccctccagtgctgaggggaaggatattgcctttagtcctccagtgtaccctgctggaattctgcttgtgtgcaacaactgtgctgcctaccgtaaactgctggaagcccagactcccagtgt

SEQ ID NO: 203943 - DNA, 1833 bp, Homo sapiens
  Payload ID: 20221
  Gene Name: zinc finger protein 821
  ENST ID: ENST00000611294
  CDS Start-End: 424-843
agctgcgggtgcgcgagccgcgcgctcccgccgcccgcgtcgccatctttttccccctccgtctgtctgtctgctgttggctttgtccgtctgcagcgccgcccctcggctccccgccaccggctcggctcggcccggagccccttccgctcgccggggcccagtcccggagcgccccggcccggctggcttgggctgcggtcccgggtccattgtccggcggtccgtctgtccggaggcggggcccagggacccagagcgcagcgcagcgccgaggcgccggatacagatcacttggattcagtcgagtttgctttgctccgtgggaactgcaccagagctggaggttagcatcttgcaaggaggtagtaacatatccagtcgtgaaactgggaaagaccagagctcttgcatcagggaaacatgtcccgtcggaaacagacaaatccaaataaagttcactgggatcaagtatttgctgggctagaagagcaagcccgccaggcgatgatgaaaactgattttcctggagaccttggcagtcagcgacaagctatccaacaactaagagatcaggactccagtagcagtgacagtgagggtgatgaagaggagacgacacaagatgaagtctcttcccacacatcagaggaagatggaggggtggtcaaagtggagaaagagttagaaaatacagaacagcctgttggtgggaacgaagtggtagagcacgaggtcacagggaatttgaattctgaccccttgcttgaactctgccagtgtcccctctgccagctagactgcgggagccgggagcagttgattgctcacgtgtaccagtgagaaacttcctgaagtactaaatatggaatccctacccacagtccacaatgagggtccctccagtgctgaggggaaggatattgcctttagtcctccagtgtaccctgctggaattctgcttgtgtgcaacaactgtgctgcctaccgtaaactgctggaagcccagactcccagtgtacgcaagtgggctctacgtcgacagaatgagcctttggaagtacggctgcagcggctggaacgagagcgcacggccaagaagagccggcgggacaatgagacccccgaggagcgggaggtgaggcgcatgagggaccgtgaagccaagcgcttgcagcgcatgcaggagacagacgagcagcgggcacgccggctgcagcgggatcgggaggccatgaggctgaagcgggccaatgaaaccccggaaaagcggcaggcccggctcatccgagagcgagaggccaagcggctcaagaggaggctggagaaaatggacatgatgttgcgagctcagtttggccaggacccttctgccatggcagccttagcagctgaaatgaacttcttccagctgcctgtaagtggggtggagttggacagccagcttctgggcaagatggcctttgaagagcagaacagcagctctctgcactgaaccacaccctcctgcctgccctccttcccacctacctacccacccacccacacccacagccacgaggaccagtgctgctgccacccacgaggccctgtccttgctgccagaggcaggcctgggtttattgcaggtggacctgagcagcccttgcatatgggaacaggatgatggggtcaggagggacctggctcaaggcagctctggacaagggagcaggcagtccagagaactggcctccccagcccactgccacaggctgtgcttctaggactgtggggcccctgtgtggcccatgaagttgtgaagtcaaataaattaattttatctttactgcc

SEQ ID NO: 203944 - DNA, 2423 bp, Homo sapiens
  Payload ID: 20222
  Gene Name: zinc finger protein 823
  Uniprot ID: P16415
  ENST ID: ENST00000341191
  CDS Start-End: 155-1987
aaagagcccgcggagtcttctccacgcccctgcgctctgagtcctggctctggcgctgagagagagacgccctggaaggtctgtatcagcgtctgtcgcgctgggacccacactggcttttaaggaggacacccggacacctggaagctgggaaatggactcagtggcctttgaagatgtggctgtgaacttcacacaagaggagtgggctttgctgggtccatcacagaagagtctctacagaaatgtcatgcaggaaaccattaggaacctggactgtatagaaatgaaatgggaggaccagaacattggagatcagtgccaaaatgccaagagaaatctaagaagtcatacatgtgaaattaaagatgacagtcaatgtggagaaacttttggccagattccagatagtattgtgaacaagaacactcctcgagtaaatccatgtgacagtggtgagtgtggagaagtcgtcttgggtcattcgtctcttaattgcaacatcagagttgacactggacacaaatcatgtgagcatcaggaatatggagagaagccatatacacataaacaacgtgggaaagccatcagtcatcagcactccttccagacacatgaaaggccccccaccggaaagaaacccttcgattgtaaagaatgtgcaaaaacctttagttctcttggaaacctccgaagacacatggcggcacaccatggagatggaccttataaatgtaagttgtgtgggaaagcctttgtttggcccagtttatttcatttgcacgaaagaacacacactggagagaaaccgtatgaatgtaagcagtgttctaaagcctttcctttttacagttcctatctaagacatgaaagaatccacacgggagagaaagcgtatgaatgtaagcagtgttccaaagcctttcctgattacagtacctatctaagacatgagagaactcacaccggagagaaaccctataaatgtacacaatgtgggaaagccttcagctgttactattacactcgactacatgaaaggactcacacgggagaacaaccctatgcatgtaagcaatgtgggaaaacgttttatcatcacacaagctttcgaagacacatgataaggcacactggagacggaccacataaatgtaagatatgtgggaaaggctttgattgtcctagttcagttcgaaatcatgaaactactcacactggagagaaaccctatgaatgtaagcagtgtgggaaagtgttatctcatagctcgagctttcgaagtcacatgataacacacacaggagatggaccccagaaatgcaagatatgtgggaaagcctttggttgtcccagtttatttcaaagacatgaaaggactcacactggagagaaaccctatcaatgtaaacaatgtggtaaagccttcagtcttgccggttcccttcgaagacatgaagcaactcacactggagtgaaaccctataaatgtcagtgtgggaaagcctttagtgatctctcttcctttcaaaatcatgagacaactcacactggagagaagccatatgagtgtaaggaatgtgggaaagcattcagttgtttcaaatacctttctcaacataaaaggacccacacagtagaaaaaccttatgagtgtaaaacatgtagaaaagccttcagtcatttcagtaacttaaaagtccatgaaaggattcactctggagagaagccatatgaatgtaaggaatgtggaaaagcattctcttggctcacttgccttctacgacatgaaagaattcacactggagagaaaccctatgaatgtctacaatgtggtaaagccttcactcgttcccgtttccttcgaggacatgaaaaaactcacactggagagaagctgtatgaatgtaaggaatgtgggaaagcattgagttctctccgttccttgcatagacataaaaggactcactggaaagatactctctaaatgtatggaatgtgggaaaacattcagtactttaatttcagaaacttgaaagaactcactttggagatagaccctatgaatgtaaacatgggataaagccttaagtagtttcaatttttttaaatacagttatcccccaatatattgcaggggattggttccagcaccctctaaatccacagatgccaagtcctttgttatatggcatatttgcatgtaacctatgcatatcttccagtatactgtgtaaatcatctctagatgacttttaatacctcatgcattgtaaaagctatgtaaatagttgtttgattgtattgtttagagaatcatgacaagaaaaatagtctctacatgttcgatgcagacacaaccattgcaggcccacctacgtggtatatgtcacccagaacattaaaatttgttttaacattca

SEQ ID NO: 203945 - DNA, 550 bp, Homo sapiens
  Payload ID: 20222
  Gene Name: zinc finger protein 823
  ENST ID: ENST00000440527
  CDS Start-End: 191-394
aatcaggcacgctgcagggaggagggtgcgacgttcaaagagcccgcggagtcttctccacgcccctgcgctctgagtcctggctctggcgctgagagagagacgccctggaaggtctgtatcagcgtctgtcgcgctgggacccacactggcttttaaggaggacacccggacacctggaagctgggaaatggactcagtggcctttgaagatgtggctgtgaacttcacacaagaggagtgggctttgctgggtccatcacagaagagtctctacagaaatgtcatgcaggaaaccattaggaacctggactgtatagaagtcatacatgtgaaattaaagatgacagtcaatgtggagaaacttttggccagattccagatagtattgtgaacaagaacactcctcgagtaaatccatgtgacagtggtgagtgtggagaagtcgtcttgggtcattcgtctcttaattgcaacatcagagttgacactggacacaaatcatgtgagcatcaggaatatggagagaagccatatacacataaacaac

SEQ ID NO: 203946 - DNA, 1540 bp, Homo sapiens
  Payload ID: 20222
  Gene Name: zinc finger protein 823
  ENST ID: ENST00000431998
  CDS Start-End: 132-1540
cctgcgctctgagtcctggctctggcgctgagagagagacgccctggaaggtctgtatcagcgtctgtcgcgctgggacccacactggcttttaaggaggacacccggacacctggaagctgggaaatgaaatgaaatgggaggaccagaacattggagatcagtgccaaaatgccaagagaaatctaagaagtcatacatgtgaaattaaagatgacagtcaatgtggagaaacttttggccagattccagatagtattgtgaacaagaacactcctcgagtaaatccatgtgacagtggtgagtgtggagaagtcgtcttgggtcattcgtctcttaattgcaacatcagagttgacactggacacaaatcatgtgagcatcaggaatatggagagaagccatatacacataaacaacgtgggaaagccatcagtcatcagcactccttccagacacatgaaaggccccccaccggaaagaaacccttcgattgtaaagaatgtgcaaaaacctttagttctcttggaaacctccgaagacacatggcggcacaccatggagatggaccttataaatgtaagttgtgtgggaaagcctttgtttggcccagtttatttcatttgcacgaaagaacacacactggagagaaaccgtatgaatgtaagcagtgttctaaagcctttcctttttacagttcctatctaagacatgaaagaatccacacgggagagaaagcgtatgaatgtaagcagtgttccaaagcctttcctgattacagtacctatctaagacatgagagaactcacaccggagagaaaccctataaatgtacacaatgtgggaaagccttcagctgttactattacactcgactacatgaaaggactcacacgggagaacaaccctatgcatgtaagcaatgtgggaaaacgttttatcatcacacaagctttcgaagacacatgataaggcacactggagacggaccacataaatgtaagatatgtgggaaaggctttgattgtcctagttcagttcgaaatcatgaaactactcacactggagagaaaccctatgaatgtaagcagtgtgggaaagtgttatctcatagctcgagctttcgaagtcacatgataacacacacaggagatggaccccagaaatgcaagatatgtgggaaagcctttggttgtcccagtttatttcaaagacatgaaaggactcacactggagagaaaccctatcaatgtaaacaatgtggtaaagccttcagtcttgccggttcccttcgaagacatgaagcaactcacactggagtgaaaccctataaatgtcagtgtgggaaagcctttagtgatctctcttcctttcaaaatcatgagacaactcacactggagagaagccatatgagtgtaaggaatgtgggaaagcattcagttgtttcaaatacctttctcaacataaaaggacccacacagtagaaaaaccttatgagtgtaaaacatgtagaaaagccttcagtcatttcagtaactt

SEQ ID NO: 203947 - DNA, 698 bp, Homo sapiens
  Payload ID: 20222
  Gene Name: zinc finger protein 823
  ENST ID: ENST00000586121
  CDS Start-End: 422-698
tctgtcgcgctgggacccacactggcttttaaggaggacacccggacacctggaagctgggaaatgaagtcatacatgtgaaattaaagatgacagtcaatgtggagaaacttttggccagattccagatagtattgtgaacaagaacactcctcgagtaaatccatgtgacagtggtgagtgtggagaagtcgtcttgggtcattcgtctcttaattgcaacatcagagttgacactggacacaaatcatgtgagcatcaggaatatggagagaagccatatacacataaacaacgtgggaaagccatcagtcatcagcactccttccagacacatgaaaggccccccaccggaaagaaacccttcgattgtaaagaatgtgcaaaaacctttagttctcttggaaacctccgaagacacatggcggcacaccatggagatggaccttataaatgtaagttgtgtgggaaagcctttgtttggcccagtttatttcatttgcacgaaagaacacacactggagagaaaccgtatgaatgtaagcagtgttctaaagcctttcctttttacagttcctatctaagacatgaaagaatccacacgggagagaaagcgtatgaatgtaagcagtgttccaaagcctttcctgattacagtacctatctaagacatgagagaactcacaccggagagaaac

SEQ ID NO: 203948 - DNA, 4197 bp, Homo sapiens
  Payload ID: 20223
  Gene Name: zinc finger protein 827
  Uniprot ID: Q17R98
  ENST ID: ENST00000379448
  CDS Start-End: 65-3298
gcccccacgggggtttatttgatctcacattaaccaaggaggagaatgtgagaaaagggggaaaatgcccaggaggaagcaggagcagcccaagcgccttccctcacatgttagtaggcaggaagaggcggagggagagctcagtgaaggagaacactggtatggaaactcttcagagactccgtcagaagcatcctatggggaagtccaggagaactataagttgtctctggaggaccggatccaggagcagtccacgtccccggacacctccttgggaagcacgactcccagcagccacacgttggagctggtggcactggacagtgaggtcctgcgagactcactgcagtgtcaagatcacctttccccgggagtgtcttctttgtgtgacgatgacccaggctccaacaagcccctgagcagcaatttgaggcggctgctggaggctggttccctcaaactcgatgctgcagccacggctaatggcagagtggagtcccccgtaaacgttggctcgaacctctccttttccccgccttcccaccacgcccagcagctcagtgttctggccaggaagttggccgagaagcaggaacagaatgaccaatacactccaagtaaccgttttatatggaatcaaggtaagtggttgccaaactcaaccaccacctgcagcttgtctccggattcagccatcctaaaactgaaagctgcagccaatgccgttctgcaggacaaatctctcaccaggactgaggagaccatgcgatttgagtccttttcctccccttttagctcccagtctgccagttctaccttggccgctttgtccaagaaggtcagtgaaagaagtttgactcctggtcaggagcaccctccaccggccagctccttcctttccctggcttctatgacctcctcagcggcccttctgaaggaggtggccgcaagggctgcgggcagtcttctggctgagaaatcatcgctgctgcctgaggaccctctaccgcccccgccttcagagaagaaaccagaaaaagtcactccgccacctccaccgccacctccaccacctccaccaccaccaccacaatccctggaattattattactcccagttcctaagggaagagtttctaaaccctccaattcagcctcagaagaggaaagtggaaagcctttccagtgtccaatatgtggtttggttattaaaaggaagagttactggaagcggcacatggtgattcacacaggtttaaaaagtcatcagtgtccgctctgtccattccggtgtgctcgcaaggacaatctcaaatcccacatgaaggttcatcagcaccaggatcggggagagacctttcagtgccagctgtgcccttttacttcctcacgccacttcagcctgaaactccacatgcgttgccatcagcacttcctgaggacagaagccaaggtgaaggaggagatcccagacccagatgtcaagggatctccccacctcagtgacagtgcctgcctggggcagcaaagggaaggaggagggacagagctagtggggaccatgatgacgtctaacactccagagaggactagccagggaggggctggcgtctcgcctttgctggtgaaggaggaacccaaggaagataacggcctgcccacctcctttactttgaatgctgccgacaggcccgccaaccacacaaagctgaaagacccctccgagtatgtggccaacagtgcgtcagcattgttcagccaggacatctctgttaagatggcgtctgattttctcatgaagctgtcagctgcaaatcagaaggagcccatgaatcttaattttaaagtgaaagaggagcctaaggaaggggagtccctaagcacgactttgcctcggtccagctatgtgttcagcccggaatctgaagtgtcagccccaggcgtctctgaggacgcactaaagccccaggaagggaagggaagtgtgctaaggcgggatgtgtcagtcaaagcagcctctgaacttctcatgaaactctcagcggaaagctacaaggaaacacagatggtgaagattaaagaggaacccatggaggttgacatccaggactcccatgtctcgatatcacccagccggaatgttggctacagcactttaatcgggcgagagaaaaccgaacccttacagaagatgccagagggcagagtacccccagagagaaacctcttcagtcaggatatctctgtgaaaatggcttccgagctcctctttcaactgtcagaaaaagtgagcaaagagcacaatcatacaaaagaaaacaccatccggaccacgaccagccctttcttttcagaagacacatttagacaatcaccattcacctccaattcaaaagaactgctgcccagtgactccgtgctgcacggaagaatatcagctccagaaacagaaaagatagtcctagaggcaggaaatggattaccatcctggaaattcaatgaccagctttttccctgtgacgtgtgtgggaaagtgtttggccgacagcagacattgtcccgacacctctcgctgcacacagaggaaagaaaatacaaatgccacttgtgcccctatgctgctaagtgccgtgcaaatctgaaccagcacttgaccgtccattccgtgaagctggtgagtacagacaccgaggacattgtcagcgccgtcacctctgaaggcagtgatgggaagaaacatccttattattacagttgtcacgtgtgtggatttgagaccgagctcaatgtccagtttgtcagccacatgtcactccacgtggacaaggagcagtggatgttttcgatctgctgcactgcctgcgacttcgtcaccatggaggaagcagagataaagactcacattggcaccaagcacacaggggaagacaggaagacccccagcgaatcaaatagcccctcttcatcctccctctcagctctgagtgattcagccaacagcaaagatgattcagatggctcccagaaaaacaagggcgggaacaatctgctggtcatctctgtcatgcctgggagccagccctcactgaacagtgaggaaaagccagagaaagggttcgaatgtgttttttgcaactttgtctgcaagacgaagaacatgtttgagcgtcatctgcagatacacctcatcacccggatgtttgagtgtgatgtgtgccacaagttcatgaagacccccgaacagctgctggagcataagaaatgccacactgtccccaccggtgggctcaagtaaggaaactcaggacagtggtgagtttcagactcctctaggtgcccattctgcatttattccaccaaccgccccgctgccatggagtgccacctcaagacccactacaagatggagtacaagtgccggatctgccagacggtgaaggccaaccagctggagctggagacgcacacccgggagcaccgcctgggcaaccactacaagtgcgaccagtgcggctacctgtccaagaccgccaacaagctcatcgagcacgtgcgcgtccacaccggggagcggcccttccactgtgaccagtgcagctacagctgcaagcgcaaggacaatctcaacctgcacaagaagctgaagcacgccccacgccagaccttcagctgcgaagagtgcctgttcaagaccacacaccctttcgtcttcagccgccacgtcaagaagcaccagagtggggactgccccgaggaggacaagaagggcctgtgtccagcccccaaggaaccggccggcccgggggccccgctcctggtggtcgggagctcccggaatctcctgtctcccctgtcagttatgtctgcctcccaggctctgcagaccgtggccctgtcggcagcccacggcagcagctcagagcccaacctggcactcaaggctttggccttcaacggctcccctttgcgctttgacaagtaccggaactcagattttgcccatctcattcccttgacaatgttataccccaagaaccacttggatctcacattccaccctccccgacctcagactgcgcctcccagcatcccctcacccaaacactccttcctggcctatctcggactgagagaaagagcagagactgtctgagggcagccatgttctgtaccaaaaacagagagacaaaagac

SEQ ID NO: 203949 - DNA, 7463 bp, Homo sapiens
  Payload ID: 20223
  Gene Name: zinc finger protein 827
  Uniprot ID: Q17R98
  ENST ID: ENST00000508784
  CDS Start-End: 229-3474
aaaaaaaaaaaaaggaaaaaagaaaggaaagaaaagaagaaaacccctcttctggctccaggaaacaagcttcaacccattgcacacaccggagaaggggtttccccctgcccgcccgcccgccccccaactacctccccgctcctgccagtgtctgcctctctgcccccacgggggtttatttgatctcacattaaccaaggaggagaatgtgagaaaagggggaaaatgcccaggaggaagcaggagcagcccaagcgccttccctcacatgttagtaggcaggaagaggcggagggagagctcagtgaaggagaacactggtatggaaactcttcagagactccgtcagaagcatcctatggggaagtccaggagaactataagttgtctctggaggaccggatccaggagcagtccacgtccccggacacctccttgggaagcacgactcccagcagccacacgttggagctggtggcactggacagtgaggtcctgcgagactcactgcagtgtcaagatcacctttccccgggagtgtcttctttgtgtgacgatgacccaggctccaacaagcccctgagcagcaatttgaggcggctgctggaggctggttccctcaaactcgatgctgcagccacggctaatggcagagtggagtcccccgtaaacgttggctcgaacctctccttttccccgccttcccaccacgcccagcagctcagtgttctggccaggaagttggccgagaagcaggaacagaatgaccaatacactccaagtaaccgttttatatggaatcaaggtaagtggttgccaaactcaaccaccacctgcagcttgtctccggattcagccatcctaaaactgaaagctgcagccaatgccgttctgcaggacaaatctctcaccaggactgaggagaccatgcgatttgagtccttttcctccccttttagctcccagtctgccagttctaccttggccgctttgtccaagaaggtcagtgaaagaagtttgactcctggtcaggagcaccctccaccggccagctccttcctttccctggcttctatgacctcctcagcggcccttctgaaggaggtggccgcaagggctgcgggcagtcttctggctgagaaatcatcgctgctgcctgaggaccctctaccgcccccgccttcagagaagaaaccagaaaaagtcactccgccacctccaccgccacctccaccacctccaccaccaccaccacaatccctggaattattattactcccagttcctaagggaagagtttctaaaccctccaattcagcctcagaagaggaaagtggaaagcctttccagtgtccaatatgtggtttggttattaaaaggaagagttactggaagcggcacatggtgattcacacaggtttaaaaagtcatcagtgtccgctctgtccattccggtgtgctcgcaaggacaatctcaaatcccacatgaaggttcatcagcaccaggatcggggagagacctttcagtgccagctgtgcccttttacttcctcacgccacttcagcctgaaactccacatgcgttgccatcagcacttcctgaggacagaagccaaggtgaaggaggagatcccagacccagatgtcaagggatctccccacctcagtgacagtgcctgcctggggcagcaaagggaaggaggagggacagagctagtggggaccatgatgacgtctaacactccagagaggactagccagggaggggctggcgtctcgcctttgctggtgaaggaggaacccaaggaagataacggcctgcccacctcctttactttgaatgctgccgacaggcccgccaaccacacaaagctgaaagacccctccgagtatgtggccaacagtgcgtcagcattgttcagccaggacatctctgttaagatggcgtctgattttctcatgaagctgtcagctgcaaatcagaaggagcccatgaatcttaattttaaagtgaaagaggagcctaaggaaggggagtccctaagcacgactttgcctcggtccagctatgtgttcagcccggaatctgaagtgtcagccccaggcgtctctgaggacgcactaaagccccaggaagggaagggaagtgtgctaaggcgggatgtgtcagtcaaagcagcctctgaacttctcatgaaactctcagcggaaagctacaaggaaacacagatggtgaagattaaagaggaacccatggaggttgacatccaggactcccatgtctcgatatcacccagccggaatgttggctacagcactttaatcgggcgagagaaaaccgaacccttacagaagatgccagagggcagagtacccccagagagaaacctcttcagtcaggatatctctgtgaaaatggcttccgagctcctctttcaactgtcagaaaaagtgagcaaagagcacaatcatacaaaagaaaacaccatccggaccacgaccagccctttcttttcagaagacacatttagacaatcaccattcacctccaattcaaaagaactgctgcccagtgactccgtgctgcacggaagaatatcagctccagaaacagaaaagatagtcctagaggcaggaaatggattaccatcctggaaattcaatgaccagctttttccctgtgacgtgtgtgggaaagtgtttggccgacagcagacattgtcccgacacctctcgctgcacacagaggaaagaaaatacaaatgccacttgtgcccctatgctgctaagtgccgtgcaaatctgaaccagcacttgaccgtccattccgtgaagctggtgagtacagacaccgaggacattgtcagcgccgtcacctctgaaggcagtgatgggaagaaacatccttattattacagttgtcacgtgtgtggatttgagaccgagctcaatgtccagtttgtcagccacatgtcactccacgtggacaaggagcagtggatgttttcgatctgctgcactgcctgcgacttcgtcaccatggaggaagcagagataaagactcacattggcaccaagcacacaggggaagacaggaagacccccagcgaatcaaatagcccctcttcatcctccctctcagctctgagtgattcagccaacagcaaagatgattcagatggctcccagaaaaacaagggcgggaacaatctgctggtcatctctgtcatgcctgggagccagccctcactgaacagtgaggaaaagccagagaaagggttcgaatgtgttttttgcaactttgtctgcaagacgaagaacatgtttgagcgtcatctgcagatacacctcatcacccggatgtttgagtgtgatgtgtgccacaagttcatgaagacccccgaacagctgctggagcataagaaatgccacactgtccccaccggtgggctcaactcaggacagtggtgagtttcagactcctctaggtgcccattctgcatttattccaccaaccgccccgctgccatggagtgccacctcaagacccactacaagatggagtacaagtgccggatctgccagacggtgaaggccaaccagctggagctggagacgcacacccgggagcaccgcctgggcaaccactacaagtgcgaccagtgcggctacctgtccaagaccgccaacaagctcatcgagcacgtgcgcgtccacaccggggagcggcccttccactgtgaccagtgcagctacagctgcaagcgcaaggacaatctcaacctgcacaagaagctgaagcacgccccacgccagaccttcagctgcgaagagtgcctgttcaagaccacacaccctttcgtcttcagccgccacgtcaagaagcaccagagtggggactgccccgaggaggacaagaagggcctgtgtccagcccccaaggaaccggccggcccgggggccccgctcctggtggtcgggagctcccggaatctcctgtctcccctgtcagttatgtctgcctcccaggctctgcagaccgtggccctgtcggcagcccacggcagcagctcagagcccaacctggcactcaaggctttggccttcaacggctcccctttgcgctttgacaagtaccggaactcagattttgcccatctcattcccttgacaatgttataccccaagaaccacttggatctcacattccaccctccccgacctcagactgcgcctcccagcatcccctcacccaaacactccttcctggcctatctcggactgagagaaagagcagagactgtctgagggcagccatgttctgtaccaaaaacagagagacaaaagacaaaaaaaaaaaaaaaaaccacaaaacttaaacacaaccccagcaggtgtatgttgctgcaaaacctacagaccccgatgggtctggaacatgtgtactgtatatctttagtaaggaatagaaaattggctctgtgtgtatacctattgcattgacctgaaagctgctttatccaatcttcagagaggtgacctactgcatacttctaccttcagaggcatgcctccccagccacccactcccactctcagcccttctccgtacttttctctgaaaggaatcttgtcttgttaaaccctaaagagagtgtccttaatagcaatcagcacttgtaagcttatatactggtgcatttggttttctgttgggtgaatgcggtgtgtgggcgtttgtggattctgaaagagaaagccgtgtgtcgtgtgccatgacatttctattgcacattctttgtactggcttctttaacagcgatgaacgttcttttccctcctgggttgttcatccacgacagtctctccctgtgctccttcatcacctttccctctctctttgatggctacagagtggtagggcctggtgcttagtcgatgaaggaatggtagccatctacagtgctgctggagatttccgccagagcgctggagaccttgcgctcagatcttctctggtgatgaagaggcgaggaatcaagtgactgatctggaagaaatatctcgcagcactgcagctaacatcacagaacttaagtgtgttttgtgtgtgtgcccacacgtagacaaatgtgtacggtgcacacacacagtgcatcattttttaagggcagattatatatatatatgagatgtattaattcagtggttaccatttgtttgcaggaaaaagaaatgtatgggtgaaaaaatttatggttgataaatccagccaaggagattaaaaggggtttggataaattctgggtataaatgctcagactaaaaaaaagaaatggcagttttgcacagtgctatggtcttgcactagtttttgtttctcatctgaaaaaaaaaaagtaaaataaaaggaagaaaatgtaccttttttatggaatgagtagactgtatgtttgaagatttagccacaacctctttgacatataatgacgcaacaaaaaggtgctgtttagtcctatggttcagtttatgcccctgacaagtttccattgtgttttgccgatcttctggctaatcgtggtatcctccatgttattagtaattctgtattccattttgttaacgcctggtagatgtaacctgctaggaggctaactttatacttatttaaaagctcttattttgtggtcattaaaatggcaatttatgtgcagcactttattgcagcaggaagcaggtgtgggttggttgtaaagctctttgctaatcttaaaaagtaatgggtgatttaaaaagaaaaaaggaaaaaaatctttggctgaatatgttcattgcttgtatttttaaaacaacagaatttccagtatgaaacaggctgaaagagcaggaagaaatgttctttgtataataatgggaagtttggaatataaaagtttatatattatttatctattggagaactggtgtacaggaggaacattttcttactgtgttgctgttttccatcatgtgttatcctaagagttggggttttttaaaatctgtttcaccaggggaaaataaaagcatccctaatgttcttcctctagtcagtttgctttgctgaaagctccctggaaattagtacagttctacaggaagccagaagactgtactgtctgtccacaccatggtctcctcagtcccctccacgccagcccctcttccccacacctagtaggtgtgctacacctccctttgccagtcatcccgccatggatggggagcctacttggtgccctggcaaacctgtttacactaaggagatgcccacagggagcgggaagctcccaaaccctcagtcattctccagcagagacctttgctcttggccaggtttgaaacgatgttcaacctcgccacgtcaatgtctcagtaaaagacactatagatagttatggacaatacactccaagaatactgggcttatgggtgggttggttttttgttttgttttgttttgttttcaagtcatgtctttatccccatataatggagaatgtgccacttggctaataatgtgttttcaaaactacaagttcagtgatgacaggaaagagggctaaagtagtcccacagaggctggtagaaaaggcgaatcacacttaagcaccagcaggttaaaaacctgaaagggtggccctgacaattcagactataggttttacagcatgccacttgtgcaataggaggtctagggttgaaactttcaagaacgagaggaggtgaaggaaggagacgtttactgctcaaatgccatgcatttcactgcttgccactgaacttgtatttgaatgacttagtaatgcttaatataattgggcaacttttttagcactttggaaagagtcatcaatctttctggtaaattataaaagttttctgagtgagaaaaggtgtgtttggagtttgtttgactttttatattattattgttattaataaagaaaaaaatctacagcatttttcagactccaccctagaaaatatgtacccctgaatttggtttgcagtttgatactcagggaaggatgtattccatagatatcctttccgtataaaacactaacatctttgagaaattcacctaccaactaacttcaattgttgtcactatgcattcttcaatgaaaactagcttatttttccatatagtaatgcagttagggttctcagcactttctttcttctatcctttttttaactcttcatattatgttcagatgatcatactgtcaaggtttgtgtacattactgaaaatttgtattgtataaagctttttgcattacgaggctgtacagggtcattttgacagtaactggtatattcctttgcatcttatgttgcattgccaatttctagtgtatccagtttgaaagtataatatactctaattaaaaaaaaaaaaaggttggctata

SEQ ID NO: 203950 - DNA, 3165 bp, Homo sapiens
  Payload ID: 20223
  Gene Name: zinc finger protein 827
  ENST ID: ENST00000513320
  CDS Start-End: 83-2278
gccagtgtctgcctctctgcccccacgggggtttatttgatctcacattaaccaaggaggagaatgtgagaaaagggggaaaatgcccaggaggaagcaggagcagcccaagcgccttccctcaccctcagaagaggaaagtggaaagcctttccagtgtccaatatgtggtttggttattaaaaggaagagttactggaagcggcacatggtgattcacacaggtttaaaaagtcatcagtgtccgctctgtccattccggtgtgctcgcaaggacaatctcaaatcccacatgaaggttcatcagcaccaggatcggggagagacctttcagtgccagctgtgcccttttacttcctcacgccacttcagcctgaaactccacatgcgttgccatcagcacttcctgaggacagaagccaaggtgaaggaggagatcccagacccagatgtcaagggatctccccacctcagtgacagtgcctgcctggggcagcaaagggaaggaggagggacagagctagtggggaccatgatgacgtctaacactccagagaggactagccagggaggggctggcgtctcgcctttgctggtgaaggaggaacccaaggaagataacggcctgcccacctcctttactttgaatgctgccgacaggcccgccaaccacacaaagctgaaagacccctccgagtatgtggccaacagtgcgtcagcattgttcagccaggacatctctgttaagatggcgtctgattttctcatgaagctgtcagctgcaaatcagaaggagcccatgaatcttaattttaaagtgaaagaggagcctaaggaaggggagtccctaagcacgactttgcctcggtccagctatgtgttcagcccggaatctgaagtgtcagccccaggcgtctctgaggacgcactaaagccccaggaagggaagggaagtgtgctaaggcgggatgtgtcagtcaaagcagcctctgaacttctcatgaaactctcagcggaaagctacaaggaaacacagatggtgaagattaaagaggaacccatggaggttgacatccaggactcccatgtctcgatatcacccagccggaatgttggctacagcactttaatcgggcgagagaaaaccgaacccttacagaagatgccagagggcagagtacccccagagagaaacctcttcagtcaggatatctctgtgaaaatggcttccgagctcctctttcaactgtcagaaaaagtgagcaaagagcacaatcatacaaaagaaaacaccatccggaccacgaccagccctttcttttcagaagacacatttagacaatcaccattcacctccaattcaaaagaactgctgcccagtgactccgtgctgcacggaagaatatcagctccagaaacagaaaagatagtcctagaggcaggaaatggattaccatcctggaaattcaatgaccagctttttccctgtgacgtgtgtgggaaagtgtttggccgacagcagacattgtcccgacacctctcgctgcacacagaggaaagaaaatacaaatgccacttgtgcccctatgctgctaagtgccgtgcaaatctgaaccagcacttgaccgtccattccgtgaagctggtgagtacagacaccgaggacattgtcagcgccgtcacctctgaaggcagtgatgggaagaaacatccttattattacagttgtcacgtgtgtggatttgagaccgagctcaatgtccagtttgtcagccacatgtcactccacgtggacaaggagcagtggatgttttcgatctgctgcactgcctgcgacttcgtcaccatggaggaagcagagataaagactcacattggcaccaagcacacaggggaagacaggaagacccccagcgaatcaaatagcccctcttcatcctccctctcagctctgagtgattcagccaacagcaaagatgattcagatggctcccagaaaaacaagggcgggaacaatctgctggtcatctctgtcatgcctgggagccagccctcactgaacagtgaggaaaagccagagaaagggttcgaatgtgttttttgcaactttgtctgcaagacgaagaacatgtttgagcgtcatctgcagatacacctcatcacccggatgtttgagtgtgatgtgtgccacaagttcatgaagacccccgaacagctgctggagcataagaaatgccacactgtccccaccggtgggctcaactcaggacagtggtgagtttcagactcctctaggtgcccattctgcatttattccaccaaccgccccgctgccatggagtgccacctcaagacccactacaagatggagtacaagtgccggatctgccagacggtgaaggccaaccagctggagctggagacgcacacccgggagcaccgcctgggcaaccactacaagtgcgaccagtgcggctacctgtccaagaccgccaacaagctcatcgagcacgtgcgcgtccacaccggggagcggcccttccactgtgaccagtgcagctacagctgcaagcgcaaggacaatctcaacctgcacaagaagctgaagcacgccccacgccagaccttcagctgcgaagagtgcctgttcaagaccacacaccctttcgtcttcagccgccacgtcaagaagcaccagagtggggactgccccgaggaggacaagaagggcctgtgtccagcccccaaggaaccggccggcccgggggccccgctcctggtggtcgggagctcccggaatctcctgtctcccctgtcagttatgtctgcctcccaggctctgcagaccgtggccctgtcggcagcccacggcagcagctcagagcccaacctggcactcaaggctttggccttcaacggctcccctttgcgctttgacaagtaccggaactcagattttgcccatctcattcccttgacaatgttataccccaagaaccacttggatctcacattccaccctccccgacctcagactgcgcctcccagcatcccctcacccaaacactccttcctggcctatctcggactgagagaaagagcagagactgtctgagggcagccatgttctgtaccaaaaacagagagacaaaagacaaaaaaaaa

SEQ ID NO: 203951 - DNA, 858 bp, Homo sapiens
  Payload ID: 20223
  Gene Name: zinc finger protein 827
  ENST ID: ENST00000511659
  CDS Start-End: 1-536
acgtgtgtggatttgagaccgagctcaatgtccagtttgtcagccacatgtcactccacgtggacaaggagcagtggatgttttcgatctgctgcactgcctgcgacttcgtcaccatggaggaagcagagataaagactcacattggcaccaagcacacaggggaagacaggaagacccccagcgaatcaaatagcccctcttcatcctccctctcagctctgagtgattcagccaacagcaaagatgattcagatggctcccagaaaaacaagggcgggaacaatctgctggtcatctctgtcatgcctgggagccagccctcactgaacagtgaggaaaagccagagaaagggttcgaatgtgttttttgcaactttgtctgcaagacgaagaacatgtttgagcgtcatctgcagatacacctcatcacccggatgtttgagtgtgatgtgtgccacaagttcatgaagacccccgaacagctgctggagcataagaaatgccacactgtccccaccggtgggctcaagtaaggaaagtgcccattctgcatttattccaccaaccgccccgctgccatggagtgccacctcaagacccactacaagatggagtacaagtgccggatctgccagacggtgaaggccaaccagctggagctggagacgcacacccgggagcaccgcctgggcaaccactacaagtgcgaccagtgcggctacctgtccaagaccgccaacaagctcatcgagcacgtgcgcgtccacaccggggagcggcccttccactgtgaccagtgcagctacagctgcaagcgcaaggacaatctcaacctgcacaagaagctgaagcacg

SEQ ID NO: 203952 - DNA, 538 bp, Homo sapiens
  Payload ID: 20223
  Gene Name: zinc finger protein 827
  ENST ID: ENST00000503462
  CDS Start-End: 1-538
ttcatgaagacccccgaacagctgctggagcataagaaatgccacactgtccccaccggtgggctcaagtgcccattctgcatttattccaccaaccgccccgctgccatggagtgccacctcaagacccactacaagatggagtacaagtgccggatctgccagacggtgaaggccaaccagctggagctggagacgcacacccgggagcaccgcctgggcaaccactacaagtgcgaccagtgcggctacctgtccaagaccgccaacaagctcatcgagcacgtgcgcgtccacaccggggagcggcccttccactgtgaccagtgcagctacagctgcaagcgcaaggacaatctcaacctgcacaagaagctgaagcacgccccacgccagaccttcagctgcgaagagtgcctgttcaagaccacacaccctttcgtcttcagccgccacgtcaagaagcaccagagtggggactgccccgaggaggacaagaagggcctgtgtccagcccccaaggaaccggccggcccgg

SEQ ID NO: 203953 - DNA, 4977 bp, Homo sapiens
  Payload ID: 20224
  Gene Name: zinc finger protein 829
  Uniprot ID: Q3KNS6
  ENST ID: ENST00000520965
  CDS Start-End: 68-1609
agatctgggaggtgagatattttggtccccaggagaactggctcaggtctgcaagttcccatccgggatgactggaaagggcttaggtgaggataccgaagaccgatggggagctggcgccttgggcccctgcgggcggagcggcctgaaaggtggaggttgtgtttgggaggccgaggcaggaggatcacgaggtcaagagatcgagaccatcctggccaacatggaaacctctctgaggtctggtcagattccaaccctggacagcagtgaacacaacctttcccctgagccactggaattggacagaatgccccattctcctctgatctccattcctcatgtgtggtgtcacccagaagaggaggaaagaatgcatgatgaacttctacaagcagtatccaaggggccggtgatgttcagggatgtttccatagacttctctcaagaggaatgggaatgcctggacgctgatcagatgaatttatacaaagaagtgatgttggagaatttcagcaacctggtttcagtgggactttccaattctaagccagctgtgatctccttattggaacaaggaaaagagccctggatggttgatagagagctgactagaggcctgtgttcagatctggaatcaatgtgtgagaccaaaatattatctctaaagaagagacatttcagtcaagtaataattacccgtgaagacatgtctacttttattcagcccacatttcttattccacctcaaaaaactatgagtgaagagaaaccatgggaatgtaagatatgtggaaagacctttaatcaaaactcacaatttatccaacatcagagaattcattttggtgaaaaacactatgaatctaaggagtatgggaagtcctttagtcgtggctcactcgttactcgacatcagaggattcacactggtaaaaaaccctatgaatgtaaggaatgtggcaaggcttttagttgtagttcatatttttctcaacatcagaggattcacactggtgagaaaccctatgaatgtaaggaatgtggaaaagcctttaagtattgctcaaaccttaatgatcatcagagaattcacactggtgagaaaccctatgaatgtaaagtatgtggaaaagcctttactaaaagttcacaactttttctacatctgagaattcatactggtgagaaaccttatgaatgtaaagaatgtgggaaagcctttactcaacactcaaggcttattcagcatcagagaatgcatactggtgagaaaccttatgaatgtaagcagtgtgggaaggcctttaatagtgcctcaacacttactaaccatcacagaattcatgctggtgagaagctctatgaatgtgaagaatgtagaaaggcctttattcagagctcagaacttattcaacatcagagaatccatacagatgaaaaaccatatgaatgtaatgaatgtgggaaggcctttaataaaggctcaaatcttactcgacatcagagaattcacactggtgagaaaccctatgactgtaaggaatgtggaaaggcttttggtagtcgctctgacctcattcgccatgagggaattcatactggttgaatgacagtaaagtaagaccattttgttaacctttataataatttttttaaaacaggtaaggagaacaaattaggatacatattatcaaaggttctcctatgtattcgtttttaaacgatacgataacaaagtaccaagtaccaaaaccttggtggcttaaaacaagagaaatttattctctcatagtttagagcctggaaatctaaactcaagggtgctgatcgttttggttccttctgaggactctgaggatctgttctatgcctttttcctaacctctgttaacagctggcagtccttggcattccatggcttttacatacaccattccaatctctgcctccatcttcacattgcattctcgctgtgtatctctgtgtatgtcttttatttggacaccagtcaggttagattggggttacctggtgacctcatcttaacttgattatatctgccaagaccctgtttccaagtaaggtcacatttaccggtaccaggggttaggacttcagcatatctttttaggggatacagttcaacccataataccctgttagaatgattttgtctaatatatttgtaatttccttttatacataagttgttagtcaaatttattttattttattttattttgagacagagtctcgctctgttgcccaggctggagtgcagtggtgtgatctcagctcactgcaacctccagctcctgagttcaagcgattcttgtgcctcagcctctcaagtagttgggattacaggcatgcgccaccatgcccggctaattttttttttttttttttttgtatttttagtagcgacggggtttcaccatgttggccaggctggtcttgaactcctgacttcaagtgatctgcccgcctcagcctcccaaagtgctgggattacagacgtgagccaccgtgatggccaaaacagactttataccaacaaaaattaaaaaggacaaagaaggtcatttataatgataaaggataaattcaacaagaagataaaacaatcctaaatatgtatgcacccaacactgcaacacccagatccataacacagatactactagacctaagaaaagagatagacagcaatacaacaatagcaggggacttcaccactccattgacagcactagacagatcactgggacagaaatcaacaaagaaactctggacttaaattggactctacaccaaatggacccaacagacatctgaagaacattctacccaacaaccacagaatatatactcttctcttctgtgcatggaacattctcaaaaataggtcatatactggaccacaaagcaagtatcaataaattttaaaaaaacaaaatcatatctaacatcttctctgaccatagtggaataaaactagatatcaataccaagaggaactctcaaaacagatacatggaatttaaacagcttgctcctgaatgatttttggatcaatgatgaaactaaggtggaaatttaaaattttttgaaataaatgaaaatagagacaaaacacatgaaaacatctgagatacagcaaaagcagtgctaagagaggattttatagcattaaatgcctacaccaaaaagatagaaaaatctcaaatgaatagcctaacgtcacatctcaaggaactaggaaaaaacaaaacaaactcaacccaaagctggcagaagaaaagcaataacaaatatcagagcaggcaaaaatgagactgagaacaaaggaatgcaaaagatcaataaaagaaaaagttggttctttgcaaagataaaactgacagaccactagctagattaaccaagaaaaaaagaagattcaaataaatacaatcagaaatgataaggtgatattataactgataacacagacatataaaatatcagcagaaactatatgcacatattagaaaacctagaggaagtggataaattcctagaaacacataaccttccaagattgaaccagggagaaataggaatcctcaacagactactgagtattgaaattgaatcagtaatagaaaaaaatcttgcaaaaacaaaaagcccaggaccagacagattcacagctgaattctactagacatgcaaggaagaactagtaacagcactattgaaactattccaaaaattataggagggaatcctccctaactcattctacaaagccagtatcatcctgatactgaagccaggcaaggataaaacacacaaaaaaactacaagccaatatccctgatgaaaatagacacaaaaatcttcagcaaaatactagcaaaccaaatcaaacagtacataaaaaagatagtaacagcacagtcaagtggattttattcctggggtgtaaggatggctcaacatatgcaactcaatacatgattcatcacatacacagaattaaaaataagccaggcactcacacctgtaatcccagcactttgcaaggccaaggcgggcagatcacatgatgtcaagagtttgagaccagtctggctgacatggcgaaaccctgtctctactaaaaatagaaaaattggctgggcatggtggcaggcactgtagtcccagctacttgggaggctgaggcaggagaattacttgaacctgagaagcggaggttgcagtgagctgagatagtgccattgcactccagcctgggcaacagagcaaattgcttgaatgtgggaggtggaggttgcagtgagccgagattatgccattgcactccagccgggggagcaacaaagccagactccatctcaaaaaaaaaccaaaaaaaatcctatttagtacaaggtacattatttaggtaatgagtccattaaaagccaacactttccccactacactatatgtgtatgtaacacaactgcccttgtaacttcctaaacctataattaagaaacaataaaaggcaaattaagaatgcttttttaaaaggtgggggcattatgctaataagttactgtggatttcagagtgcagagtagaaagatcacaagaatttagtgtggtaggtgggaacagaaaatgggtgtataaattttattgacgtgggagtactggatattgtagagacagatatcatcagggcaaggagattaaagatttttgcattgacggtttgacactatattgtggtaataacactgtatgtgttgggagatagaacaggaaacatcttccctggaatatgtatactattaaatgttttatcaaacttttgatcaaacaagacagcacaatttataatttcatttctatttctatgttatgagaaactgatcatttattcaaatgtttaacaggcatgttcatgttactataaactcttctgtttcaccatca

SEQ ID NO: 203954 - DNA, 1805 bp, Homo sapiens
  Payload ID: 20224
  Gene Name: zinc finger protein 829
  Uniprot ID: Q3KNS6
  ENST ID: ENST00000391711
  CDS Start-End: 366-1664
agaacacatctgctttcctgtgtgagggtgaggcttgggccgggttccccgggaggctcatctccattgcgcagcgctacggcgacccgcaactccgaggctcggctggatgttgagagttgagggagcagccgtttcgggtgggcccaggcgaggagctgacaggaatcggcgtgggtcccgctctggactacatttcccagagggcctggtggcctgccacttttctcgcaggaattcgaacgtttcgtcactcctggcgggacccttagatctgggaggaaacctctctgaggtctggtcagattccaaccctggacagcagtgaacacaacctttcccctgagccactggaattggacagaatgccccattctcctctgatctccattcctcatgtgtggtgtcacccagaagaggaggaaagaatgcatgatgaacttctacaagcagtatccaaggggccggtgatgttcagggatgtttccatagacttctctcaagaggaatgggaatgcctggacgctgatcagatgaatttatacaaagaagtgatgttggagaatttcagcaacctggtttcagtgggactttccaattctaagccagctgtgatctccttattggaacaaggaaaagagccctggatggttgatagagagctgactagaggcctgtgttcagatctggaatcaatgtgtgagaccaaaatattatctctaaagaagagacatttcagtcaagtaataattacccgtgaagacatgtctacttttattcagcccacatttcttattccacctcaaaaaactatgagtgaagagaaaccatgggaatgtaagatatgtggaaagacctttaatcaaaactcacaatttatccaacatcagagaattcattttggtgaaaaacactatgaatctaaggagtatgggaagtcctttagtcgtggctcactcgttactcgacatcagaggattcacactggtaaaaaaccctatgaatgtaaggaatgtggcaaggcttttagttgtagttcatatttttctcaacatcagaggattcacactggtgagaaaccctatgaatgtaaggaatgtggaaaagcctttaagtattgctcaaaccttaatgatcatcagagaattcacactggtgagaaaccctatgaatgtaaagtatgtggaaaagcctttactaaaagttcacaactttttctacatctgagaattcatactggtgagaaaccttatgaatgtaaagaatgtgggaaagcctttactcaacactcaaggcttattcagcatcagagaatgcatactggtgagaaaccttatgaatgtaagcagtgtgggaaggcctttaatagtgcctcaacacttactaaccatcacagaattcatgctggtgagaagctctatgaatgtgaagaatgtagaaaggcctttattcagagctcagaacttattcaacatcagagaatccatacagatgaaaaaccatatgaatgtaatgaatgtgggaaggcctttaataaaggctcaaatcttactcgacatcagagaattcacactggtgagaaaccctatgactgtaaggaatgtggaaaggcttttggtagtcgctctgacctcattcgccatgagggaattcatactggttgaatgacagtaaagtaagaccattttgttaacctttataataatttttttaaaacaggtaaggagaacaaattaggatacatattatcaaaggttctcctatgtattcgtttttaaacgatacgataacaaagtaccaagtac

SEQ ID NO: 203955 - DNA, 1690 bp, Homo sapiens
  Payload ID: 20224
  Gene Name: zinc finger protein 829
  Uniprot ID: Q3KNS6
  ENST ID: ENST00000611922
  CDS Start-End: 803-1549
tgagagttgagggagcagccgtttcgggtgggcccaggcgaggagctgacaggaatcggcgtgggtcccgctctggactacatttcccagagggcctggtggcctgccacttttctcgcaggaattcgaacgtttcgtcactcctggcgggacccttagatctgggaggaaacctctctgaggtctggtcagattccaaccctggacagcagtgaacacaacctttcccctgagccactggaattggacagaatgccccattctcctctgatctccattcctcatgtgtggtgtcacccagaagaggaggaaagaatgcatgatgaacttctacaagcagtatccaaggggccggtgatgttcagggatgtttccatagacttctctcaagaggaatgggaatgcctggacgctgatcagatgaatttatacaaagaagtgatgttggagaatttcagcaacctggtttcagtgggactttccaattctaagccagctgtgatctccttattggaacaaggaaaagagccctggatggttgatagagagctgactagaggcctgtgttcagatctggaatcaatgtgtgagaccaaaatattatctctaaagaagagacatttcagtcaagtaataattacccgtgaagacatgtctacttttattcagcccacatttcttattccacctcaaaaaactatgagtgaagagaaaccatgggaatgtaagatatgtggaaagacctttaatcaaaactcacaatttatccaacatcagagaattcattttggtgaaaaacactatgaataaggagtatgggaagtcctttagtcgtggctcactcgttactcgacatcagaggattcacactggtaaaaaaccctatgaatgtaaggaatgtggcaaggcttttagttgtagttcatatttttctcaacatcagaggattcacactggtgagaaaccctatgaatgtaaggaatgtggaaaagcctttaagtattgctcaaaccttaatgatcatcagagaattcacactggtgagaaaccctatgaatgtaaagtatgtggaaaagcctttactaaaagttcacaactttttctacatctgagaattcatactggtgagaaaccttatgaatgtaaagaatgtgggaaagcctttactcaacactcaaggcttattcagcatcagagaatgcatactggtgagaaaccttatgaatgtaagcagtgtgggaaggcctttaatagtgcctcaacacttactaaccatcacagaattcatgctggtgagaagctctatgaatgtgaagaatgtagaaaggcctttattcagagctcagaacttattcaacatcagagaatccatacagatgaaaaaccatatgaatgtaatgaatgtgggaaggcctttaataaaggctcaaatcttactcgacatcagagaattcacactggtgagaaaccctatgactgtaaggaatgtggaaaggcttttggtagtcgctctgacctcattcgccatgagggaattcatactggttgaatgacagtaaagtaagaccattttgttaacctttataataatttttttaaaacaggtaaggagaacaaattaggatacatattatcaaaggttctcctatgtattcgtttttaaacgatacgataacaaagtaccaagtac

SEQ ID NO: 203956 - DNA, 2599 bp, Homo sapiens
  Payload ID: 20225
  Gene Name: zinc finger protein 83
  Uniprot ID: P51522
  ENST ID: ENST00000301096
  CDS Start-End: 402-1952
agacctggcttctgtactgcgcgcgcacatgcgcgcaaacccggaagcggattatgtggagtgaaagttacaccgtggcggattgacttctaaggactcttggtacatgaggaagaaacccggaaggggaagaggaaagcaaaggcgtcaggaatggttcttcctcaggtattttttctaaatgtgagatcaaggaattaccaccaaaaaaggagagtaatacaggagaaatattccagacagtaatgttggaaagacatgaaagccacgacatacaagatttttgcttcagagaaacccagaaaaatgtacatgactctcagtgtctgtggaaacatgattgaagacattataagcgagtgcgtgtgacctataaggaaagtctcattggtagaagagacatgcatgggagaaaggatgatgcacaaaagcagcctgttaaaaatcagcttggattaaacccgcagtcacatctaccagaactgcagctatttcaagctgaagggaaaatatataaatatgatcacatggaaaaatctgtcaacagtagttccttagtttccccaccccaacgtatttcttctactgtcaaaacccacatttctcatacatatgaatgtaattttgtggattcattattcacacaaaaagagaaagcaaatattgggacagaacactacaaatgtagtgagcgtggcaaggcctttcatcaaggcttacattttactatacatcaaataatccatactaaagagacgcaatttaaatgtgatatatgtggcaagatcttcaataaaaaatcaaaccttgcaagtcatcaaagaattcatactggagagaagccatataaatgtaatgaatgtggcaaggtcttccataatatgtcacaccttgcacagcatcgcaggattcatactggagagaaaccatataaatgtaatgaatgtggcaaggtctttaatcaaatttcacaccttgcacaacatcaaagaattcataccggagagaaaccttataaatgtaatgaatgtggaaaggtcttccatcaaatttcacaccttgcacaacatcggacaattcatactggagaaaaaccttacgaatgtaacaaatgtggcaaggtgttcagtcgcaattcctaccttgtacaacatctgatcattcatactggagagaaaccttacagatgtaatgtatgtggaaaggtcttccatcatatttcacaccttgcacaacatcagagaatccacactggagagaaaccttacaaatgtaatgagtgtggcaaggtcttcagtcacaagtcatccctagtaaatcactggagaattcatactggagagaaaccttacaaatgtaatgagtgtggcaaggtcttcagtcacaagtcatccctagtaaatcactggagaatccacactggagagaaaccttacaaatgtaatgaatgtggcaaggtcttcagtcgcaattcataccttgcccaacatctgataattcatgccggtgagaaaccttataagtgtgatgaatgtgacaaagcattcagtcaaaattcacatcttgtacaacatcacagaatccatactggagagaaaccttacaaatgtgatgaatgtggcaaagtcttcagtcaaaattcataccttgcatatcattggagaattcatactggagaaaaagcttataaatgtaatgaatgtgggaaggtcttcggtctaaactcatccctagcacatcatcggaaaattcacactggagagaaacctttcaaatgtaatgaatgtggcaaagcttttagtatgcgttcaagcctcactaatcatcatgcgatccacactggagagaaacatttcaaatgtaatgaatgtggcaaactcttccgcgacaattcatatcttgtacgtcatcagagatttcatgccggaaagaaatctaacacatgtaattaatgtggcagagtgttcagttagcattaaagccttgtaagacatacaataatttatactggagaaaaactttgcaagtataatgaatgtagcagagcctttagtttttgttcaaggcttaataaccgttagctagaccatagaggacagaaactttactaatgtactgaatgtggcaaggtcttaaggtaaaatctgagaccaggattcttcaaagaattcttgctggtgagaaacctaacaaatgtaatgaatgtggcaaggtcttctggcacaattctcacattgtacaatattgcaaaaattcatgcttgagagaaacaaaaacactgagagtgggaaaccattatgacttcaaacattcatcaacatcagagaatccatactaaagagcatttataataattatatgtgatagagattttccgcaggccaaagtctcactaggcatcaaaaacttttttgatgaaaccatacaaatgtaacgtgcatgcttaagcttttacccaggcatcaaaaccggaacatcacagggtttatactggagagtaactacacaaagataatgtaataagcctttcagtgtaatattcatgattttgtcgtgagagatccactcaataaaaaccaggcaaatgtagtgaatctgg

SEQ ID NO: 203957 - DNA, 3743 bp, Homo sapiens
  Payload ID: 20225
  Gene Name: zinc finger protein 83
  Uniprot ID: P51522
  ENST ID: ENST00000541777
  CDS Start-End: 1557-3107
gtgcttttgattcagtagttctgggaagagagctcagtgtccacatattacagtgctctttaaagattcagaaggaggcagtcagtggaggaatttgtgagatattttcctaagtccatctgtaatgtcttctttcctacagaaacatagggctggggatctagaaaacttccaacatgtcatgtttcctactttttataagcaggagtctctttctaacctgttggagcaaggcaaagagccctggactgtgtagcatgaagtgaaaataagatgggtgggaattttttttttttttttttttttttttttgagacaatctcactctgttgcccaggctggagtgcagtgacacgatctcggttcactgtaacctccacctctggggttcaagcaattctcctgcctcagcctcccaagtagctgggactgcagtcacatgccaccatgcccagctaatttttgtatttttagtagagacagggtttcaccatgttggccaggctgtgtttgaactcctgacttcaggtgatccacctgcctgggcctcccaaagtgttgggattacaggcatgagccactgctcccggcctactgtcacttcttaacatattaatctttgtatttctgaccacctcaatatccacagtactcagtccccatgctactctcaccatgtaaggaaagacacttgcttatctgtaggacggctttctcagaacacagcctaaaccgatgtctgctctgtacgatggtggacataccgctgtctaggaaggattaccaagtgacatggtcagcaacacaaccccgttcttgtagctcccttgaaatgattcctttctatgcatctatttgccatgtcgtgtcgtgttgtgcaggtttgtcgtgtgggtatatgtgtgccgtggtggtttgctgcacccatcaacccatcatctaggttttaagccctgcatgcattaggtatctttcccaatgttctccctccccttgccccctaccccctgataggccctgctctatgttgcttccctccctgtgaccatgtgttctaatcgttcaactcccacttatgagtgagaacatgcggtgtttggttttctgttcctgtgttagtttgctgagaacgatggcttccagctccatccatgtccctacaaaggacatgatctcattcttttttttctttttccgagatggagtttttgctcttgttgcccaggctggagtgcagtggcacaatctcggctcaccaccacctccgcctcccgggttcaagcgattctcccgcctcagcctcagaagttgctggaattacaggtattttttctaaatgtgagatcaaggaattaccaccaaaaaaggagagtaatacaggagaaatattccagacagtaatgttggaaagacatgaaagccacgacatacaagatttttgcttcagagaaacccagaaaaatgtacatgactctcagtgtctgtggaaacatgattgaagacattataagcgagtgcgtgtgacctataaggaaagtctcattggtagaagagacatgcatgggagaaaggatgatgcacaaaagcagcctgttaaaaatcagcttggattaaacccgcagtcacatctaccagaactgcagctatttcaagctgaagggaaaatatataaatatgatcacatggaaaaatctgtcaacagtagttccttagtttccccaccccaacgtatttcttctactgtcaaaacccacatttctcatacatatgaatgtaattttgtggattcattattcacacaaaaagagaaagcaaatattgggacagaacactacaaatgtagtgagcgtggcaaggcctttcatcaaggcttacattttactatacatcaaataatccatactaaagagacgcaatttaaatgtgatatatgtggcaagatcttcaataaaaaatcaaaccttgcaagtcatcaaagaattcatactggagagaagccatataaatgtaatgaatgtggcaaggtcttccataatatgtcacaccttgcacagcatcgcaggattcatactggagagaaaccatataaatgtaatgaatgtggcaaggtctttaatcaaatttcacaccttgcacaacatcaaagaattcataccggagagaaaccttataaatgtaatgaatgtggaaaggtcttccatcaaatttcacaccttgcacaacatcggacaattcatactggagaaaaaccttacgaatgtaacaaatgtggcaaggtgttcagtcgcaattcctaccttgtacaacatctgatcattcatactggagagaaaccttacagatgtaatgtatgtggaaaggtcttccatcatatttcacaccttgcacaacatcagagaatccacactggagagaaaccttacaaatgtaatgagtgtggcaaggtcttcagtcacaagtcatccctagtaaatcactggagaattcatactggagagaaaccttacaaatgtaatgagtgtggcaaggtcttcagtcacaagtcatccctagtaaatcactggagaatccacactggagagaaaccttacaaatgtaatgaatgtggcaaggtcttcagtcgcaattcataccttgcccaacatctgataattcatgccggtgagaaaccttataagtgtgatgaatgtgacaaagcattcagtcaaaattcacatcttgtacaacatcacagaatccatactggagagaaaccttacaaatgtgatgaatgtggcaaagtcttcagtcaaaattcataccttgcatatcattggagaattcatactggagaaaaagcttataaatgtaatgaatgtgggaaggtcttcggtctaaactcatccctagcacatcatcggaaaattcacactggagagaaacctttcaaatgtaatgaatgtggcaaagcttttagtatgcgttcaagcctcactaatcatcatgcgatccacactggagagaaacatttcaaatgtaatgaatgtggcaaactcttccgcgacaattcatatcttgtacgtcatcagagatttcatgccggaaagaaatctaacacatgtaattaatgtggcagagtgttcagttagcattaaagccttgtaagacatacaataatttatactggagaaaaactttgcaagtataatgaatgtagcagagcctttagtttttgttcaaggcttaataaccgttagctagaccatagaggacagaaactttactaatgtactgaatgtggcaaggtcttaaggtaaaatctgagaccaggattcttcaaagaattcttgctggtgagaaacctaacaaatgtaatgaatgtggcaaggtcttctggcacaattctcacattgtacaatattgcaaaaattcatgcttgagagaaacaaaaacactgagagtgggaaaccattatgacttcaaacattcatcaacatcagagaatccatactaaagagcatttataataattatatgtgatagagattttccgcaggccaaagtctcactaggcatcaaaaacttttttgatgaaaccatacaaatgtaacgtgcatgcttaagcttttacccaggcatcaaaaccggaacatcacagggtttatactggagagtaactacacaaagataatgtaataagcctttcagtgtaatattcatgattttgtcgtgagagatccactcaataaaaaccaggcaaatgt

SEQ ID NO: 203958 - DNA, 2633 bp, Homo sapiens
  Payload ID: 20225
  Gene Name: zinc finger protein 83
  Uniprot ID: P51522
  ENST ID: ENST00000545872
  CDS Start-End: 447-1997
ggcttctgtactgcgcgcgcacatgcgcgcaaacccggaagcggattatgtggagtgaaagttacaccgtggcggaatggggtgtattgattctgagcaataaacaacatatttttaacattcaggattgacttctaaggactcttggtacatgaggaagaaacccggaaggggaagaggaaagcaaaggcgtcaggaatggttcttcctcaggtattttttctaaatgtgagatcaaggaattaccaccaaaaaaggagagtaatacaggagaaatattccagacagtaatgttggaaagacatgaaagccacgacatacaagatttttgcttcagagaaacccagaaaaatgtacatgactctcagtgtctgtggaaacatgattgaagacattataagcgagtgcgtgtgacctataaggaaagtctcattggtagaagagacatgcatgggagaaaggatgatgcacaaaagcagcctgttaaaaatcagcttggattaaacccgcagtcacatctaccagaactgcagctatttcaagctgaagggaaaatatataaatatgatcacatggaaaaatctgtcaacagtagttccttagtttccccaccccaacgtatttcttctactgtcaaaacccacatttctcatacatatgaatgtaattttgtggattcattattcacacaaaaagagaaagcaaatattgggacagaacactacaaatgtagtgagcgtggcaaggcctttcatcaaggcttacattttactatacatcaaataatccatactaaagagacgcaatttaaatgtgatatatgtggcaagatcttcaataaaaaatcaaaccttgcaagtcatcaaagaattcatactggagagaagccatataaatgtaatgaatgtggcaaggtcttccataatatgtcacaccttgcacagcatcgcaggattcatactggagagaaaccatataaatgtaatgaatgtggcaaggtctttaatcaaatttcacaccttgcacaacatcaaagaattcataccggagagaaaccttataaatgtaatgaatgtggaaaggtcttccatcaaatttcacaccttgcacaacatcggacaattcatactggagaaaaaccttacgaatgtaacaaatgtggcaaggtgttcagtcgcaattcctaccttgtacaacatctgatcattcatactggagagaaaccttacagatgtaatgtatgtggaaaggtcttccatcatatttcacaccttgcacaacatcagagaatccacactggagagaaaccttacaaatgtaatgagtgtggcaaggtcttcagtcacaagtcatccctagtaaatcactggagaattcatactggagagaaaccttacaaatgtaatgagtgtggcaaggtcttcagtcacaagtcatccctagtaaatcactggagaatccacactggagagaaaccttacaaatgtaatgaatgtggcaaggtcttcagtcgcaattcataccttgcccaacatctgataattcatgccggtgagaaaccttataagtgtgatgaatgtgacaaagcattcagtcaaaattcacatcttgtacaacatcacagaatccatactggagagaaaccttacaaatgtgatgaatgtggcaaagtcttcagtcaaaattcataccttgcatatcattggagaattcatactggagaaaaagcttataaatgtaatgaatgtgggaaggtcttcggtctaaactcatccctagcacatcatcggaaaattcacactggagagaaacctttcaaatgtaatgaatgtggcaaagcttttagtatgcgttcaagcctcactaatcatcatgcgatccacactggagagaaacatttcaaatgtaatgaatgtggcaaactcttccgcgacaattcatatcttgtacgtcatcagagatttcatgccggaaagaaatctaacacatgtaattaatgtggcagagtgttcagttagcattaaagccttgtaagacatacaataatttatactggagaaaaactttgcaagtataatgaatgtagcagagcctttagtttttgttcaaggcttaataaccgttagctagaccatagaggacagaaactttactaatgtactgaatgtggcaaggtcttaaggtaaaatctgagaccaggattcttcaaagaattcttgctggtgagaaacctaacaaatgtaatgaatgtggcaaggtcttctggcacaattctcacattgtacaatattgcaaaaattcatgcttgagagaaacaaaaacactgagagtgggaaaccattatgacttcaaacattcatcaacatcagagaatccatactaaagagcatttataataattatatgtgatagagattttccgcaggccaaagtctcactaggcatcaaaaacttttttgatgaaaccatacaaatgtaacgtgcatgcttaagcttttacccaggcatcaaaaccggaacatcacagggtttatactggagagtaactacacaaagataatgtaataagcctttcagtgtaatattcatgattttgtcgtgagagatccactcaataaaaaccaggcaaatgt

SEQ ID NO: 203959 - DNA, 2726 bp, Homo sapiens
  Payload ID: 20225
  Gene Name: zinc finger protein 83
  Uniprot ID: P51522
  ENST ID: ENST00000536937
  CDS Start-End: 529-2079
agacctggcttctgtactgcgcgcgcacatgcgcgcaaacccggaagcggattatgtggagtgaaagttacaccgtggcggattgacttctaaggactcttggtacatgaggaagaaacccggaaggggaagaggaaagcaaaggcgtcaggaatggttcttcctcagggtctattgacattcagggatgtggccatagaattctctcaggaggagtggaaatgcctggaccctgctcagaggactctatacagagatgtgatgttggagaattataggaacctggtctccctgggtattttttctaaatgtgagatcaaggaattaccaccaaaaaaggagagtaatacaggagaaatattccagacagtaatgttggaaagacatgaaagccacgacatacaagatttttgcttcagagaaacccagaaaaatgtacatgactctcagtgtctgtggaaacatgattgaagacattataagcgagtgcgtgtgacctataaggaaagtctcattggtagaagagacatgcatgggagaaaggatgatgcacaaaagcagcctgttaaaaatcagcttggattaaacccgcagtcacatctaccagaactgcagctatttcaagctgaagggaaaatatataaatatgatcacatggaaaaatctgtcaacagtagttccttagtttccccaccccaacgtatttcttctactgtcaaaacccacatttctcatacatatgaatgtaattttgtggattcattattcacacaaaaagagaaagcaaatattgggacagaacactacaaatgtagtgagcgtggcaaggcctttcatcaaggcttacattttactatacatcaaataatccatactaaagagacgcaatttaaatgtgatatatgtggcaagatcttcaataaaaaatcaaaccttgcaagtcatcaaagaattcatactggagagaagccatataaatgtaatgaatgtggcaaggtcttccataatatgtcacaccttgcacagcatcgcaggattcatactggagagaaaccatataaatgtaatgaatgtggcaaggtctttaatcaaatttcacaccttgcacaacatcaaagaattcataccggagagaaaccttataaatgtaatgaatgtggaaaggtcttccatcaaatttcacaccttgcacaacatcggacaattcatactggagaaaaaccttacgaatgtaacaaatgtggcaaggtgttcagtcgcaattcctaccttgtacaacatctgatcattcatactggagagaaaccttacagatgtaatgtatgtggaaaggtcttccatcatatttcacaccttgcacaacatcagagaatccacactggagagaaaccttacaaatgtaatgagtgtggcaaggtcttcagtcacaagtcatccctagtaaatcactggagaattcatactggagagaaaccttacaaatgtaatgagtgtggcaaggtcttcagtcacaagtcatccctagtaaatcactggagaatccacactggagagaaaccttacaaatgtaatgaatgtggcaaggtcttcagtcgcaattcataccttgcccaacatctgataattcatgccggtgagaaaccttataagtgtgatgaatgtgacaaagcattcagtcaaaattcacatcttgtacaacatcacagaatccatactggagagaaaccttacaaatgtgatgaatgtggcaaagtcttcagtcaaaattcataccttgcatatcattggagaattcatactggagaaaaagcttataaatgtaatgaatgtgggaaggtcttcggtctaaactcatccctagcacatcatcggaaaattcacactggagagaaacctttcaaatgtaatgaatgtggcaaagcttttagtatgcgttcaagcctcactaatcatcatgcgatccacactggagagaaacatttcaaatgtaatgaatgtggcaaactcttccgcgacaattcatatcttgtacgtcatcagagatttcatgccggaaagaaatctaacacatgtaattaatgtggcagagtgttcagttagcattaaagccttgtaagacatacaataatttatactggagaaaaactttgcaagtataatgaatgtagcagagcctttagtttttgttcaaggcttaataaccgttagctagaccatagaggacagaaactttactaatgtactgaatgtggcaaggtcttaaggtaaaatctgagaccaggattcttcaaagaattcttgctggtgagaaacctaacaaatgtaatgaatgtggcaaggtcttctggcacaattctcacattgtacaatattgcaaaaattcatgcttgagagaaacaaaaacactgagagtgggaaaccattatgacttcaaacattcatcaacatcagagaatccatactaaagagcatttataataattatatgtgatagagattttccgcaggccaaagtctcactaggcatcaaaaacttttttgatgaaaccatacaaatgtaacgtgcatgcttaagcttttacccaggcatcaaaaccggaacatcacagggtttatactggagagtaactacacaaagataatgtaataagcctttcagtgtaatattcatgattttgtcgtgagagatccactcaataaaaaccaggcaaatgtagtgaatctgg

SEQ ID NO: 203960 - DNA, 522 bp, Homo sapiens
  Payload ID: 20225
  Gene Name: zinc finger protein 83
  ENST ID: ENST00000598536
  CDS Start-End: 399-491
aaatctggaagcggatcgcgtggagtgacggtcacaccgcggcgggtttctatgatgacaggatggtcctaagtcttcacacatcagggccacagccccaacctcacaggaaacagaattaatttccaaagactcatgttacatgagaaagccaccaagaagaccaaagaaaaggagacaaggatggctcttcctcagggatgcttgactttcagggatgtggctatagaattctctttggaggagtggaaatgcctgaaccctgcacagagggctttatacagggccgtgatgttggagaactacaggaacctggagtctgtgggattgacttctaaggactcttggtacatgaggaagaaacccggaaggggaagaggaaagcaaaggcgtcaggaatggttcttcctcaggtattttttctaaatgtgagatcaaggaattaccaccaaaaaaggagagtaatacaggagaaatattccagacagtaatgttggaaagacatgaaagccacgacataca

SEQ ID NO: 203961 - DNA, 670 bp, Homo sapiens
  Payload ID: 20225
  Gene Name: zinc finger protein 83
  ENST ID: ENST00000595939
  CDS Start-End: 113-274
cggaagcggattatgtggagtgaaagttacaccgtggcggattgacttctaaggactcttggtacatgaggaagaaacccggaaggggaagaggaaagcaaaggcgtcaggaatggttcttcctcagggtctattgacattcagggatgtggccatagaattctctcaggaggagtggaaatgcctggaccctgctcagaggactctatacagagatgtgatgttggagaattataggaacctggtctccctggatgttctgcgttcttcatgatagctcagtgggggttccagaagtaaagaaggcttaaaaccttatggctggcaaggcgtggtgactcatgcctgtaatcccagcactttgggaggccaaagcttgtggatcacttcaggctggagtgcagtggcacaatctcggctcaccaccacctccgcctcccgggttcaagcgattctcccgcctcagcctcagaagttgctggaattacaggtattttttctaaatgtgagatcaaggaattaccaccaaaaaaggagagtaatacaggagaaatattccagacagtaatgttggaaagacatgaaagccacgacatacaagatttttgcttcagagaaacccagaaaaatgtacatgactctcagtgtctgtggaaacatgattgaagac

SEQ ID NO: 203962 - DNA, 560 bp, Homo sapiens
  Payload ID: 20225
  Gene Name: zinc finger protein 83
  ENST ID: ENST00000596930
  CDS Start-End: 128-505
acatgcgcgcaaacccggaagcggattatgtggagtgaaagttacaccgtggcggattgacttctaaggactcttggtacatgaggaagaaacccggaaggggaagaggaaagcaaaggcgtcaggaatggttcttcctcagggtctattgacattcagggatgtggccatagaattctctcaggaggagtggaaatgcctggaccctgctcagaggactctatacagagatgtgatgttggagaattataggaacctggtctccctgggacatgatctcattcttttttttctttttccgagatggagtttttgctcttgttgcccaggctggagtgcagtggcacaatctcggctcaccaccacctccgcctcccgggttcaagcgattctcccgcctcagcctcagaagttgctggaattacaggtattttttctaaatgtgagatcaaggaattaccaccaaaaaaggagagtaatacaggagaaatattccagacagtaatgttggaaagacatgaaagccacgacatacaagatttttgcttcagagaaaccca

SEQ ID NO: 203963 - DNA, 704 bp, Homo sapiens
  Payload ID: 20225
  Gene Name: zinc finger protein 83
  ENST ID: ENST00000601257
  CDS Start-End: 409-624
agattctcgcaaatctggaagcggatcgcgtggagtgacggtcacaccgcggcgggtttctatgatgacaggatggtcctaagtcttcacacatcagggccacagccccaacctcacaggaaacagaattaatttccaaagactcatgttacatgagaaagccaccaagaagaccaaagaaaaggagacaaggatggctcttcctcagggatgcttgactttcagggatgtggctatagaattctctttggaggagtggaaatgcctgaaccctgcacagagggctttatacagggccgtgatgttggagaactacaggaacctggagtctgtgggattgacttctaaggactcttggtacatgaggaagaaacccggaaggggaagaggaaagcaaaggcgtcaggaatggttcttcctcagggtctattgacattcagggatgtggccatagaattctctcaggaggagtggaaatgcctggaccctgctcagaggactctatacagagatgtgatgttggagaattataggaacctggtctccctggggtctccctctgatgccgagccgaagctggacggtactgctgccatcttggctcactgcaacctccctgcctgattctcctgcctcagcctgctgagtgcctgtgattgcaggcgcgcgccgccacgcctgactggttttcgtatttttttggt

SEQ ID NO: 203964 - DNA, 576 bp, Homo sapiens
  Payload ID: 20225
  Gene Name: zinc finger protein 83
  ENST ID: ENST00000601140
  CDS Start-End: 113-280
cggaagcggattatgtggagtgaaagttacaccgtggcggattgacttctaaggactcttggtacatgaggaagaaacccggaaggggaagaggaaagcaaaggcgtcaggaatggttcttcctcagggtctattgacattcagggatgtggccatagaattctctcaggaggagtggaaatgcctggaccctgctcagaggactctatacagagatgtgatgttggagaattataggaacctggtctccctgggacggctttctcagaacacagcctaaaccgatgtctgctctgtacgatggtggacataccgctgtctaggaaggattaccaagtgacatgatggagtttttgctcttgttgcccaggctggagtgcagtggcacaatctcggctcaccaccacctccgcctcccgggttcaagcgattctcccgcctcagcctcagaagttgctggaattacaggtattttttctaaatgtgagatcaaggaattaccaccaaaaaaggagagtaatacaggagaaatattccagacagtaatgttggaaagacatgaaagccacgacatac

SEQ ID NO: 203965 - DNA, 2890 bp, Homo sapiens
  Payload ID: 20225
  Gene Name: zinc finger protein 83
  ENST ID: ENST00000594682
  CDS Start-End: 329-646
gcaaatctggaagcggatcgcgtggagtgacggtcacaccgcggcgaattaatttccaaagactcatgttacatgagaaagccaccaagaagaccaaagaaaaggagacaaggatggctcttcctcagggatgcttgactttcagggatgtggctatagaattctctttggaggagtggaaatgcctgaaccctgcacagagggctttatacagggccgtgatgttggagaactacaggaacctggagtctgtgggattgacttctaaggactcttggtacatgaggaagaaacccggaaggggaagaggaaagcaaaggcgtcaggaatggttcttcctcagggtctattgacattcagggatgtggccatagaattctctcaggaggagtggaaatgcctggaccctgctcagaggactctatacagagatgtgatgttggagaattataggaacctggtctccctgggtattttttctaaatgtgagatcaaggaattaccaccaaaaaaggagagtaatacaggagaaatattccagacagtaatgttggaaagacatgaaagccacgacatacaagatttttgcttcagagaaacccagaaaaatgtacatgactctcagtgtctgtggaaacatgattgaagacattataagcgagtgcgtgtgacctataaggaaagtctcattggtagaagagacatgcatgggagaaaggatgatgcacaaaagcagcctgttaaaaatcagcttggattaaacccgcagtcacatctaccagaactgcagctatttcaagctgaagggaaaatatataaatatgatcacatggaaaaatctgtcaacagtagttccttagtttccccaccccaacgtatttcttctactgtcaaaacccacatttctcatacatatgaatgtaattttgtggattcattattcacacaaaaagagaaagcaaatattgggacagaacactacaaatgtagtgagcgtggcaaggcctttcatcaaggcttacattttactatacatcaaataatccatactaaagagacgcaatttaaatgtgatatatgtggcaagatcttcaataaaaaatcaaaccttgcaagtcatcaaagaattcatactggagagaagccatataaatgtaatgaatgtggcaaggtcttccataatatgtcacaccttgcacagcatcgcaggattcatactggagagaaaccatataaatgtaatgaatgtggcaaggtctttaatcaaatttcacaccttgcacaacatcaaagaattcataccggagagaaaccttataaatgtaatgaatgtggaaaggtcttccatcaaatttcacaccttgcacaacatcggacaattcatactggagaaaaaccttacgaatgtaacaaatgtggcaaggtgttcagtcgcaattcctaccttgtacaacatctgatcattcatactggagagaaaccttacagatgtaatgtatgtggaaaggtcttccatcatatttcacaccttgcacaacatcagagaatccacactggagagaaaccttacaaatgtaatgagtgtggcaaggtcttcagtcacaagtcatccctagtaaatcactggagaattcatactggagagaaaccttacaaatgtaatgagtgtggcaaggtcttcagtcacaagtcatccctagtaaatcactggagaatccacactggagagaaaccttacaaatgtaatgaatgtggcaaggtcttcagtcgcaattcataccttgcccaacatctgataattcatgccggtgagaaaccttataagtgtgatgaatgtgacaaagcattcagtcaaaattcacatcttgtacaacatcacagaatccatactggagagaaaccttacaaatgtgatgaatgtggcaaagtcttcagtcaaaattcataccttgcatatcattggagaattcatactggagaaaaagcttataaatgtaatgaatgtgggaaggtcttcggtctaaactcatccctagcacatcatcggaaaattcacactggagagaaacctttcaaatgtaatgaatgtggcaaagcttttagtatgcgttcaagcctcactaatcatcatgcgatccacactggagagaaacatttcaaatgtaatgaatgtggcaaactcttccgcgacaattcatatcttgtacgtcatcagagatttcatgccggaaagaaatctaacacatgtaattaatgtggcagagtgttcagttagcattaaagccttgtaagacatacaataatttatactggagaaaaactttgcaagtataatgaatgtagcagagcctttagtttttgttcaaggcttaataaccgttagctagaccatagaggacagaaactttactaatgtactgaatgtggcaaggtcttaaggtaaaatctgagaccaggattcttcaaagaattcttgctggtgagaaacctaacaaatgtaatgaatgtggcaaggtcttctggcacaattctcacattgtacaatattgcaaaaattcatgcttgagagaaacaaaaacactgagagtgggaaaccattatgacttcaaacattcatcaacatcagagaatccatactaaagagcatttataataattatatgtgatagagattttccgcaggccaaagtctcactaggcatcaaaaacttttttgatgaaaccatacaaatgtaacgtgcatgcttaagcttttacccaggcatcaaaaccggaacatcacagggtttatactggagagtaactacacaaagataatgtaataagcctttcagtgtaatattcatgattttgtcgtgagagatccactcaataaaaaccaggcaaatgt

SEQ ID NO: 203966 - DNA, 810 bp, Homo sapiens
  Payload ID: 20225
  Gene Name: zinc finger protein 83
  ENST ID: ENST00000600714
  CDS Start-End: 284-661
gaattaatttccaaagactcatgttacatgagaaagccaccaagaagaccaaagaaaaggagacaaggatggctcttcctcagggatgcttgactttcagggatgtggctatagaattctctttggaggagtggaaatgcctgaaccctgcacagagggctttatacagggccgtgatgttggagaactacaggaacctggagtctgtgggattgacttctaaggactcttggtacatgaggaagaaacccggaaggggaagaggaaagcaaaggcgtcaggaatggttcttcctcagggtctattgacattcagggatgtggccatagaattctctcaggaggagtggaaatgcctggaccctgctcagaggactctatacagagatgtgatgttggagaattataggaacctggtctccctgggtattttttctaaatgtgagatcaaggaattaccaccaaaaaaggagagtaatacaggagaaatattccagacagtaatgttggaaagacatgaaagccacgacatacaagatttttgcttcagagaaacccagaaaaatggtctccctctgatgccgagccgaagctggacggtactgctgccatcttggctcactgcaacctccctgcctgattctcctgcctcagcctgctgagtgcctgtgattgcaggcgcgcgccgccacgcctgactggttttcgtatttttttggtggagacggggattcgctgtgttggccgggctggtctccagctcctaaccgggagtgatccgccagcctcggcctcccaaggtgccgggatt

SEQ ID NO: 203967 - DNA, 4442 bp, Homo sapiens
  Payload ID: 20225
  Gene Name: zinc finger protein 83
  Uniprot ID: P51522
  ENST ID: ENST00000597597
  CDS Start-End: 2255-3805
aggagaggggtacaaaatgaggagcagaatgccaggtaaaaagaaaagaaaacaagagctagagagagaaggggagaatgagagatatgtacacaattagggagggaagcacagtaatgaagaaagatgggctgggcgcagtggcttacgcctgtaatcccagcactttaggagactgaggcaagaagattgcttgagtacaggagttcgagtctagcttgggcaacatagtgagacccccatctctaccaaaaaaaaaaaaaaacaaccgggcatgatagtgtgcacctgtaatcccagctactctgaaggccgaggcagaaggatcacttgaacccaggaggtccaggctgcagtgagccgagatcatgtcactgcactccagcctggtcaacagagcaagaccctgtctcaaaagaaaaaaaggggcggaggactttgggtttagatgagtgggtgagttcattggatacgattagttgtgacatttgacttctttgtatataatctagtaacttaaaactgcttaaattatacagatgagattgagaattttaagaatcctatctataagacatgtacattctatgaatgttggcctcagaggttagcttccacttggaatccctattcagctacagtggagtgacttattcacttgtgagtcactctgttcccttttcccagagtggggtagggagtggggcagtgaagtgagaaaaaaatccctttctgttaacacataatttttaacttaattaattaactaacattaagagacagggtctggccaattgcctaggctggaatgcagtggcatgatctttaactgcagcctggtcctcctgggctcaagtaatcctcctacgtcagcttcctaagtagctgggaccacagtgatgagccaccaagaagcccggctagttttctttttctttcttttttttttttttgtagaaacgaggtttcactgtgtttcccaggctagtctcaaaatcctgggctcaaagtatcctcctgccttggccgcccagagtactgagattacaggaaagagccaccgcacgtggtctacatagtttttttttttttttgagttggaatttccctgttgtttcccaggctggagtgcagtggcgtgatttcggctcaccacaatctcagcttcccagattcatgcgattctcttgcttcagcctcccaactagctgggattacagacgcccaccaagcccagctactttttgtatttttagtagagatggagtttcaccatgtagcccaggctactctcgaactcctgacgtcaaacaatctgcccaccttggcctttcagagtgctagtattacaggcatgagccactgtggccagcccaatttttgtatttctagtagagggtttcaacatgttggcaggctggtctctaattcctgagcttaagcgattctgtctcctcagcttcctaagtagctgggaacatagacacacagacgtgtaccttcatgcctggctatgtttttgtatttttggcaaagatggggtttcaccatgttgcccaggctgatctcaaacccctgagattaagcgatccacctgcctcagcctcccagagtgctgggatgacaggcatgagccactgcacccagtttctgcatggggtttggtcagggctgggtctgcgccctgaagaggagctcattccagcccagctccccactgctgcagcgtgtgtggactcctccagaagggtgtggtgtgggcttctccagaagggtgcgggagttttcctgtaggagtttatcgtctctggtgcagtgggcagcagaggggaccatatttcctcagggtgaggtctcctttgtatgtgttgttatgttacaggaatggggtgtattgattctgagcaataaacaacatatttttaacattcaggattgacttctaaggactcttggtacatgaggaagaaacccggaaggggaagaggaaagcaaaggcgtcaggaatggttcttcctcaggtattttttctaaatgtgagatcaaggaattaccaccaaaaaaggagagtaatacaggagaaatattccagacagtaatgttggaaagacatgaaagccacgacatacaagatttttgcttcagagaaacccagaaaaatgtacatgactctcagtgtctgtggaaacatgattgaagacattataagcgagtgcgtgtgacctataaggaaagtctcattggtagaagagacatgcatgggagaaaggatgatgcacaaaagcagcctgttaaaaatcagcttggattaaacccgcagtcacatctaccagaactgcagctatttcaagctgaagggaaaatatataaatatgatcacatggaaaaatctgtcaacagtagttccttagtttccccaccccaacgtatttcttctactgtcaaaacccacatttctcatacatatgaatgtaattttgtggattcattattcacacaaaaagagaaagcaaatattgggacagaacactacaaatgtagtgagcgtggcaaggcctttcatcaaggcttacattttactatacatcaaataatccatactaaagagacgcaatttaaatgtgatatatgtggcaagatcttcaataaaaaatcaaaccttgcaagtcatcaaagaattcatactggagagaagccatataaatgtaatgaatgtggcaaggtcttccataatatgtcacaccttgcacagcatcgcaggattcatactggagagaaaccatataaatgtaatgaatgtggcaaggtctttaatcaaatttcacaccttgcacaacatcaaagaattcataccggagagaaaccttataaatgtaatgaatgtggaaaggtcttccatcaaatttcacaccttgcacaacatcggacaattcatactggagaaaaaccttacgaatgtaacaaatgtggcaaggtgttcagtcgcaattcctaccttgtacaacatctgatcattcatactggagagaaaccttacagatgtaatgtatgtggaaaggtcttccatcatatttcacaccttgcacaacatcagagaatccacactggagagaaaccttacaaatgtaatgagtgtggcaaggtcttcagtcacaagtcatccctagtaaatcactggagaattcatactggagagaaaccttacaaatgtaatgagtgtggcaaggtcttcagtcacaagtcatccctagtaaatcactggagaatccacactggagagaaaccttacaaatgtaatgaatgtggcaaggtcttcagtcgcaattcataccttgcccaacatctgataattcatgccggtgagaaaccttataagtgtgatgaatgtgacaaagcattcagtcaaaattcacatcttgtacaacatcacagaatccatactggagagaaaccttacaaatgtgatgaatgtggcaaagtcttcagtcaaaattcataccttgcatatcattggagaattcatactggagaaaaagcttataaatgtaatgaatgtgggaaggtcttcggtctaaactcatccctagcacatcatcggaaaattcacactggagagaaacctttcaaatgtaatgaatgtggcaaagcttttagtatgcgttcaagcctcactaatcatcatgcgatccacactggagagaaacatttcaaatgtaatgaatgtggcaaactcttccgcgacaattcatatcttgtacgtcatcagagatttcatgccggaaagaaatctaacacatgtaattaatgtggcagagtgttcagttagcattaaagccttgtaagacatacaataatttatactggagaaaaactttgcaagtataatgaatgtagcagagcctttagtttttgttcaaggcttaataaccgttagctagaccatagaggacagaaactttactaatgtactgaatgtggcaaggtcttaaggtaaaatctgagaccaggattcttcaaagaattcttgctggtgagaaacctaacaaatgtaatgaatgtggcaaggtcttctggcacaattctcacattgtacaatattgcaaaaattcatgcttgagagaaacaaaaacactgagagtgggaaaccattatgacttcaaacattcatcaacatcagagaatccatactaaagagcatttataataattatatgtgatagagattttccgcaggccaaagtctcactaggcatcaaaaacttttttgatgaaaccatacaaatgtaacgtgcatgcttaagcttttacccaggcatcaaaaccggaacatcacagggtttatactggagagtaactacacaaagataatgtaataagcctttcagtgtaatattcatgattttgtcgtgagagatccactcaataaaaaccaggcaaatgta

SEQ ID NO: 203968 - DNA, 509 bp, Homo sapiens
  Payload ID: 20225
  Gene Name: zinc finger protein 83
  ENST ID: ENST00000597161
  CDS Start-End: 118-396
aaacccggaagcggattatgtggagtgaaagttacaccgtggcggattgacttctaaggactcttggtacatgaggaagaaacccggaaggggaagaggaaagcaaaggcgtcaggaatggttcttcctcagggtctattgacattcagggatgtggccatagaattctctcaggaggagtggaaatgcctggaccctgctcagaggactctatacagagatgtgatgttggagaattataggaacctggtctccctggatggagtttttgctcttgttgcccaggctggagtgcagtggcacaatctcggctcaccaccacctccgcctcccgggttcaagcgattctcccgcctcagcctcagaagttgctggaattacaggtattttttctaaatgtgagatcaaggaattaccaccaaaaaaggagagtaatacaggagaaatattccagacagtaatgttggaaagacatgaaagccacgacatacaagatttttgcttcagag

SEQ ID NO: 203969 - DNA, 2246 bp, Homo sapiens
  Payload ID: 20226
  Gene Name: zinc finger protein 830
  Uniprot ID: Q96NB3
  ENST ID: ENST00000361952
  CDS Start-End: 38-1156
gacggaaaccagaatcgttttgggtctggtcgccaagatggcgtcctccgcctccgcccggactccggcagggaagcgagtgataaatcaggaagaattgcggcggttaatgaaggagaagcagcgtctgagcaccagtcggaaacggatagaatctccattcgcgaagtacaaccgtttggggcagctgagttgtgccctgtgtaacactccggttaagagcgagctcctgtggcagactcacgtcctgggaaagcagcaccgagagaaagtggccgagctgaaaggcgcgaaggaagccagccagggttcgtccgccagttcagcgcctcattccgtcaagaggaaagcgccggacgcagacgaccaagatgtcaagagagcgaaggccaccttggtgcctcaggtacagccctccacatctgcgtggaccaccaactttgacaaaataggaaaggagttcattagagcgactcccagtaagccttcaggactcagtttactccccgattatgaagatgaggaggaggaggaagaggaggaggaaggagatggagaaagaaaaaggggggacgccagcaagccgctctccgacgcacagggcaaggagcactcagtttcctcttcacgggaggtaacaagtagtgtgctgccaaacgatttctttagtactaatcctcccaaggcccccataattcctcattcagggtcaattgagaaagcagaaatacatgaaaaagtggtggaaaggagagaaaacaccgcggaagcgttaccggaaggtttttttgacgaccctgaggtagatgcaagagtacgaaaggttgatgctccaaaagatcagatggacaaagagtgggacgaattccaaaaagccatgaggcaggtcaacactatttccgaagccatagttgccgaagaggatgaggagggacggttggaccgccagattggggagatcgatgagcagatagagtgttaccgacgggtggaaaagctacggaatcgccaggatgaaataaaaaataaacttaaagaaatcctgaccataaaagaactgcagaaaaaggaagaagagaatgctgacagcgatgatgagggggaactacaggatttgttgtctcaggattggagggtgaaaggggcattgttatagggttttaaagacccaaggtttctaacagcctctgctgttgtataaaaagtgctgtctctcagtagtatagcggttacttcatgcctcaagatttgggtacctggattgctaaactggattgttgagataaaatgagccagtgagctacagcactttggaaaatttgtgtaacatgtttttgaggtaaagttgtttttgaaatttctgaagtgttatataccaaaatgccaacatttccacgacagacttaactgtataatttcgttgtaaaatctgtaagttgtaaatattgtacatagttaaatctgtattctgttttgaatttttttaattaatagaaagaccaaccggcaaactttcagatgaatgcttactgtggtatttggaatgtatgtatcttctgaaccctacatcaagttgaaaaggtttgttttcttgtttctttggtttttgtatggttttttagaacacttcataaacacataagtcattgtaggttaatcagttctcttagtgtgctttattttaaaaacataagaaaactatatgccaaacatgaccaaaccaatgatggtcagatgtggttgcacatgagagtcacctatgaagcattaaaataattaaagtgtctgaggccttccccttcaataaatctgggattgggcccaggcaactgtgttttttaagcacccaggttattctaatatatgccagggttagagagtaactgccctaaatccagaacccatttatgtttttcaggttttttctttttctttaaataacacattccataaatttgctgtttcttgaatgaaggaaaaaatattatcttttatttatttcatccagccttaaattttgttatttggtggtaaattagggttccttgtttgcaggtcctatctattgtagaaagaatatttaagttgtctttccagcagtaacaattggctcttgctggtcattgatagtttaaatcactccttcctttagagattgaggtactcaaataggaaaagggaattagcagtgttctggagttgaaatgcatacagcatattcaaataaaagtgagcaataataataa

SEQ ID NO: 203970 - DNA, 667 bp, Homo sapiens
  Payload ID: 20226
  Gene Name: zinc finger protein 830
  ENST ID: ENST00000578339
  CDS Start-End: 1-321
aaagatcagatggacaaagagtgggacgaattccaaaaagccatgaggcaggtcaacactatttccgaagccatagttgccgaagaggatgaggagggacggttggaccgccagattggggagatcgatgagcagatagagtgttaccgacgggtggaaaagctacggaatcgccaggatgaaataaaaaataaacttaaagaaatcctgaccataaaagaactgcagaaaaaggaagaagagaatgctgacagcgatgatgagggggaactacaggatttgttgtctcaggattggagggtgaaaggggcattgttatagggttttaaagacccaaggtttctaacagcctctgctgttgtataaaaagtgctgtctctcagtagtatagcggttacttcatgcctcaagatttgggtacctggattgctaaactggattgttgagataaaatgagccagtgagctacagcactttggaaaatttgtgtaacatgtttttgagaaagaccaaccggcaaactttcagatgaatgcttactgtggtatttggaatgtatgtatcttctgaaccctacatcaagttgaaaaggtttgttttcttgtttctttggtttttgtatggttttttagaacacttcataaacacataagtcattgtaggttaa

SEQ ID NO: 203971 - DNA, 9404 bp, Homo sapiens
  Payload ID: 20227
  Gene Name: zinc finger protein 831
  Uniprot ID: Q5JPB2
  ENST ID: ENST00000371030
  CDS Start-End: 1-5034
atggaggttccagaacccacctgccctgcccctcctgcgagggaccagccagctcccactcctggccctccaggggccccaggtggccaggcctcacctcacctgaccctgggccctgtccttctgccgccagagcagggcctggccccccccactgtgttcctgaaggccctgcccatcccactgtaccacacggtgcctcccgggggcctccagccccgcgccccgctagtgacgggcagcctagatgggggcaacgtgcccttcatactcagccctgtgctgcagcctgaagggcctggccccacccaggtggggaagccggcggcccctacgctgacggtgaacatcgtgggcactctgcctgtcctgtcgccgggcctgggccccacgctgggcagcccaggcaaggtgcggaatgcgggcaagtacctgtgtccgcactgtggtcgcgactgcctgaagcccagtgttctagagaagcacatccggtcccacacgggtgagaggcccttcccgtgtgccacctgcggcatcgcctttaagacccagagcaatctctacaagcacaggcggacgcagacgcacctcaacaactcccggctgtcctcagagtccgagggcgccgggggcggcctcctggaggaaggggacaaggccggagagccccccagaccagagggcaggggcgagagcaggtgccaggggatgcacgaaggcgcctcggagagacccctttctccgggtgcccacgtgcccctacttgccaagaacctggatgtgaggaccgaagctgctccctgtccagggtccgcatttgccgacagagaggctccttgggactctgcccccatggcgtcacctgggctcccagcggccagcacacaaccctggcgtaagttgccagagcagaagtcgccgaccgccgggaagccgtgcgccctgcagcggcagcaggcgacggcagcggagaagccctgggatgccaaggcccccgagggccggctgcggaagtgtgagagcaccgactcggggtacctgtcgcgctccgacagcgcggagcagccgcatgcgccctgcagccccctgcacagcctttcggagcacagcgccgagtccgagggggagggcggcccgggcccggggccaggggtcgcaggggccgagcccggggcgcgagaagccggcctggagctggagaagaagcggctggaggagcgcatcgcccagctcatctcccacaaccaggcggtggtggacgatgcccagctggacaacgtgcggccccggaagaccgggctgtccaaacagggcagcatcgacctgcccacgccctacacctacaaggactccttccactttgacatccgcgcgctggagccaggccgtaggagggccccgggccccgtgcgctccacctggacgcccccagacaagtctcggcccctcttcttccactccgtccccactcagctctccaccaccgtggaatgtgtccccgtcaccaggagcaactcgctgcccttcgtcgagggctccaggacgtggctggagcccagggagccccgggacccctggtccaggacgcagaagcctctgagccccaggcccggcccagcccgcctgggctgccgctcgggactaagctcgactgacgttcccagtgggcatccccgggccctggtcagacaggccgcggtggaggacctgccaggcacccccattggcgatgccctggtgcccgcagaggacacagacgcaaagagaactgctgcgcgggaggccatggccggcaagggcagagcgggcggcaggaagtgcggccagagaaggctgaagatgttctcccaggagaagtggcaggtgtacggggatgagacgttcaaaaggatctaccagaaaatgaaagccagtccccatggaggcaagaaagccagggaggtgggaatgggcagtggggcagaactgggctttcctctgcagaaagaggcagcagggagctcaggcacagtccccacccaagacaggaggacccctgtccatgaggacatatccgcaggggcaacgccagagccttggggaaatccaccagccctggaggcctccttggtgactgaacccactaagcatggggagacggtggccaggagaggagacagtgaccgacccagggtggaagaggctgtgtcatcccctgcactgggtggcagagacagtccctgttcaggcagtaggagccccctggtctctccaaatgggaggctggaactggggtggcagatgcccccagcacctggccccctcaaagggggtgatgtagaggctcccaggccagtttggccggaccccaagctggaaggaggtgcccgaggtgtgggggatgttcaggagacctgcctgtgggcccagactgtcctgagatggcccagcaggggctcaggggaggacaagctcccctcagagaggaagaagctgaaagtggaggacctgcacagctggaagcaaccagagcctgtgagcgcagagaccccaggtgggcccacgcagcctgcctctttgtcatcccagaagcaggatgccgatcccggggaggtgccagggggctcaaaggagagtgccaggcaggtgggcgagcctctggagtcctctggagcctccttggctgctgcttctgttgccctgaagagggtggggccaagggacaaggctaccccactgcatcctgcagccccagcccccgcagagcacccctcgctggccaccccacctcaggctcctagagtgctctctgccctggcagataatgccttttcccccaagtacctcctcaggttacctcaggcagagacccccttaccactgcccattccctggggaccaaggcacagccaggactctctctgcagcagtgggtggcctgaagaacgggcatcatttgttgggtcaggactggggacccctctttctcccagcccagcctcaggcccctccccaggtgaggcggacagcatcctggaggaccccagctgttccaggccacaggatgggagaaaaggggcacagttggggggggacaagggggacaggatggccactagcaggccagcagccagggagttgcccatctcagcaccaggggctcccagggaggctacctcctccccgcccactccaacgtgtgaggcacacttagttcaggacatggagggtgacagccaccgtatccatcgcctctgcatgggcagcactttggcaagggccaggctctctggggatgtcctgaatccctgggtacccaactgggagctgggggagcctcctgggaatgccccagaagatccttcttcagggcccctggtgggccccgacccgtgttcccccctccagcctggctccttcctcactgccctcactcggcctcagggtgtgcccccaggctggccagagctggccttgtcttcccactcagggacgtcccggagccacagcacccgcagtccccacagcacccaaaacccctttccctcactgaaggctgagccgcggctcacgtggtgttgcctgagccgcagtgtccctctgcccgcggagcagaaggcaaaggcggcatctgtgtacttggcggtgcactttcctggtagcagcctccgagatgagggtcccaatggccctcctgggagcaatggaggatggacctggacaagccctggagaaggagggccggcgcagatgtccaagttctcctacccaacagtcccaggggtgatgccccagcaccaggtgtctgagccagaatggaagaaaggcctgccttggagggcaaagatgtctcgtgggaacagcaagcagagaaaactgaagatcaaccctaaaaggtacaaagggaatttcttgcagagctgtgttcagctgagagccagtagacttcgcacaccaacctgggtgcgaagaagaagccgccaccctcccgcacttgagggactgaagccatgcaggacccctgggcagacctcttcagaaatagcaggtctgaatctgcaagaggagccatcttgtgccacctcagaatcacctccttgttgtgggaaggaagagaagaaggaaggtgactgcagacaaaccttaggaaccctctctcttggtacaagttcaagaattgtcagggaaatggacaaacgaactgtgaaggatatttctccatctgctggtgagcatggtgactgtactactcacagcactgctgccacatcaggattatctctgcaatctgacacctgcctggcagtggttaatgacgtgcctctaccccctggcaaaggtcttgaccttgggttgctggagactcagctgctggcctcccaggattcagtctcaacagatcccaaaccatacatcttctcagatgctcaaaggccttcttcctttgggtccaaaggaacttttccccaccatgacattgctacctctgtggctgccgtttgtatttctctgccagtgagaacagatcacatagcccaggaaattcacagtgctgaatcacgagaccacagccagactgcagggaggactctgacatcaagctccccagacagcaaagtcacagaagagggcagagcacagaccctcttgccagggagaccttcatctggacaaagaatttcagattcggttccactggagtcaactgaaaaaactcatcttgaaataccagcttcaggaccaagttcagctagttcacaccacaaggaagggagacacaagacgttttttccttccagaggccagtatgggtgtggggaaatgactgtcccctgcccctctttaggaagtgacggtaggaaacgtcaggtatctggattaatcactcggaaagattctgtggttccttctaagccagagcagcccatagaaattcctgaagccccttctaaatccctcaagaagaggagtctggaaggaatgagaaagcaaactcgagtagagttcagtgacaccagcagcgacgatgaagaccgattagttatagaaatatgaagcttccagagaaacatggtgtctggtcaaaaagactgttgacgcttcacaagtaaatgttgtcaggctggcggaagaactaaactctatctgtgaaacacctacagattaggaaagccattttgagttatttacaagccaactccaaccaacttctgacccccaactcagccgcagcgttccccagctccccttgggagtgctctgctcatcttcaaatggtgccaggcagggcagacatggcaaggaagcaaactctgcaaatggtcaacgtgcacagtgactgggccttgactcccagcctcgtcttctgcacctgtcccccactgcctctctgcaatcaaatggcactaaccaagaaagccaccatcaacacatttctccacaagtggaccccacacagtcgaggcaactggctttctccattagtaaactgaggatttgcttccaaggtggagagcacacttgggataattggagtagcttgacaaagagacgggggtgtgaactgggcacaaagatacttctgttcattttggagacaaaattcagatacattaaaaaactgaagcttgttcagagtaattcacgtccttggtggagttgtaaatacacttcaaaatgcctatgatccggtgacatgctgattacttttaaatgttgcacaaatggtcaatgcttatttatggtcagatgatgcaagcacatgctcttgtgcctggtgcgtttgctgtggagatctctgagactgtcggtttttctagttcttgcaaaggaacggtgttaaaagttaatagaactgtctctctgtaatgagtcattttttgagagggaaaaattcacttattttcctctgattcttcttgtcatattgtgctctgagcaatttcaattagagggttacattttagtaatctgtacagcttcaactgatgcctgctcgtcgtgacgggagccttttagatttccttcagaagcttcaaggatacaaaactaattggagttttgacgctgttttacatctcggtaattttattttcggggcttagtgttactttgctgtcaaattaaatcagcctctgtattgtgcacgtcagaactgcacagagaaaattccccagtattccaagccggtgcgcccctgtgcagaagaaaacagatctacgtcagccagcccggggggcaaagcctcagttccactgccttcctctccctctccttccacgggagaggagaaacttaaagaggtttacattgctgcatttcaataaaattttatacttgcttttggtatgattttgtacaatttgaaatttgtagctgagctcttttggtgtaactttgatgtaatgatgttcatatgacatcttgtacttcagagacacagcagcaatgcagagcatctcacacatgtgaatacacttcagtcagtctgtgcctgtgactaagtatggtcaaatttcaagtatcttcatgtgaattttccaattttggtgtttttcatagaaaacttcaatgccagaccagcttccctggttacttagcatatatttgtgaccatttcatatgcactcataaatatccaaggatttcaggcccagccaagaaaaacataagaagggaggtaaaaaggatgttggacattgacttagtgtactttttaaacccaacaaaagcgatgtggtgattatctcccttttcgaaggattcatgccactgtaatgagagaggcagtgtaggcaaatggtctgagccttggatggagattgaagtcctgactttagctgggaaatcttggttaagagtctttctgtaccttagtttccctaagtgagaataagagagttggacaagacgaatgtatctccaggttccaatttttctgagaatggttgatagagaagctgctctctccttaaaatgcatggactcaatggcttgaagatattccccatggggaaccattgccacggaggccttgcatgcaagaagtttgggtggggacagtgaggaactgaaacacaagcaccttccaccaattattgctgtgaagaacctgagcctgaagaagctccatctaattttttccccagagttccagattttagggtgcaatcatccagcctatacatgtggctcatagttcaaaaaattaaaagcaaaaccagaactctccagtaggaatggagaaaacctatctgtaggctgaactggctcctttgtcttaggaggcactggtcaggggaaaaaagctgtcttccagacccctcctttctgggtggctactgtggaatcaacggggtcactggctgtaaatcagtaagtcatagctccaaacagcaccaacttcaggatgatggtggaagctctgtccctataggagccaccgttgccagctgtcacatcccaacctaggtcaaatatggcggaatattgatttcgtctctaactccctgtatctcttacaaaggtaaagcaggtagcgaagccaccttgcttccctggtctttgcctagtggctggcaatgtttacaagtgtaccttactttatatcaacatgaatttgtgaaaaagctgtatgtcaatggattttttaaaaattaaaaatgtattttgaatgaccctaagggagctggctctttaaaagcatcctaaggtaaagattttttttaaatgaagaatctttttataaagcaatgaacaatctctgattttataaatcttaattttcctatgggttttcttaaagtgaaatacaattataagaatacattttaagggtaacattaacaacctagaacccagtttgggttactaaaaataaaatgtcagtattatcaattgataactaccacagttttatactctgcaagtgtgtactgcatgatggttaaggaaaaacaaatttattttagaacaaagcaaaccagagtttaaagatcagggatttccttctttccccagtgctaattttcccagtgttaattttattatatctttaggtaagggtcttaaccaactgatgcctcagtttcttccacagagaatagttagagggatgctgtcatgaactaagggaagggcactgaatttttttttgccaatatcaaaagtgacatttccccatgatgttcaagactcaccaggtttctctctccacctgtacctacacccagctagatcttgtcgttaaagatgtatggagggaagaggtttcaatccttccctccttggcaacctacattgttaagtgactcaaagtcatgtgatttttggtggacaactggaatcctccttcttgtaaaacacattgaaaaacagctcatctctcctgttaggcttaacccttgagatttgagacaaagctaataatcccctttggttcacatctcacagtaaccaggagaacctatggttcatttgccaagtgattaaaaaaaaagatggaggagggtgtctctgaattttaatggaaacactgccaatagcatggtgggtaacctagggcaagacagactttttcttcctgaaatcactcttctaaagctgagaccggaagaggaaccttgcagaagtgcactgtgaccacagttcttggcatgaaagataaacaatttgcagtctcatgccaaaaagtatttccttgcatttacattcattacttagaatgatcacattattcatttttttccccagcacagaaatttgcattttgcacagaatttgcctggtgcagcagatctttatagttatggaaactgtcatcattatcggaatgtgctgctgctcaactccccagacataatttaatatggtgaggagaatatgacctgcctggctctatgggtgatcatatttctactgctgcagcaagctgggcttgtgtatttttcctcacttcagttgttcttcccatagttcatgtagggaggcactttggcttttgaaacactacatttctcaatatttaagcacaatttattgtccttatttttcagaacccattaaatataagggtcagaacctagaaaatcttatgtgctggatttctaccctgtatgattcttttcatccatgctttgcacttacgtaggaatatacataatttggtctgaagaagtataggaacagttgagcacattacttcaccactggaagaataggaaccagggaaaaacatcagcctctgccacttggagcactagaggatgacggaatgtcttgtatatgcggtcaactgttcaggatttactactcaattggttgttcacaatcagggaaatgattggcttcttggttgtttgttgaactttctttctttatatggttaaattattttgttttgataaaaataaaacttaaaatgcaaa

SEQ ID NO: 203972 - DNA, 3450 bp, Homo sapiens
  Payload ID: 20228
  Gene Name: zinc finger protein 835
  Uniprot ID: Q9Y2P0
  ENST ID: ENST00000537055
  CDS Start-End: 233-1846
ggcctggtgcgcgggctcctccgcagcagcagaagtcttgaccttagctcgtctaaggaaggaggcaccagggtctgcgttggcccaggaggacccgagactgagtagaagcggagccgactgcaccaggctaggagggggccggccagcgcgttcgaaggtgataccgggaggcgagagcaacgacccagagaaaagatgtgagatcaagacagcagcccagggatcgaggatggagggactcttgagcgtcgccctccagggcgcagagttggaaggaaactggaaacacgagggccaggttgaggacctgcaggaaaaccaggaaagctgtccagagccagaggccgtggcctgcaagggagaccctgctggggacagcatgcaggaacgcgatgaattcagccgaatcccaagaaccatatcgagccctgctgctacccaagccagtgtccccgacgacagcagttcccggaggtgcagcgcgcctggggagagcccgaaggagaggcatcctgacagccgccagcgggagagaggtggaggccccaagaagccgtggaaatgcggggactgcgggaaggccttcagctactgttcagcgttcatcttacaccagagaatccacaccggggagaagccatttgcgtgccccgagtgcggcaaggccttcagccagagcgtgcacctgaccctgcaccagcgcacgcacacgggcgagaagccctacgcctgccacgagtgcggcaaggccttcagccagggctcgtacctggcgtcccactggcgcacgcacacgggcgagaagccgcaccgctgcgccgactgcggcaaggccttcacgcgcgtcacgcacctgacccagcaccggcgcgtgcacacgggcgagcggccctacgcgtgcgcccagtgcgccaaggcgttccgcaaccgctcgtccctgatagagcaccagcgcatccacaccggtgagaagccctacgagtgctccgcgtgcgccaaggccttccgcttctcctcagcgctcatccgccaccagcgcatccacacggaggagaagccctaccgctgcggccagtgcgccaaggccttcgcgcagatcgcgcacctgacccagcaccggcgcgtgcacacgggcgagaagccctacacgtgccaggactgcggcgcgctcttcagccagagcgcctctctggccgagcaccggcgcatccacacaggcgagaagccctacgcgtgcggccagtgcgccaaggccttcacccaggtgtcgcacctgacgcagcaccagcgcacgcacaccggagagcggccttacccctgccacgactgcggcaagcgcttcagcaaccgctcccacctcctccagcaccgcctcgtgcacaccggtgagcggccctacaggtgcctgcaatgcggggccgccttcagccacgtgtcctcgcttatagagcaccagaagatccacaccggagagcggccctacaagtgcggcgagtgcggcaaagctttcagccagggctcctcgctcgccctgcaccagcgcacgcacacgggcgagcggccctacacctgccccgagtgcggcaaggccttcagcaaccgctcctacctgatccagcaccacatcgtgcacaccggggagaagccctacgagtgcagcggctgcgggaaggccttcagcttctcctccgcgctcatccgacaccagaggacgcatgcagacagttcgggacgcctttgcccagctcccacgcctgactcaacacctgggctctcacagggaggagaaacctgtcaacaggggtgccctggcagaaacccgcgtggaccagcagaagattaagagctgagggcctcctttccaacctcacaatgctatgggggagatactgtgttatccccgacgcttcctgtgaggaaaccgaggctcagagaagcttgttaacttgcctgagggcacacagtggggaagacacagggctaagactgtacctcacatctgccagactcccctgcggtcttcctggtgcaaaattataaatggggcacgggcaagtagacctgcagaaacacctatggctggcctttaatttctttctttttttctttgagacagtgtctctctctgtcacccaggctagagtgcagtggagcgatctcggctcactgaaacttctgcctcccgggtacaagtgattctcctgcctcaacctcccgagtagttaaaattacaggagtctggctaatttttttttttttttttttctgagacggagtcttgctctgtcgcccaggctggagtgcagtgatgcaatctcggctcactgcaacctccgcctcccgggttcaagtgattcccctacctcagcctcccgagtagctgggactacaggcgcccggccaccacacccggactagtttttttgtattttagtagaggcggggtttcaccatgttggctaggatggtctcgatctcctgacttcgttatccacccgcctcggcctcccaaagtgctgggattacaggcatgagccaccgcgcccagcctaatttttgtatttttagtagaggcagggtttcaccatgttggccaggctgtctcgaactcctaacatcaggcgatctgcctgccttggcatcccaaagtgctgggactacaggcctgagctacggtgcctggccagctggccttttcattgttgattttattgagtaagcccttgctcagtaaatttaattgaattaaagtgaataaaaggtttggtttctttggccaagttggcatatttactaaaggagcagagtctgaagaagaaatctggattcactaagatagaaatagtgcttagagaaaatgagcaggagaaatctagagctgaaagttattctagaagaagggagtgcttctcctctacaaaagatttttagagtgggcctagtctttttttcagtatgaggaaacacctacccatctccaccatttttccccctaactcaaagacctgactttaatgcttgtatcagtcagctcttgctgtgtaacaaaccatccagccctcatttatccatttactatttctcatgcatctggaggtcagctgctggttctgttggtctggaccaggcttggtctggacctggaccaggagggctcagctgggccaatttgatcttcttctcctgactcacatctcacctgggtgtgttctcagggaggtggcaggagtctgagagggagtggacacacaggcatgctttcaagtctctgatattgtcacatttgcatctagtcccacaggccaaagcaagcctcctagccaagcctaggatcagcacaggaagagccttcctaagcatgtggtcccagggaagggtgaaaagtaggagttatgaacgtaatccacctactacaatgttgaattaaagttataatctcataacttc

SEQ ID NO: 203973 - DNA, 507 bp, Homo sapiens
  Payload ID: 20228
  Gene Name: zinc finger protein 835
  ENST ID: ENST00000601659
  CDS Start-End: 231-507
gatgcgcaggcgcagtccaccccggcctggtgcgcgggctcctccgcagcagcagaagtcttgaccttagctcgtctaaggaaggaggcaccagggtctgcgttggcccaggaggacccgagactgagtagaagcggagccgactgcaccaggctaggagggggccggccagcgcgttcgaagacccagagaaaagatgtgagatcaagacagcagcccagggatcgaggatggagggactcttgagcgtcgccctccagggcgcagagttggaaggaaactggaaacacgagggccaggttgaggacctgcaggaaaaccaggaaagctgtccagagccagaggccgtggcctgcaagggagaccctgctggggacagcatgcaggaacgcgatgaattcagccgaatcccaagaaccatatcgagccctgctgctacccaagccagtgtccccgacgacagcagttcccggaggtgcagcgcgcctggggagagcccgaaggaga

SEQ ID NO: 203974 - DNA, 2811 bp, Homo sapiens
  Payload ID: 20229
  Gene Name: zinc finger protein 836
  ENST ID: ENST00000322146
  CDS Start-End: 1-2811
ttatgtatagttcagggacctttgacattcagggatgtagccatagaattctctcaggaggagtggaaatccctggaccctgtgcagaaagctttgtactgggatgtgatgttggagaactacaggaacctggtcttcctgggtatccttcctaaatgtatgaccaaggaattaccaccaatagggaacagtaatacaggagaaaaatgccaaacagtgacgctggaaagacatgaatgttatgatgttgaaaatttttacttaagggaaatccagaaaaatctacaggaccttgagtttcaatggaaagatggtgaaataaattataaagaagtgccaatgacctataaaaacaatcttaatggtaaaagaggtcaacatagtcaagaggatgtagaaaacaaatgtattgaaaatcagcttacattaagctttcagtcacgtctgactgaactgcagaaatttcaaactgaagggaaaatttatgagtgtaaccaatctgagaagacagttaataacagttccctagtttcaccacttcaaagaattcttcctagtgtccaaaccaacatttctaaaaaatatgagaatgagtttttgcagctgtcattacccacccaacttgagaaaacacacattagggaaaaaccttatatgtgtaaagggtgtggcaaagcctttagagtgtcttcaagtcttattaaccatcagatggtacatactacagagaaaccttacaaatgcaatgaatgtggcaaagcctttcatcggggctcactactaactatacatcagatagtccatacaagggggaagccatatcaatgtggtgtatgtggcaagatcttcagacaaaattcagatcttgtaaatcaccggagaagtcacactggagagaaaccgtacaaatgtaatgaatgtggcaagtcctttagtcaaagttataaccttgcaatacatcagagaattcacactggagagaaaccttacaaatgtaatgagtgtgggaaaaccttcaaacaaggctcatgcctcactacacatcagataatccatacaggagagaaaccatatcaatgtgatatatgtggcaaggtcttcaggcagaattctaatcttgtaaatcaccagagaatccacactggagagaaaccatacaaatgcaacatatgtggaaagtcctttagtcaaagttccaacctggcaactcatcagacagttcatagtggaaacaaaccttacaaatgtgatgagtgtggcaaaacctttaaacggagctccagcctcactacacatcagataatccatacaggagagaaaccatatacatgtgatgtatgcgacaaggtcttcagtcaacgttcacaacttgcaaggcaccagagaagtcatactggagagaaaccttacaaatgcaatgaatgtggcaaggtcttcagtcagacttcacatcttgtggggcatcggagaattcatactggagagaaaccttacaaatgtgataaatgtggtaaagcctttaaacagggctcattactcactcgacataagataattcataccagagagaaacgttaccaatgcggtgaatgtggaaaggtctttagtgaaaattcatgccttgtaagacatttaagaattcatactggggagcaaccttacaaatgtaatgtgtgtggcaaggtcttcaattacagtggaaacctttcaattcataagagaatacatacgggagagaaacctttccaatgtaatgaatgtggcacagtcttcaggaactactcatgcctagcacgtcatctaagaattcatactgggcagaaaccttacaaatgtaatgtgtgtggcaaggtcttcaatgacagtggaaacctttcaaatcataagagaattcatactggagagaagccgtttcaatgtaacgaatgcggcaaggttttcagttactactcatgcctagcacgtcatcggaaaattcataccggagagaaaccttacaaatgtaatgattgtggcaaagcctatactcagcgttcaagcctcactaaacatctgataattcatactggagagaaaccttacaattgtaatgagtttggaggggcatttatccaaagttcaaaacttgcaagatatcacagaaatcctactggggagaaaccacacaaatgtagccattgtggtagaacttttagtcatataacaggcctgacgtaccatcagagaaggcatactggagagatgccatacaaatgtattgaatgtggccaggtctttaattccacttcgaaccttgcaaggcatcggagaattcacactggagagaaaccttacaaatgtaatgaatgtggcaaggtctttcgtcatcaatcaacactagcacgtcatcggagtattcatactggagagaaaccttacgtgtgtaatgagtgtggcaaagcctttagagtgcgttcaattctggttaatcatcagaaaatgcatactggggacaaaccttacaaatgtaatgaatgtggtaaagcttttattgaaaggtcaaagctggtgtaccatcaaagaaatcacactggagagaagccatacaaatgtattgaatgtggcaaggcctttgggcggttttcttgcctcaacaaacaccaaatgattcattctggagaaaaaccttataaatgtaatgagtgtggcaaatctttcattagtcgctcaggcctcactaaacatcagacaaaacatactgcagagagtcttaaaacaaaattcaatgtggaaaagcctttagatgttctcctaacttctgggttcaaataa

SEQ ID NO: 203975 - DNA, 558 bp, Homo sapiens
  Payload ID: 20229
  Gene Name: zinc finger protein 836
  ENST ID: ENST00000596428
  CDS Start-End: 242-558
agagtgggaacaaaggaggtgtaacagggtcttgctctgtcagactagagtacagtgccatgatctccgctcactgcagcctcaacctcctgggctcaagcagtctttctgcctcagagtgctgggattacagacgggagccaccacgccaggcctacgagatttgacttgtaaagaattaattatattgactgagagagaagcccagaagaggaagaagaggaaagaaaaggagtcagggatggctcttacacagggacctttgacattcagggatgtagccatagaattctctcaggaggagtggaaatccctggaccctgtgcagaaagctttgtactgggatgtgatgttggagaactacaggaacctggtcttcctgggtatccttcctaaatgtatgaccaaggaattaccaccaatagggaacagtaatacaggagaaaaatgccaaacagtgacgctggaaagacatgaatgttatgatgttgaaaatttttacttaagggaaatccagaaaaatctacaggaccttgagtttcaatggaaagatggtga

SEQ ID NO: 203976 - DNA, 3209 bp, Homo sapiens
  Payload ID: 20229
  Gene Name: zinc finger protein 836
  Uniprot ID: Q6ZNA1
  ENST ID: ENST00000597252
  CDS Start-End: 375-3185
agcgctgcgcgtcagtttccgtctacctggactaaacatttgcttcgccccgtctgcctgaatcgaacgtgcacttggcagtcttcccttgtccatacccgtttcctggggatcgctacggaccttaaaataccagcaacagccccttcgccccaagtaaggtcttgctctgtcagactagagtacagtgccatgatctccgctcactgcagcctcaacctcctgggctcaagcagtctttctgcctcagagtgctgggattacagacgggagccaccacgccaggcctacgagatttgacttgtaaagaattaattatattgactgagagagaagcccagaagaggaagaagaggaaagaaaaggagtcagggatggctcttacacagggacctttgacattcagggatgtagccatagaattctctcaggaggagtggaaatccctggaccctgtgcagaaagctttgtactgggatgtgatgttggagaactacaggaacctggtcttcctgggtatccttcctaaatgtatgaccaaggaattaccaccaatagggaacagtaatacaggagaaaaatgccaaacagtgacgctggaaagacatgaatgttatgatgttgaaaatttttacttaagggaaatccagaaaaatctacaggaccttgagtttcaatggaaagatggtgaaataaattataaagaagtgccaatgacctataaaaacaatcttaatggtaaaagaggtcaacatagtcaagaggatgtagaaaacaaatgtattgaaaatcagcttacattaagctttcagtcacgtctgactgaactgcagaaatttcaaactgaagggaaaatttatgagtgtaaccaatctgagaagacagttaataacagttccctagtttcaccacttcaaagaattcttcctagtgtccaaaccaacatttctaaaaaatatgagaatgagtttttgcagctgtcattacccacccaacttgagaaaacacacattagggaaaaaccttatatgtgtaaagggtgtggcaaagcctttagagtgtcttcaagtcttattaaccatcagatggtacatactacagagaaaccttacaaatgcaatgaatgtggcaaagcctttcatcggggctcactactaactatacatcagatagtccatacaagggggaagccatatcaatgtggtgtatgtggcaagatcttcagacaaaattcagatcttgtaaatcaccggagaagtcacactggagagaaaccgtacaaatgtaatgaatgtggcaagtcctttagtcaaagttataaccttgcaatacatcagagaattcacactggagagaaaccttacaaatgtaatgagtgtgggaaaaccttcaaacaaggctcatgcctcactacacatcagataatccatacaggagagaaaccatatcaatgtgatatatgtggcaaggtcttcaggcagaattctaatcttgtaaatcaccagagaatccacactggagagaaaccatacaaatgcaacatatgtggaaagtcctttagtcaaagttccaacctggcaactcatcagacagttcatagtggaaacaaaccttacaaatgtgatgagtgtggcaaaacctttaaacggagctccagcctcactacacatcagataatccatacaggagagaaaccatatacatgtgatgtatgcgacaaggtcttcagtcaacgttcacaacttgcaaggcaccagagaagtcatactggagagaaaccttacaaatgcaatgaatgtggcaaggtcttcagtcagacttcacatcttgtggggcatcggagaattcatactggagagaaaccttacaaatgtgataaatgtggtaaagcctttaaacagggctcattactcactcgacataagataattcataccagagagaaacgttaccaatgcggtgaatgtggaaaggtctttagtgaaaattcatgccttgtaagacatttaagaattcatactggggagcaaccttacaaatgtaatgtgtgtggcaaggtcttcaattacagtggaaacctttcaattcataagagaatacatacgggagagaaacctttccaatgtaatgaatgtggcacagtcttcaggaactactcatgcctagcacgtcatctaagaattcatactgggcagaaaccttacaaatgtaatgtgtgtggcaaggtcttcaatgacagtggaaacctttcaaatcataagagaattcatactggagagaagccgtttcaatgtaacgaatgcggcaaggttttcagttactactcatgcctagcacgtcatcggaaaattcataccggagagaaaccttacaaatgtaatgattgtggcaaagcctatactcagcgttcaagcctcactaaacatctgataattcatactggagagaaaccttacaattgtaatgagtttggaggggcatttatccaaagttcaaaacttgcaagatatcacagaaatcctactggggagaaaccacacaaatgtagccattgtggtagaacttttagtcatataacaggcctgacgtaccatcagagaaggcatactggagagatgccatacaaatgtattgaatgtggccaggtctttaattccacttcgaaccttgcaaggcatcggagaattcacactggagagaaaccttacaaatgtaatgaatgtggcaaggtctttcgtcatcaatcaacactagcacgtcatcggagtattcatactggagagaaaccttacgtgtgtaatgagtgtggcaaagcctttagagtgcgttcaattctggttaatcatcagaaaatgcatactggggacaaaccttacaaatgtaatgaatgtggtaaagcttttattgaaaggtcaaagctggtgtaccatcaaagaaatcacactggagagaagccatacaaatgtattgaatgtggcaaggcctttgggcggttttcttgcctcaacaaacaccaaatgattcattctggagaaaaaccttataaatgtaatgagtgtggcaaatctttcattagtcgctcaggcctcactaaacatcagacaaaacatactgcagagagtcttaaaacaaaattcaatgtggaaaagcctttagatgttctcctaacttctgggttcaaataattcatacttattgatatagcttgt

SEQ ID NO: 203977 - DNA, 612 bp, Homo sapiens
  Payload ID: 20229
  Gene Name: zinc finger protein 836
  ENST ID: ENST00000599618
  CDS Start-End: 1-93
aaacatcagacaaaacatactgcagagagtcttaaaacaaaattcaatgtggaaaagcctttagatgttctcctaacttctgggttcaaataattcatacttattgatatagcttgtatatttgtcacttccgtctgaaatctcatgtggaattttaatcccctttattggaggtggggcctggtgggagatgattggatcacaggggtggatttctcaagaatggtttagcaccacccgctttttgctcttcttgggatagtgagttctggtgagatcttgtttttttgtttgttttgcttttttgagacggagtctctctctgtcgccaggctggaatgcagttgcagtgagccaagatcgtgccagtgcactccagcctgggtgacagcgagaccctgtctccagaaaaaaaaaaaaaaaaaaaaaaaagtgtatggaactttcctctctcttgctcctattcttgccatgtgacatgcccactcccctttttccttccaccatgattttaacattcctgaggcttcctcggaaggtgagcagatgccagcaccatgtttcctgtaaagcctgcagaactgtgagtcaattaaacttctttataaatta

SEQ ID NO: 203978 - DNA, 808 bp, Homo sapiens
  Payload ID: 20229
  Gene Name: zinc finger protein 836
  ENST ID: ENST00000597065
  CDS Start-End: 523-789
agggttcccaaatctggccagtctttctgccctttcccttgcgggtcgcaccccgcccaggcccctctcccgccccaggtctctcagtcttttttctcagggcgtgtagcttcctgcacacccggaagcagatcgcgcggggaaaagatcacagcgctgcgcgtcagtttccgtctacctggactaaacatttgcttcgccccgtctgcctgaatcgaacgtgcacttggcagtcttcccttgtccatacccgtttcctggggatcgctacggaccttaaaataccagcaacagccccttcgccccaaggtcttgctctgtcagactagagtacagtgccatgatctccgctcactgcagcctcaacctcctgggctcaagcagtctttctgcctcagagtgctgggattacagacgggagccaccacgccaggcctacgagatttgacttgtaaagaattaattatattgactgagagagaagcccagaagaggaagaagaggaaagaaaaggagtcagggatggctcttacacagggacctttgacattcagggatgtagccatagaattctctcaggaggagtggaaatccctggaccctgtgcagaaagctttgtactgggatgtgatgttggagaactacaggaacctggtcttcctgggtaaggataattttgctctagaagttaagatctgccctcgtgtatttttgtattttctctgttgtctttcttgggagcccttccattatttgactgagactgaagccttgttgactcacaaataaaaagcttcataatgctgca

SEQ ID NO: 203979 - DNA, 2038 bp, Homo sapiens
  Payload ID: 20230
  Gene Name: zinc finger protein 837
  Uniprot ID: Q96EG3
  ENST ID: ENST00000427624
  CDS Start-End: 324-1919
ggcggcccggaggtggcgggaggacggctccgcgctgcatgcggggcggggaccagggacccgtgcgggccgcctccagagaatgaggctgccagccttgagagcaccaccgttacctggttgaagaggggaggggaagtccagcattggcctctgcagcgtggatctcccggccaggctctcagctgtcaggtgagtctcacctcacacctctcagaagacatggacaatggcagtgaatggagccaggaggacccggagtgtcggcttgccactgagaaacggagggcaggaatcctacaaccagaactctgcgccccaggatggaggctccagcccagaaggctgggcagggaggactccccaaggccgatgcccagggtgcctccggggcccgggagaagaggcccgaggagccgaggcccctcgaagaggaccgagctgggagccgccccactcaaaagggggacctgcgtggagcggcgggcggtaggacgactcccccaggcgggggctcccggggctgcagcctcggggtgagccccggcccggggacccggcacagcgccgggaccagacccctcgtgcgggagccgtgcggccccacctcttctcagaaccctgagctggttatccccgaggggctgcaagcccgggagggcccctgtaggagcccagcgcgtggcggggactgcagcaggaactcctgcctggcgtggcatcgcggggcgcccgctggggagacgccacccgtgtgtgacccctgtccggagcggatccagaaccacccccggactcaactgtgtgaggtccacacggactgttggccgtgccaaccagggactggcgctccgacctgcccgaggaccccaaagccgacctcccgcgggaggaaccccttggtggagcagccccgggcttgcgcgtgcggcgaggcctttgcgtggagggccctgcggatcccccaggagaggctgcaggcgacggaggagccccgtccgtgtgcccggtgcgggaagcgcttccgccccaaccagcagcagcaggcgggcaagagtcccccagtgtgtcctgagtgcggccaaacctcgcgacctcgccctattgtccccgaccccccggcccagcgactgtacgcttgcgacgagtgcggcaaggccttcacgcgcacctccagcctgctgcagcaccagcgcatccacacgggcgagcggccctacgagtgcgccgagtgcggcaaggccttcgtgcgctgctccggcctgtaccgccaccagaagacgcactcggccgagcgccaccggcgtggccccgtcctggcgcggcgcgccttccggctggggtgcccgccctgcggggactacagcgagcggagtccccgacgggggtcgggagccggggagaagccgtacgagtgcgccgactgcgccaaggccttcgggctgttctcgcacctcgtggagcaccggcgcgtgcacaccggcgagaagccctacgcgtgccccgagtgcggcaaggccttcaaccagcgctcgaacctgagccggcaccagcgcactcacagcagcgccaagccctacgcgtgcccactgtgcgaaaaggccttcaagggccgctcgggcctggtgcaacaccagcgcgcgcacaccggcgagcggccctatggctgctccgagtgcggaaagaccttccgcggctgctccgagctgcgccagcacgagcgcctgcactcgggcgagaagccctacatctgccgcgactgcggcaaggccttcgtgcgcaactgcagcctggtgcgccacctgcgcacgcacacgggcgagcggccctacgcgtgcggagattgcggccgcgccttcagccaacgctccaacctcaacgagcaccggaagcggcacgggggccgcgccgcgccttgactgcagggagccgagagtcgacgcgtcgcccaagcgaaccctgcgtcgaggaggggcctttgtcccggaaaacccaccaacgtttgtaactttgattaaacttcactttgtacacatgg

SEQ ID NO: 203980 - DNA, 1969 bp, Homo sapiens
  Payload ID: 20230
  Gene Name: zinc finger protein 837
  Uniprot ID: Q96EG3
  ENST ID: ENST00000597582
  CDS Start-End: 260-1855
cgcctgcgcttgctgtggcccgggtccctcagtgccgcggcggcccggaggtggcgggaggacggctccgcgctgcatgcggggcggggaccagggacccgtgcgggccgcctccagagaatgaggctgccagccttgagagcaccaccgttacctggttgaagaggggaggggaagtccagcattggcctctgcagcgtggatctcccggccaggctctcagctgtcagatcctacaaccagaactctgcgccccaggatggaggctccagcccagaaggctgggcagggaggactccccaaggccgatgcccagggtgcctccggggcccgggagaagaggcccgaggagccgaggcccctcgaagaggaccgagctgggagccgccccactcaaaagggggacctgcgtggagcggcgggcggtaggacgactcccccaggcgggggctcccggggctgcagcctcggggtgagccccggcccggggacccggcacagcgccgggaccagacccctcgtgcgggagccgtgcggccccacctcttctcagaaccctgagctggttatccccgaggggctgcaagcccgggagggcccctgtaggagcccagcgcgtggcggggactgcagcaggaactcctgcctggcgtggcatcgcggggcgcccgctggggagacgccacccgtgtgtgacccctgtccggagcggatccagaaccacccccggactcaactgtgtgaggtccacacggactgttggccgtgccaaccagggactggcgctccgacctgcccgaggaccccaaagccgacctcccgcgggaggaaccccttggtggagcagccccgggcttgcgcgtgcggcgaggcctttgcgtggagggccctgcggatcccccaggagaggctgcaggcgacggaggagccccgtccgtgtgcccggtgcgggaagcgcttccgccccaaccagcagcagcaggcgggcaagagtcccccagtgtgtcctgagtgcggccaaacctcgcgacctcgccctattgtccccgaccccccggcccagcgactgtacgcttgcgacgagtgcggcaaggccttcacgcgcacctccagcctgctgcagcaccagcgcatccacacgggcgagcggccctacgagtgcgccgagtgcggcaaggccttcgtgcgctgctccggcctgtaccgccaccagaagacgcactcggccgagcgccaccggcgtggccccgtcctggcgcggcgcgccttccggctggggtgcccgccctgcggggactacagcgagcggagtccccgacgggggtcgggagccggggagaagccgtacgagtgcgccgactgcgccaaggccttcgggctgttctcgcacctcgtggagcaccggcgcgtgcacaccggcgagaagccctacgcgtgccccgagtgcggcaaggccttcaaccagcgctcgaacctgagccggcaccagcgcactcacagcagcgccaagccctacgcgtgcccactgtgcgaaaaggccttcaagggccgctcgggcctggtgcaacaccagcgcgcgcacaccggcgagcggccctatggctgctccgagtgcggaaagaccttccgcggctgctccgagctgcgccagcacgagcgcctgcactcgggcgagaagccctacatctgccgcgactgcggcaaggccttcgtgcgcaactgcagcctggtgcgccacctgcgcacgcacacgggcgagcggccctacgcgtgcggagattgcggccgcgccttcagccaacgctccaacctcaacgagcaccggaagcggcacgggggccgcgccgcgccttgactgcagggagccgagagtcgacgcgtcgcccaagcgaaccctgcgtcgaggaggggcctttgtcccggaaaacccaccaacgtttgtaactttgattaaacttcactttgtaca

SEQ ID NO: 203981 - DNA, 2987 bp, Homo sapiens
  Payload ID: 20231
  Gene Name: zinc finger protein 839
  Uniprot ID: A8K0R7
  ENST ID: ENST00000442396
  CDS Start-End: 16-2799
cccgcctcggccgccatggcggatgcggagccggaggctgggggcggcagcgaggatggcggcggcggcggcggcccggctcctccgggccagagcggcagcgtcgcacgtgtggccccgctgggccccgagcagctgcggcaggtcctggagcaggtgacgaaggcgcagccgccgccgccgccgccccccttcgtgctgcgggacgcggcgcggcggctgcgggacgcggcccaacaggccgccctgcagcggggccggggcaccgagcccccgcgcctgccgcgcctgctcccgccccagcaactagaagccatttgtgtcaaggtaacgtctggagaaacaaaaggtcaggaaaggccaatgctcctaccgaccacaatccagccccaaactgcaagaaagagccagctgccccgggggaattcctgcctggtggggctccatatcgccagccctcagctgctcagggtacagccgcttgtgagaaccgagccacagtcctgcttcctaagtgacttatgccaacctcctgctcaggggtttgtacagagaccactgccagccctccaggtggtccctgcaaagagagtcccagcccccaaggctccagatgaacagggctccatgttgacccctttgtctgcctctgacccgctggcagtaacatctctttcatccagttcagcacatccatttatttccaacttgcatacaagacatactgagaaactaaaaaaatcgttaaaagtaaagacacgttctggacgggtatctcgacctcccaaatataaagctaaagattataagttcataaaaacagaggatctggcggatggtcatctgtcagattctgatgattactcagaactctgtgtggaagaagatgaagatcagagggagaggcacgcactctttgacttatcgagctgctccctgaggcccaaaagctttaagtgtcagacttgtgaaaagtcatatatagggaaggggggactggcccgacattttaaacttaacccaggccacggccagttggaccccgagatggtgctgtctgagaaagccagtggaagcaccctccgggggtgcacggaggaaaggacgctcagcctgacctccctggggctgtccatgccagcggatccatgtgagggaggggcccgctcctgcttggtgacagagtcagcacgcggtggcctgcagaatggtcagtctgtagacgttgaagagacattgccatctgaaccagaaaatggagctcttttgcgatcagagagataccaaggacctagaagacgcgcatgctcagagacccttgcagagtcccgcacagctgtcctccagcagagaagagctgctcagctacctggtggccctgctgcggcaggggagcagagggcgtcgccaagcaaagccaggctcaaggagttcctccagcagtgtgaccgggaggatctggtggaattggctctgcctcagctggctcaggttgtgaccgtgtatgagtttcttctgatgaaggttgaaaaagatcatctagcaaagccttttttcccagctatatataaggaatttgaagagttgcataaaatggttaagaaaatgtgccaagattacctcagtagttctggtctgtgttcccaggagaccctggaaataaacaatgataaggttgctgagtcattaggaatcacagaattcctacggaagaaagaaatacacccagacaaccttggacccaagcacctcagccgagacatggatggggagcagctagagggagctagcagcgagaagagggaacgtgaggctgcggaggagggactggcctcagtgaaaaggcccagaagagaagccctgtccaacgataccactgaatctcttgctgccaacagcagaggccgggagaagcccaggcccttgcatgctttggccgctggtttttcccctccagtaaatgtgactgtctctccccgttctgaagaaagccatacaacgacggtttctggtggcaatgggagcgtgttccaggcgggcccgcagcttcaggcactggctaacttagaagccaggagggggtctataggtgctgctctctcatcccgggatgtcagtgggctgcctgtttatgctcagtcaggagagcctaggaggctgacccaggcacaggtggcagcgtttcctggagagaatgctttggaacactcttcagaccaggacacctgggacagcctgaggagcccgggtttctgcagccctttgtcatctggtggtggagcagagtccctgccgcctggggggcctggacatgcagaggcaggacacctcggcaaggtttgtgacttccacctgaaccaccagcagcccagccccaccagcgtcctgcctacagaggtggcagcccctccgcttgagaaaattttgtctgtggatagcgtggcagtggactgtgcctacaggactgtgcccaagccagggcctcagcctggcccacatggatcactattgactgaagggtgtctcagaagcctttcgggggacttgaaccggttcccctgtgggatggaggtgcactctggccagagagaactggagagcgtggttgctgtcggcgaagccatggcttttgaaatttccaatgggagccatgagttactgtctcagggacagaagcagatttttattcagacttccgatgggcttatcttgtcccctccaggtacaatagtgtctcaggaggaggacattgtcacagtgactgatgcagaggggcgtgcctgcggatgggcccgctagaaggagttcctctagaagctgtggagtcggtcgtcaccgtggagccagagccctcacagtgaagtggagtcagatcctagattcgtctgattttatccagagaaggtctatggcaagcaatgtatatttttctaatgtgaatattgcacagatgaaccttttatttataaagaataatgtctttctgc

SEQ ID NO: 203982 - DNA, 931 bp, Homo sapiens
  Payload ID: 20231
  Gene Name: zinc finger protein 839
  ENST ID: ENST00000558490
  CDS Start-End: 1-743
agagataccaaggacctagaagacgcgcatgctcagagacccttgcagagtcccgcacagctgtcctccagcagagaagagctgctcagctacctggtggccctgctgcggcaggggagcagagggcgtcgccaagcaaagccaggctcaaggagttcctccagcagtgtgaccgggaggatctggtggaattggctctgcctcagctggctcaggttgtgaccgtgtatgagtttcttctgatgaaggttgaaaaagatcatctagcaaagccttttttcccagctatatataaggaatttgaagagttgcataaaatggttaagaaaatgtgccaagattacctcagtagttctggtctgtgttcccaggagaccctggaaataaacaatgataaggttgctgagtcattaggaatcacagaattcctacggaagaaagaaatacacccagacaaccttggacccaagcacctcagccgagacatggatggggagcagctagagggagctagcagcgagaagagggaacgtgaggctgcggaggagggactggcctcagtgaaaaggcccagaagagaagccctgtccaacgataccactgaatctcttgctgccaacagcagaggccgggagaagcccaggcccttgcatgctttggccgctggtacaatagtgtctcaggaggaggacattgtcacagtgactgatgcagaggggcgtgcctgcggatgggcccgctagaaggagttcctctagaagctgtggagtcggtcgtcaccgtggagccagagccctcacagtgaagtggagtcagatcctagattcgtctgattttatccagagaaggtctatggcaagcaatgtatatttttctaatgtgaatattgcacagatgaaccttttatttataaagaataatgtctttctgc

SEQ ID NO: 203983 - DNA, 583 bp, Homo sapiens
  Payload ID: 20231
  Gene Name: zinc finger protein 839
  ENST ID: ENST00000560568
  CDS Start-End: 413-583
tttcaggtgtgagccacggcgcccggccactaaaaggtttttatggggtatataaagcatgattgttttattttacttttgggtgtgcaacactgtctagaatggtcagtctgtagacgttgaagagacattgccatctgaaccagaaaatggagctcttttgcgatcagagagataccaaggacctagaagacgcgcatgctcagagacccttgcagagtcccgcacagctgtcctccagcagagaagagctgctcagctacctggtggccctgctgcggcaggggagcagagggcgtcgccaagcaaagccaggctcaaggagttcctccagcagtgtgaccgggaggatctggtggaattggctctgcctcagctggctcaggttgtgaccgtgtatgagtttcttctgatgaaggttgaaaaagatcatctagcaaagccttttttcccagctatatataaggaatttgaagagttgcataaaatggttaagaaaatgtgccaagattacctcagtagttctggtctgtgttcccaggagaccctggaaataaacaatgataaggttgctgagtcatta

SEQ ID NO: 203984 - DNA, 2905 bp, Homo sapiens
  Payload ID: 20231
  Gene Name: zinc finger protein 839
  Uniprot ID: A8K0R7
  ENST ID: ENST00000559185
  CDS Start-End: 282-2717
gaaacactctcgttaacaattcaaactgtggtcccctcccagatgtataaatccaaatgtttaggggtgggcacagtactctgcatctccagacagcatcctccgctgattcggatgcatgatgacgtcagaacacttggatattgtggtaacttttgggccaggggctctgaaaccccgaagacctccccctgggagatccgggacagctcccagagaagcaactagaagccatttgtgtcaaggtaacgtctggagaaacaaaaggtcaggaaaggccaatgctcctaccgaccacaatccagccccaaactgcaagaaagagccagctgccccgggggaattcctgcctggtggggctccatatcgccagccctcagctgctcagggtacagccgcttgtgagaaccgagccacagtcctgcttcctaagtgacttatgccaacctcctgctcaggggtttgtacagagaccactgccagccctccaggtggtccctgcaaagagagtcccagcccccaaggctccagatgaacagggctccatgttgacccctttgtctgcctctgacccgctggcagtaacatctctttcatccagttcagcacatccatttatttccaacttgcatacaagacatactgagaaactaaaaaaatcgttaaaagtaaagacacgttctggacgggtatctcgacctcccaaatataaagctaaagattataagttcataaaaacagaggatctggcggatggtcatctgtcagattctgatgattactcagaactctgtgtggaagaagatgaagatcagagggagaggcacgcactctttgacttatcgagctgctccctgaggcccaaaagctttaagtgtcagacttgtgaaaagtcatatatagggaaggggggactggcccgacattttaaacttaacccaggccacggccagttggaccccgagatggtgctgtctgagaaagccagtggaagcaccctccgggggtgcacggaggaaaggacgctcagcctgacctccctggggctgtccatgccagcggatccatgtgagggaggggcccgctcctgcttggtgacagagtcagcacgcggtggcctgcagaatggtcagtctgtagacgttgaagagacattgccatctgaaccagaaaatggagctcttttgcgatcagagagataccaaggacctagaagacgcgcatgctcagagacccttgcagagtcccgcacagctgtcctccagcagagaagagctgctcagctacctggtggccctgctgcggcaggggagcagagggcgtcgccaagcaaagccaggctcaaggagttcctccagcagtgtgaccgggaggatctggtggaattggctctgcctcagctggctcaggttgtgaccgtgtatgagtttcttctgatgaaggttgaaaaagatcatctagcaaagccttttttcccagctatatataaggaatttgaagagttgcataaaatggttaagaaaatgtgccaagattacctcagtagttctggtctgtgttcccaggagaccctggaaataaacaatgataaggttgctgagtcattaggaatcacagaattcctacggaagaaagaaatacacccagacaaccttggacccaagcacctcagccgagacatggatggggagcagctagagggagctagcagcgagaagagggaacgtgaggctgcggaggagggactggcctcagtgaaaaggcccagaagagaagccctgtccaacgataccactgaatctcttgctgccaacagcagaggccgggagaagcccaggcccttgcatgctttggccgctggtttttcccctccagtaaatgtgactgtctctccccgttctgaagaaagccatacaacgacggtttctggtggcaatgggagcgtgttccaggcgggcccgcagcttcaggcactggctaacttagaagccaggagggggtctataggtgctgctctctcatcccgggatgtcagtgggctgcctgtttatgctcagtcaggagagcctaggaggctgacccaggcacaggtggcagcgtttcctggagagaatgctttggaacactcttcagaccaggacacctgggacagcctgaggagcccgggtttctgcagccctttgtcatctggtggtggagcagagtccctgccgcctggggggcctggacatgcagaggcaggacacctcggcaaggtttgtgacttccacctgaaccaccagcagcccagccccaccagcgtcctgcctacagaggtggcagcccctccgcttgagaaaattttgtctgtggatagcgtggcagtggactgtgcctacaggactgtgcccaagccagggcctcagcctggcccacatggatcactattgactgaagggtgtctcagaagcctttcgggggacttgaaccggttcccctgtgggatggaggtgcactctggccagagagaactggagagcgtggttgctgtcggcgaagccatggcttttgaaatttccaatgggagccatgagttactgtctcagggacagaagcagatttttattcagacttccgatgggcttatcttgtcccctccaggtacaatagtgtctcaggaggaggacattgtcacagtgactgatgcagaggggcgtgcctgcggatgggcccgctagaaggagttcctctagaagctgtggagtcggtcgtcaccgtggagccagagccctcacagtgaagtggagtcagatcctagattcgtctgattttatccagagaaggtctatggcaagcaatgtatatttttctaatgtgaatattgcacagatgaaccttttatttataaagaataatgtctttctgc

SEQ ID NO: 203985 - DNA, 1951 bp, Homo sapiens
  Payload ID: 20231
  Gene Name: zinc finger protein 839
  ENST ID: ENST00000561251
  CDS Start-End: 1-1428
ccatgtgagggaggggcccgctcctgcttggtgacagagtcagcacgcggtggcctgcagttcctccagcagtgtgaccgggaggatctggtggaattggctctgcctcagctggctcaggttgtgaccgtgtatgagtttcttctgatgaaggttgaaaaagatcatctagcaaagccttttttcccagctatatataaggaatttgaagagttgcataaaatggttaagaaaatgtgccaagattacctcagtagttctggtctgtgttcccaggagaccctggaaataaacaatgataaggttgctgagtcattaggaatcacagaattcctacggaagaaagaaatacacccagacaaccttggacccaagcacctcagccgagacatggatggggagcagctagagggagctagcagcgagaagagggaacgtgaggctgcggaggagggactggcctcagtgaaaaggcccagaagagaagccctgtccaacgataccactgaatctcttgctgccaacagcagaggccgggagaagcccaggcccttgcatgctttggccgctggtttttcccctccagtaaatgtgactgtctctccccgttctgaagaaagccatacaacgacggtttctggtggcaatgggagcgtgttccaggcgggcccgcagcttcaggcactggctaacttagaagccaggagggggtctataggtgctgctctctcatcccgggatgtcagtgggctgcctgtttatgctcagtcaggagagcctaggaggctgacccaggcacaggtggcagcgtttcctggagagaatgctttggaacactcttcagaccaggacacctgggacagcctgaggagcccgggtttctgcagccctttgtcatctggtggtggagcagagtccctgccgcctggggggcctggacatgcagaggcaggacacctcggcaaggtttgtgacttccacctgaaccaccagcagcccagccccaccagcgtcctgcctacagaggtggcagcccctccgcttgagaaaattttgtctgtggatagcgtggcagtggactgtgcctacaggactgtgcccaagccagggcctcagcctggcccacatggatcactattgactgaagggtgtctcagaagcctttcgggggacttgaaccggttcccctgtgggatggaggtgcactctggccagagagaactggagagcgtggttgctgtcggcgaagccatggcttttgaaatttccaatgggagccatgagttactgtctcagggacagaagcagatttttattcagacttccgatgggcttatcttgtcccctccaggtacaatagtgtctcaggaggaggacattgtcacagtgactgatgcagaggggcgtgcctgcggatgggcccgctagaaggagttcctctagaagctgtggagtcggtcgtcaccgtggagccagagccctcacagtgaagtggagtcagatcctagattcgtctgattttatccagagaaggtctatggcaagcaatgtatatttttctaatgtgaatattgcacagatgaaccttttatttataaagaataatgtctttctgccctgctgtctacatttttctatggagcttgtcataataatagcagatattacctgatcaggaatccctgtggcgcgtctgacgctcatgagtttttcatgatggtgatgagtagcactgcactgtcacctgatgattggccctgctccgtttcccttctctcctgggagatatgctgcttttccaccagacttgctccatactagaagcttcttttgggttcaattaaaaagaaaataagctagtcattctgggcagcattttattgatagaagggggaaaaagtcatttctacttgcatgattttttaaattaaattaaattaaattaatttaa

SEQ ID NO: 203986 - DNA, 2971 bp, Homo sapiens
  Payload ID: 20231
  Gene Name: zinc finger protein 839
  Uniprot ID: A8K0R7
  ENST ID: ENST00000558850
  CDS Start-End: 351-2786
agaatgccattggttaggccttttacttttgtcgttttaaaggacactctggacatccaaccgatgcacatcccacgcccccaccccccacgtttcctgaggctgcgtctggcctggaggaaccgcccagtgaagacaggtgctcgcagatatcaccgcctagtgttccctgggcccacttgcggggaagtcttggaggtgaaaatccaggtctggaatgaatgcattccacagatgcatatggagagctactgcatgcccagcaccattcctaggctgggagcaaaacgcaactagaagccatttgtgtcaaggtaacgtctggagaaacaaaaggtcaggaaaggccaatgctcctaccgaccacaatccagccccaaactgcaagaaagagccagctgccccgggggaattcctgcctggtggggctccatatcgccagccctcagctgctcagggtacagccgcttgtgagaaccgagccacagtcctgcttcctaagtgacttatgccaacctcctgctcaggggtttgtacagagaccactgccagccctccaggtggtccctgcaaagagagtcccagcccccaaggctccagatgaacagggctccatgttgacccctttgtctgcctctgacccgctggcagtaacatctctttcatccagttcagcacatccatttatttccaacttgcatacaagacatactgagaaactaaaaaaatcgttaaaagtaaagacacgttctggacgggtatctcgacctcccaaatataaagctaaagattataagttcataaaaacagaggatctggcggatggtcatctgtcagattctgatgattactcagaactctgtgtggaagaagatgaagatcagagggagaggcacgcactctttgacttatcgagctgctccctgaggcccaaaagctttaagtgtcagacttgtgaaaagtcatatatagggaaggggggactggcccgacattttaaacttaacccaggccacggccagttggaccccgagatggtgctgtctgagaaagccagtggaagcaccctccgggggtgcacggaggaaaggacgctcagcctgacctccctggggctgtccatgccagcggatccatgtgagggaggggcccgctcctgcttggtgacagagtcagcacgcggtggcctgcagaatggtcagtctgtagacgttgaagagacattgccatctgaaccagaaaatggagctcttttgcgatcagagagataccaaggacctagaagacgcgcatgctcagagacccttgcagagtcccgcacagctgtcctccagcagagaagagctgctcagctacctggtggccctgctgcggcaggggagcagagggcgtcgccaagcaaagccaggctcaaggagttcctccagcagtgtgaccgggaggatctggtggaattggctctgcctcagctggctcaggttgtgaccgtgtatgagtttcttctgatgaaggttgaaaaagatcatctagcaaagccttttttcccagctatatataaggaatttgaagagttgcataaaatggttaagaaaatgtgccaagattacctcagtagttctggtctgtgttcccaggagaccctggaaataaacaatgataaggttgctgagtcattaggaatcacagaattcctacggaagaaagaaatacacccagacaaccttggacccaagcacctcagccgagacatggatggggagcagctagagggagctagcagcgagaagagggaacgtgaggctgcggaggagggactggcctcagtgaaaaggcccagaagagaagccctgtccaacgataccactgaatctcttgctgccaacagcagaggccgggagaagcccaggcccttgcatgctttggccgctggtttttcccctccagtaaatgtgactgtctctccccgttctgaagaaagccatacaacgacggtttctggtggcaatgggagcgtgttccaggcgggcccgcagcttcaggcactggctaacttagaagccaggagggggtctataggtgctgctctctcatcccgggatgtcagtgggctgcctgtttatgctcagtcaggagagcctaggaggctgacccaggcacaggtggcagcgtttcctggagagaatgctttggaacactcttcagaccaggacacctgggacagcctgaggagcccgggtttctgcagccctttgtcatctggtggtggagcagagtccctgccgcctggggggcctggacatgcagaggcaggacacctcggcaaggtttgtgacttccacctgaaccaccagcagcccagccccaccagcgtcctgcctacagaggtggcagcccctccgcttgagaaaattttgtctgtggatagcgtggcagtggactgtgcctacaggactgtgcccaagccagggcctcagcctggcccacatggatcactattgactgaagggtgtctcagaagcctttcgggggacttgaaccggttcccctgtgggatggaggtgcactctggccagagagaactggagagcgtggttgctgtcggcgaagccatggcttttgaaatttccaatgggagccatgagttactgtctcagggacagaagcagatttttattcagacttccgatgggcttatcttgtcccctccaggtacaatagtgtctcaggaggaggacattgtcacagtgactgatgcagaggggcgtgcctgcggatgggcccgctagaaggagttcctctagaagctgtggagtcggtcgtcaccgtggagccagagccctcacagtgaagtggagtcagatcctagattcgtctgattttatccagagaaggtctatggcaagcaatgtatatttttctaatgtgaatattgcacagatgaaccttttatttataaagaataatgtctttc

SEQ ID NO: 203987 - DNA, 1770 bp, Homo sapiens
  Payload ID: 20231
  Gene Name: zinc finger protein 839
  ENST ID: ENST00000559155
  CDS Start-End: 1-1582
cgttgaagagacattgccatctgaaccagaaaatggagctcttttgcgatcagagagataccaaggacctagaagacgcgcatgctcagagacccttgcagagtcccgcacagctgtcctccagcagagaagagctgctcagctacctggtggccctgctgcggcaggggagcagagggcgtcgccaagcaaagccaggctcaaggagttcctccagcagtgtgaccgggaggatctggtggaattggctctgcctcagctggctcaggttgtgaccgtgtatgagtttcttctgatgaaggttgaaaaagatcatctagcaaagccttttttcccagctatatataaggaatttgaagagttgcataaaatggttaagaaaatgtgccaagattacctcagtagttctggtctgtgttcccaggagaccctggaaataaacaatgataaggttgctgagtcattaggaatcacagaattcctacggaagaaagaaatacacccagacaaccttggacccaagcacctcagccgagacatggatggggagcagctagagggagctagcagcgagaagagggaacgtgaggctgcggaggagggactggcctcagtgaaaaggcccagaagagaagccctgtccaacgataccactgaatctcttgctgccaacagcagaggccgggagaagcccaggcccttgcatgctttggccgctggtgagggtttttcccctccagtaaatgtgactgtctctccccgttctgaagaaagccatacaacgacggtttctggtggcaatgggagcgtgttccaggcgggcccgcagcttcaggcactggctaacttagaagccaggagggggtctataggtgctgctctctcatcccgggatgtcagtgggctgcctgtttatgctcagtcaggagagcctaggaggctgacccaggcacaggtggcagcgtttcctggagagaatgctttggaacactcttcagaccaggacacctgggacagcctgaggagcccgggtttctgcagccctttgtcatctggtggtggagcagagtccctgccgcctggggggcctggacatgcagaggcaggacacctcggcaaggtttgtgacttccacctgaaccaccagcagcccagccccaccagcgtcctgcctacagaggtggcagcccctccgcttgagaaaattttgtctgtggatagcgtggcagtggactgtgcctacaggactgtgcccaagccagggcctcagcctggcccacatggatcactattgactgaagggtgtctcagaagcctttcgggggacttgaaccggttcccctgtgggatggaggtgcactctggccagagagaactggagagcgtggttgctgtcggcgaagccatggcttttgaaatttccaatgggagccatgagttactgtctcagggacagaagcagatttttattcagacttccgatgggcttatcttgtcccctccaggtacaatagtgtctcaggaggaggacattgtcacagtgactgatgcagaggggcgtgcctgcggatgggcccgctagaaggagttcctctagaagctgtggagtcggtcgtcaccgtggagccagagccctcacagtgaagtggagtcagatcctagattcgtctgattttatccagagaaggtctatggcaagcaatgtatatttttctaatgtgaatattgcacagatgaaccttttatttataaagaataatgtctttctgc

SEQ ID NO: 203988 - DNA, 2865 bp, Homo sapiens
  Payload ID: 20231
  Gene Name: zinc finger protein 839
  ENST ID: ENST00000559098
  CDS Start-End: 1-1482
gcggcgcggcggctgcgggacgcggcccaacaggccgccctgcagcggggccggggcaccgagcccccgcgcctgccgcgcctgctcccgccccagcaactagaagccatttgtgtcaaggtaacgtctggagaaacaaaaggtcaggaaaggccaatgctcctaccgaccacaatccagccccaaactgcaagaaagagccagctgccccgggggaattcctgcctggtggggctccatatcgccagccctcagctgctcagggtacagccgcttgtgagaaccgagccacagtcctgcttcctaagtgacttatgccaacctcctgctcaggggtttgtacagagaccactgccagccctccaggtggtccctgcaaagagagtcccagcccccaaggctccagatgaacagggctccatgttgacccctttgtctgcctctgacccgctggcagtaacatctctttcatccagttcagcacatccatttatttccaacttgcatacaagacatactgagaaactaaaaaaatcgttaaaagtaaagacacgttctggacgggtatctcgacctcccaaatataaagctaaagattataagttcataaaaacagaggatctggcggatggtcatctgtcagattctgatgattactcagaactctgtgtggaagaagatgaagatcagagggagaggcacgcactctttgacttatcgagctgctccctgaggcccaaaagctttaagtgtcagacttgtgaaaagtcatatatagggaaggggggactggcccgacattttaaacttaacccaggccacggccagttggaccccgagatggtgctgtctgagaaagccagtggaagcaccctccgggggtgcacggaggaaaggacgctcagcctgacctccctggggctgtccatgccagcggatccatgtgagggaggggcccgctcctgcttggtgacagagtcagcacgcggtggcctgcagaatggtcagtctgtagacgttgaagagacattgccatctgaaccagaaaatggagctcttttgcgatcagagagataccaaggacctagaagacgcgcatgctcagagacccttgcagagtcccgcacagctgtcctccagcagagaagagctgctcagctacctggtggccctgctgcggcaggggagcagagggcgtcgccaagcaaagccaggctcaaggagttcctccagcagtgtgaccgggaggatctggtggaattggctctgcctcagctggctcaggttgtgaccgtgtatgagtttcttctgatgaaggttgaaaaagatcatctagcaaagccttttttcccagctatatataaggaatttgaagagttgcataaaatggttaagaaaatgtgccaagattacctcagtagttctggtctgtgttcccaggagaccctggaaataaacaatgataagaaaactcaaaaatgaagataagctagaagaaaatggaaaacaccataatcttcccactcactgatgatcagagttaaaacctcaggttgctgagtcattaggaatcacagaattcctacggaagaaagaaatacacccagacaaccttggacccaagcacctcagccgagacatggatggggagcagctagagggagctagcagcgagaagagggaacgtgaggctgcggaggagggactggcctcagtgaaaaggcccagaagagaagccctgtccaacgataccactgaatctcttgctgccaacagcagaggccgggagaagcccaggcccttgcatgctttggccgctggtttttcccctccagtaaatgtgactgtctctccccgttctgaagaaagccatacaacgacggtttctggtggcaatgggagcgtgttccaggcgggcccgcagcttcaggcactggctaacttagaagccaggagggggtctataggtgctgctctctcatcccgggatgtcagtgggctgcctgtttatgctcagtcaggagagcctaggaggctgacccaggcacaggtggcagcgtttcctggagagaatgctttggaacactcttcagaccaggacacctgggacagcctgaggagcccgggtttctgcagccctttgtcatctggtggtggagcagagtccctgccgcctggggggcctggacatgcagaggcaggacacctcggcaaggtttgtgacttccacctgaaccaccagcagcccagccccaccagcgtcctgcctacagaggtggcagcccctccgcttgagaaaattttgtctgtggatagcgtggcagtggactgtgcctacaggactgtgcccaagccagggcctcagcctggcccacatggatcactattgactgaagggtgtctcagaagcctttcgggggacttgaaccggttcccctgtgggatggaggtgcactctggccagagagaactggagagcgtggttgctgtcggcgaagccatggcttttgaaatttccaatgggagccatgagttactgtctcagggacagaagcagatttttattcagacttccgatgggcttatcttgtcccctccaggtacaatagtgtctcaggaggaggacattgtcacagtgactgatgcagaggggcgtgcctgcggatgggcccgctagaaggagttcctctagaagctgtggagtcggtcgtcaccgtggagccagagccctcacagtgaagtggagtcagatcctagattcgtctgattttatccagagaaggtctatggcaagcaatgtatatttttctaatgtgaatattgcacagatgaaccttttatttataaagaataatgtctttctgc

SEQ ID NO: 203989 - DNA, 876 bp, Homo sapiens
  Payload ID: 20231
  Gene Name: zinc finger protein 839
  ENST ID: ENST00000560112
  CDS Start-End: 1-433
ggttgaaaaagatcatctagcaaagccttttttcccagctatatataaggaatttgaagagttgcataaaatggttaagaaaatgtgccaagattacctcagtagttctggtctgtgttcccaggagaccctggaaataaacaatgataaggttgctgagtcattaggaatcacagaattcctacggaagaaagaaatacacccagacaaccttggacccaagcacctcagccgagacatggatggggagcagctagagggagctagcagcgagaagagggaacgtgaggctgcggaggagggactggcctcagtgaaaaggcccagaagagaagccctgtccaacgataccactgaatctcttgctgccaacagcagaggccgggagaagcccaggcccttgcatgctttggccgctgtcaggagagcctaggaggctgacccaggcacaggtggcagcgtttcctggagagaatgctttggaacactcttcagaccaggacacctgggacagcctgaggagcccgggtttctgcagccctttgtcatctggtggtggagcagagtccctgccgcctggggggcctggacatgcagaggcaggacacctcggcaaggtttgtgacttccacctgaaccaccagcagcccagccccaccagcgtcctgcctacagaggtggcagcccctccgcttgagaaaattttgtctgtggatagcgtggcagtggactgtgcctacaggactgtgcccaagccagggcctcagcctggcccacatggatcactattgactgaagggtgtctcagaagcctttcgggggacttgaaccggttcccctgtgggatggaggtgcactctggccagagagaactgg

SEQ ID NO: 203990 - DNA, 756 bp, Homo sapiens
  Payload ID: 20231
  Gene Name: zinc finger protein 839
  ENST ID: ENST00000558462
  CDS Start-End: 1-571
acgcgcatgctcagagacccttgcagagtcccgcacagctgtcctccagcagagaagagctgctcagctacctggtggccctgctgcggcaggggagcagagggcgtcgccaagcaaagccaggctcaaggagttcctccagcagtgtgaccgggaggatctggtggaattggctctgcctcagctggctcaggttgtgaccgtgtatgagtttcttctgatgaaggttgctgagtcattaggaatcacagaattcctacggaagaaagaaatacacccagacaaccttggacccaagcacctcagccgagacatggatggggagcagctagagggagctagcagcgagaagagggaacgtgaggctgcggaggagggactggcctcagtgaaaaggcccagaagagaagccctgtccaacgataccactgaatctcttgctgccaacagcagaggccgggagaagcccaggcccttgcatgctttggccgctggtacaatagtgtctcaggaggaggacattgtcacagtgactgatgcagaggggcgtgcctgcggatgggcccgctagaaggagttcctctagaagctgtggagtcggtcgtcaccgtggagccagagccctcacagtgaagtggagtcagatcctagattcgtctgattttatccagagaaggtctatggcaagcaatgtatatttttctaatgtgaatattgcacagatgaaccttttatttataaagaataatgtctttc

SEQ ID NO: 203991 - DNA, 7162 bp, Homo sapiens
  Payload ID: 20232
  Gene Name: zinc finger protein 84
  Uniprot ID: P51523
  ENST ID: ENST00000327668
  CDS Start-End: 581-2797
gggggctccgggaatggcgggggaggcgcgcgggagtggccgcggggagcttcggcttcaaggccctgggcgtccgcgcgcggatgcgggtctggggcgggttggggctgggccgggtcgtgaagatgccgtgggccgcggagctgcgcggattctgggctgtggggcgggcacggcctttccggaggcgccgctcctgggcgtcctttcaggcgggcgtggaggcgccagcctcgggcgcgtttagcctcgggcgcgtttagcctcgacctcgggccagcccgcttgccgcgccgtggccctaaggagcggctgccctgctggaccgcatccaccagcagcctggctctgccgctatcgaaggaggcttttaaagcgctggggttacagtccacagatcctggtccctacaaataagcctgctcatgtgagataagaaaggagttcctggaaccaggaattcattctcagtgtagaagacctagctgagacctcactccacagttttggggcagaagcagaagagacgcacagtagaaccgatctcagccttgctgatcatctcgtacagcagcagaaaatgaccatgttacaggagtcattctcatttgacgatttatctgtggacttcacccaaaaggagtggcagctactggatccctctcagaagaatttatacaaggatgtgatgttggagaactatagcagcctagtgtcactggggtatgaagttatgaaaccagatgtcatcttcaaattggagcaaggagaagagccgtgggtaggagatggagaaattccaagttcagattctccagaagtctggaaagtagatggtaacatgatgtggcaccaggataaccaagacaagcttaaaattataaaaagaggtcatgaatgtgatgcatttggaaaaaatttcaatctgaacatgaactttgttcctttaaggaaatcaaacagtgaaggtgacttagatggattgattttaaaacatcatttagatttgcttattccaaaaggagattatggaaaagcagaatcagatgactttaatgtgtttgataatttttttctccattccaagcctgaggatactgatacctggttaaaatactatgactgtgataaatataaagagagctataaaaagtcacagattatcatatatcatagaaatcgtttaggggagaaactctatgaatgcagtgaatgtaggaagcgcttcagtaagaaaccaagtctcattaaacatcagagcagacatataagagacatagcctttggctgtggtaattgtggcaaaacctttccccagaagtctcagtttattacacatcacagaactcatacaggagaaaaaccttataattgtagccagtgtgggaaagccttctcccaaaagtcacagctcacatcccatcagcggacacatacaggagagaaaccttatgagtgtggtgaatgtgggaaagccttctcccggaagtcacatctcatatcgcattggagaacacacacaggagagaaaccctatggatgcaatgaatgtgggagggcctttagtgaaaagtccaatctcattaaccatcagagaattcataccggtgagaagccttttgaatgcagggaatgtgggaaagccttcagcaggaagtcacaactcgttacacatcacagaactcacacaggaacaaaaccctttggatgtagtgattgtagaaaagcattctttgagaagtcagagcttattagacatcagacaattcatactggagagaaaccctatgaatgcagcgagtgtaggaaagcatttagagagaggtcgagtctcattaatcatcagagaacacatacaggagagaaacctcatggatgcattcagtgtgggaaggccttctcccagaagtcacatctcatatcacatcagatgacacacacaggagaaaaaccctttatatgcagtaaatgtgggaaagccttcagcaggaaatcacagctcgttagacatcagagaactcatacgggagaaaaaccgtatgaatgcagtgagtgtgggaaagctttcagtgaaaaattaagtctcactaatcatcaaagaattcatacaggagaaaaaccatatgtatgcagtgaatgtgggaaagccttttgtcagaagtcacatctcatatcacatcagaggacacatacaggggagaaaccctatgaatgcagtgaatgtgggaaggcctttggtgagaagtcaagtcttgcaactcatcagagaactcatactggagaaaaaccgtatgaatgcagggactgtgaaaaagctttctcccagaaatcacagctaaatacccatcagagaattcacactggagagaaaccctatgaatgcagtctttgtaggaaagctttttttgagaagtcggagctaattagacatctgagaactcatacaggagaaaaaccttatgaatgcaatgaatgtagaaaagccttcagggagaagtcaagtctcatcaatcatcagagaatacatacaggagagaagccttttgaatgcagtgagtgtggcaaagctttctctcggaagtcacaccttataccacatcaaaggacacatacgggtgagaaaccctatggatgcagtgaatgtaggaaggccttctctcagaagtcacagctggttaatcatcagagaattcatacaggagagaagccttatcgatgcattgaatgtgggaaagctttctcacagaagtcacagctcatcaatcatcagagaactcatacagtaaaaaaatcctaggaatacagttaatagtagtctttgacagatcatcttggacttcaggaaatgcaattatgataacgtttgtagacagtcacgtcatgttaggtgtttgtactccatgaggatgagaactctaaatgaggtggtgtatggaaagccgatcataattcatagagtagagtgaacctatgactgcagtggatctcaaaaacttttaaaaccatagacaagccttatagagtagaacattcacagcaaagaagaatcctgtgaatgtccaaaagccttccagaagtcaagtctcttaagctattagaaatattcccactggggatgagggaaaaccccatgaatgcgggaaatgaggcaatatttttaagaaatgacagttcattgtacataagaaaatgctcttaggaatgaagttctatgaaagtactaaatatgggacagtgcaacaagtaacgagactattttgtattttggagaattcatattatggagaacctaacaatttaaagacactgggaacacttgcccctcagtatagtactgtcaagggaagccatacactttttgtagacatgggtaccaaaaatacccaattctaagtggttgacagatgttcactttgaagtgtgaagttttaaaaatacgtgaataaattggttattgaaacatctaagacatttcttagtggtatttgtggcttatcttctagtgtcacgtatgttttgtgttttggacttacctataatttaatgtaattgggagtatgaaatgcatatgccttttagtgcctctgatgtctgtgaagacaacactacacaccactggtttttattttttaacaataatataaaaaatggaaactcatgtaacatgactacatgaataagtaccttaagtgataacccgtttcttttaacttatagacatacataaggggtcttttgtttttatggacctttctattcagtaactgaagccaacattgtgtaagtcttctgcatcctcagagtctgagtaacagtttatataaaataaatatgcaaaggcaggaaccacagaataaccatagtaatatataactgaatgagcaaaataaaggtgtgtgaactacattacaacacccaaactaaatgaaataaagtagtgctgtattaaatctttttctcatttagtgaggtgcctccatatagtatatatatatgtatcttaagtgatatgtaacccaaatgtcactattttaatttactgtgataaagtatcatggatattttgtgctgctgttatgctttttgtgttgcataaaatatcttgtaaaaattagatggataaatgaattattaaaaaatcacatttctgaagatgtaaagtattagggaattttgtgctggaaaaacatttttgacattcaaggatgcctattttatcttctagcaaatttctgtggtccctggaaaagtacagatgatcctggacttacagtggggttacctcccaataaacccattgtaagttgaaaacattgtaagtcaaaaatgcatttaatacacccaacttaccaaacatcatagcttagcgtagcctaccttaaacattctcagaacacattctaatgcatcatctattttataaaaaggtgttgaatatctgatgtaattattgaatactgaaggtgaaaaatagtagtgtatggataccattgtaatgttgagaaactgtaagtcacatcctcttaagtcaggaactatctgtataaggaaacaagatttccattttatcatttgaaatgtatttgactttgtttcactagttgcattatccccatggaaaacttcacattgagaacttaccattatatatttccataaaaatgcatgaaccatcccttagctaagtaaggattttgtaatgttctctcaataatgttgcttggcaaagttaatattttttgtatgctgatgaaatttagaaaagtccaatattgagcttgattgcaaacttagaaaaactcaagacttctccttttatgttcaaattgttgtatcagtatggtattttgcacctttaccttaaacaatattttctcctttaattattgattttgcaacattttgggaaagttggaattttaaataaatgaataattttctaaaccagaataccagttcaacagccaaataattctgtctttccatgctgtaattttaaagcatttaattttccaactttttgttcatactcaagtgtatgaacttcctggctgggcacagtggctcatgcctgtaatcccagcactttgggaggctgaggacctcaagtggagacctcaagtggatcacttgaggtcaggagttgaagaccagcatgttcatggccaacatggcaaaaccctgtcttaaattagccgggcatggttgtgcgtgcctgtaatcccagttactcaggaggctgaggcaggagaatcacttgaacctgagaggcagaggttgcagtgagccaagattgtgcagcctgggcgacagagcgagcctctgtcaaaaaaagaaaagaaaaagaacttcctactttttaatatctcaaattcattttactagacgtgggagaccaactaatgcaaatgaacagttacagggtgatgttgtactttgtgatttttgccctattttttctttccatctatcaccattctctttccaatcccagagattgatttattaggtcttggaaattctagattattccattaactattaagcagttaaacctgatacttcctacactagataatggaacttcaacattagcctattgattgcccaagaacaaacatttttttctaaatgtcaggtgttatggggaggattgatgctgacagcagaggtctagttaaaaactgatgcagaggttcaaatacgttgtgcagtaatcactagaactcaccttctaaagtgtcatgagagctctgattctgcaattagagattttttaatgtgtttttgaaattaccttgtaaaccacaaatctgtgtctctgcattgccccttattgtttcctaccacaaattctacatcaagaagaaagttttaaagttagactggatttatttgtgattttatggagcacaataaggtacattgagatagcatactaaaggaggccaaatacaggaagcatcatcttttcttattctcttactgcctggattttcccactgacctggaattgtgcacagttctacaaaggacaattgacattgttttccttttactaagtagtgggttttccttaaggtccagactgaattttgagacctgtatcaggattgccttctgtgtgactttttcttgcaggatctgacatcattacctatgggtccatatatttgtgatactttggtttcgggaacatcacttttagaatgttgacataaaatgcacccacagaatgccgtatttatcaaaagtaactttctagcaaaatctacagcagtaggcatttggaatctgcatttgagacctctgcagtcatttggtcattccagcaatctatgtccaggttgtcaatttcagaggtcttattagtctatacaggtaccaatgagctttcagatgttcaacacctacccctggcctaactgctgataaccaaccataacccttgcagatgcatgcatgttttctgcaccttgctatcatttttcagtccatttttcacatgtatacatagtgattatttttaaatgcaaccctgatttcacatgcctcatgttgaaatatcgtgtggcttattgtggacttaaagtgtaacattctccttatggtatgtaaggacttttgtataaaccaatgcctatctatctatcatttctgaaaactttttcctcctatgcaatattttctggcctctgtgaacaacttgtagttccttgagatttctattatcacttatgtttttgcaaatctgcaattgaaatgcccttgttccttgttaatgcctattgaatctatatgaacctgtacgtgtgtttctcactgtgataatataatcattgcatgttttatctttcccactagaaagcttctagaaagctagtactatcttttttgtctgtgtaatttttgcatcacaagctatatttaaatgtgggtgcagtgagtggctgttttctgccacatggagaaacatggtctgcagtgagagagaagaatgaagccatgatgaaagcaaaatcaagaaagagtcccgattgtgttccagtacctggttcttctggtcttcatgttcaggtccacctctgcccttttcatgtcttgattgttgaattcttctgtgagatactccaaatatcctaataaattctcatgtttgctt

SEQ ID NO: 203992 - DNA, 7020 bp, Homo sapiens
  Payload ID: 20232
  Gene Name: zinc finger protein 84
  Uniprot ID: P51523
  ENST ID: ENST00000392319
  CDS Start-End: 438-2654
actcttggtaatgcttgcaggtggcccgttcttcctctttgtccttcgctgccacgtgagaggggagtgtacgcgtgtgcgcgcgtgcgagtgtgcgcgtgtgcagtccccgactcgtcccggcccgttcggagccgcccgggagcgcacaaaggccgacggtttgggcgcgtgcgcgggacacgggggacgggcggtgtcacgtgatcgcgaggccgcgggcgcgcgggcgcgactcggcggcggcgtcttttatcctggtccctacaaataagcctgctcatgtgagataagaaaggagttcctggaaccaggaattcattctcagtgtagaagacctagctgagacctcactccacagttttggggcagaagcagaagagacgcacagtagaaccgatctcagccttgctgatcatctcgtacagcagcagaaaatgaccatgttacaggagtcattctcatttgacgatttatctgtggacttcacccaaaaggagtggcagctactggatccctctcagaagaatttatacaaggatgtgatgttggagaactatagcagcctagtgtcactggggtatgaagttatgaaaccagatgtcatcttcaaattggagcaaggagaagagccgtgggtaggagatggagaaattccaagttcagattctccagaagtctggaaagtagatggtaacatgatgtggcaccaggataaccaagacaagcttaaaattataaaaagaggtcatgaatgtgatgcatttggaaaaaatttcaatctgaacatgaactttgttcctttaaggaaatcaaacagtgaaggtgacttagatggattgattttaaaacatcatttagatttgcttattccaaaaggagattatggaaaagcagaatcagatgactttaatgtgtttgataatttttttctccattccaagcctgaggatactgatacctggttaaaatactatgactgtgataaatataaagagagctataaaaagtcacagattatcatatatcatagaaatcgtttaggggagaaactctatgaatgcagtgaatgtaggaagcgcttcagtaagaaaccaagtctcattaaacatcagagcagacatataagagacatagcctttggctgtggtaattgtggcaaaacctttccccagaagtctcagtttattacacatcacagaactcatacaggagaaaaaccttataattgtagccagtgtgggaaagccttctcccaaaagtcacagctcacatcccatcagcggacacatacaggagagaaaccttatgagtgtggtgaatgtgggaaagccttctcccggaagtcacatctcatatcgcattggagaacacacacaggagagaaaccctatggatgcaatgaatgtgggagggcctttagtgaaaagtccaatctcattaaccatcagagaattcataccggtgagaagccttttgaatgcagggaatgtgggaaagccttcagcaggaagtcacaactcgttacacatcacagaactcacacaggaacaaaaccctttggatgtagtgattgtagaaaagcattctttgagaagtcagagcttattagacatcagacaattcatactggagagaaaccctatgaatgcagcgagtgtaggaaagcatttagagagaggtcgagtctcattaatcatcagagaacacatacaggagagaaacctcatggatgcattcagtgtgggaaggccttctcccagaagtcacatctcatatcacatcagatgacacacacaggagaaaaaccctttatatgcagtaaatgtgggaaagccttcagcaggaaatcacagctcgttagacatcagagaactcatacgggagaaaaaccgtatgaatgcagtgagtgtgggaaagctttcagtgaaaaattaagtctcactaatcatcaaagaattcatacaggagaaaaaccatatgtatgcagtgaatgtgggaaagccttttgtcagaagtcacatctcatatcacatcagaggacacatacaggggagaaaccctatgaatgcagtgaatgtgggaaggcctttggtgagaagtcaagtcttgcaactcatcagagaactcatactggagaaaaaccgtatgaatgcagggactgtgaaaaagctttctcccagaaatcacagctaaatacccatcagagaattcacactggagagaaaccctatgaatgcagtctttgtaggaaagctttttttgagaagtcggagctaattagacatctgagaactcatacaggagaaaaaccttatgaatgcaatgaatgtagaaaagccttcagggagaagtcaagtctcatcaatcatcagagaatacatacaggagagaagccttttgaatgcagtgagtgtggcaaagctttctctcggaagtcacaccttataccacatcaaaggacacatacgggtgagaaaccctatggatgcagtgaatgtaggaaggccttctctcagaagtcacagctggttaatcatcagagaattcatacaggagagaagccttatcgatgcattgaatgtgggaaagctttctcacagaagtcacagctcatcaatcatcagagaactcatacagtaaaaaaatcctaggaatacagttaatagtagtctttgacagatcatcttggacttcaggaaatgcaattatgataacgtttgtagacagtcacgtcatgttaggtgtttgtactccatgaggatgagaactctaaatgaggtggtgtatggaaagccgatcataattcatagagtagagtgaacctatgactgcagtggatctcaaaaacttttaaaaccatagacaagccttatagagtagaacattcacagcaaagaagaatcctgtgaatgtccaaaagccttccagaagtcaagtctcttaagctattagaaatattcccactggggatgagggaaaaccccatgaatgcgggaaatgaggcaatatttttaagaaatgacagttcattgtacataagaaaatgctcttaggaatgaagttctatgaaagtactaaatatgggacagtgcaacaagtaacgagactattttgtattttggagaattcatattatggagaacctaacaatttaaagacactgggaacacttgcccctcagtatagtactgtcaagggaagccatacactttttgtagacatgggtaccaaaaatacccaattctaagtggttgacagatgttcactttgaagtgtgaagttttaaaaatacgtgaataaattggttattgaaacatctaagacatttcttagtggtatttgtggcttatcttctagtgtcacgtatgttttgtgttttggacttacctataatttaatgtaattgggagtatgaaatgcatatgccttttagtgcctctgatgtctgtgaagacaacactacacaccactggtttttattttttaacaataatataaaaaatggaaactcatgtaacatgactacatgaataagtaccttaagtgataacccgtttcttttaacttatagacatacataaggggtcttttgtttttatggacctttctattcagtaactgaagccaacattgtgtaagtcttctgcatcctcagagtctgagtaacagtttatataaaataaatatgcaaaggcaggaaccacagaataaccatagtaatatataactgaatgagcaaaataaaggtgtgtgaactacattacaacacccaaactaaatgaaataaagtagtgctgtattaaatctttttctcatttagtgaggtgcctccatatagtatatatatatgtatcttaagtgatatgtaacccaaatgtcactattttaatttactgtgataaagtatcatggatattttgtgctgctgttatgctttttgtgttgcataaaatatcttgtaaaaattagatggataaatgaattattaaaaaatcacatttctgaagatgtaaagtattagggaattttgtgctggaaaaacatttttgacattcaaggatgcctattttatcttctagcaaatttctgtggtccctggaaaagtacagatgatcctggacttacagtggggttacctcccaataaacccattgtaagttgaaaacattgtaagtcaaaaatgcatttaatacacccaacttaccaaacatcatagcttagcgtagcctaccttaaacattctcagaacacattctaatgcatcatctattttataaaaaggtgttgaatatctgatgtaattattgaatactgaaggtgaaaaatagtagtgtatggataccattgtaatgttgagaaactgtaagtcacatcctcttaagtcaggaactatctgtataaggaaacaagatttccattttatcatttgaaatgtatttgactttgtttcactagttgcattatccccatggaaaacttcacattgagaacttaccattatatatttccataaaaatgcatgaaccatcccttagctaagtaaggattttgtaatgttctctcaataatgttgcttggcaaagttaatattttttgtatgctgatgaaatttagaaaagtccaatattgagcttgattgcaaacttagaaaaactcaagacttctccttttatgttcaaattgttgtatcagtatggtattttgcacctttaccttaaacaatattttctcctttaattattgattttgcaacattttgggaaagttggaattttaaataaatgaataattttctaaaccagaataccagttcaacagccaaataattctgtctttccatgctgtaattttaaagcatttaattttccaactttttgttcatactcaagtgtatgaacttcctggctgggcacagtggctcatgcctgtaatcccagcactttgggaggctgaggacctcaagtggagacctcaagtggatcacttgaggtcaggagttgaagaccagcatgttcatggccaacatggcaaaaccctgtcttaaattagccgggcatggttgtgcgtgcctgtaatcccagttactcaggaggctgaggcaggagaatcacttgaacctgagaggcagaggttgcagtgagccaagattgtgcagcctgggcgacagagcgagcctctgtcaaaaaaagaaaagaaaaagaacttcctactttttaatatctcaaattcattttactagacgtgggagaccaactaatgcaaatgaacagttacagggtgatgttgtactttgtgatttttgccctattttttctttccatctatcaccattctctttccaatcccagagattgatttattaggtcttggaaattctagattattccattaactattaagcagttaaacctgatacttcctacactagataatggaacttcaacattagcctattgattgcccaagaacaaacatttttttctaaatgtcaggtgttatggggaggattgatgctgacagcagaggtctagttaaaaactgatgcagaggttcaaatacgttgtgcagtaatcactagaactcaccttctaaagtgtcatgagagctctgattctgcaattagagattttttaatgtgtttttgaaattaccttgtaaaccacaaatctgtgtctctgcattgccccttattgtttcctaccacaaattctacatcaagaagaaagttttaaagttagactggatttatttgtgattttatggagcacaataaggtacattgagatagcatactaaaggaggccaaatacaggaagcatcatcttttcttattctcttactgcctggattttcccactgacctggaattgtgcacagttctacaaaggacaattgacattgttttccttttactaagtagtgggttttccttaaggtccagactgaattttgagacctgtatcaggattgccttctgtgtgactttttcttgcaggatctgacatcattacctatgggtccatatatttgtgatactttggtttcgggaacatcacttttagaatgttgacataaaatgcacccacagaatgccgtatttatcaaaagtaactttctagcaaaatctacagcagtaggcatttggaatctgcatttgagacctctgcagtcatttggtcattccagcaatctatgtccaggttgtcaatttcagaggtcttattagtctatacaggtaccaatgagctttcagatgttcaacacctacccctggcctaactgctgataaccaaccataacccttgcagatgcatgcatgttttctgcaccttgctatcatttttcagtccatttttcacatgtatacatagtgattatttttaaatgcaaccctgatttcacatgcctcatgttgaaatatcgtgtggcttattgtggacttaaagtgtaacattctccttatggtatgtaaggacttttgtataaaccaatgcctatctatctatcatttctgaaaactttttcctcctatgcaatattttctggcctctgtgaacaacttgtagttccttgagatttctattatcacttatgtttttgcaaatctgcaattgaaatgcccttgttccttgttaatgcctattgaatctatatgaacctgtacgtgtgtttctcactgtgataatataatcattgcatgttttatctttcccactagaaagcttctagaaagctagtactatcttttttgtctgtgtaatttttgcatcacaagctatatttaaatgtgggtgcagtgagtggctgttttctgccacatggagaaacatggtctgcagtgagagagaagaatgaagccatgatgaaagcaaaatcaagaaagagtcccgattgtgttccagtacctggttcttctggtcttcatgttcaggtccacctctgcccttttcatgtcttgattgttgaattcttctgtgagatactccaaatatcctaataaattctcatgtttgcttc

SEQ ID NO: 203993 - DNA, 559 bp, Homo sapiens
  Payload ID: 20232
  Gene Name: zinc finger protein 84
  ENST ID: ENST00000438628
  CDS Start-End: 352-559
gcagtccccgactcgtcccggcccgttcggagccgcccgggagcgcacaaaggccgacggtttgggcgcgtgcgcgggacacgggggacgggcggtgtcacgtgatcgcgaggccgcgggcgcgcgggcgcgactcggcggcggcgtcttttgtgagttcatccacagatcctggtccctacaaataagcctgctcatgtgagataagaaaggagttcctggaaccaggaattcattctcagtgtagaagacctagctgagacctcactccacagttttggggcagaagcagaagagacgcacagtagaaccgatctcagccttgctgatcatctcgtacagcagcagaaaatgaccatgttacaggagtcattctcatttgacgatttatctgtggacttcacccaaaaggagtggcagctactggatccctctcagaagaatttatacaaggatgtgatgttggagaactatagcagcctagtgtcactggggtatgaagttatgaaaccagatgtcatcttcaaattggagcaaggagaagagccgtgggtaggag

SEQ ID NO: 203994 - DNA, 546 bp, Homo sapiens
  Payload ID: 20232
  Gene Name: zinc finger protein 84
  ENST ID: ENST00000545299
  CDS Start-End: 529-546
gacctggaaagatgttcttcacataatgggaaaaaaacaaaaacagcttttaaatatgaccatatgcttccattgtatgaaaaatatcacaatagtttccatcatcctaagaatggttacctgtggtgagatcatagataatagttcttatttagcttgtagacctaggcttccactgttccattttactatattctgtttccctgagagtgctgtttcagttatatagcaagcgtacctctggccttagatgatcgtgaattccaagttcctagcaagagagaaagagatttcatgtgcaatgtgaatataccagttgaagtacatttctcccgaagtccacagatcctggtccctacaaataagcctgctcatgtgagataagaaaggagttcctggaaccaggaattcattctcagtgtagaagacctagctgagacctcactccacagttttggggcagaagcagaagagacgcacagtagaaccgatctcagccttgctgatcatctcgtacagcagcagaaaatgaccatgttacaggtg

SEQ ID NO: 203995 - DNA, 3501 bp, Homo sapiens
  Payload ID: 20232
  Gene Name: zinc finger protein 84
  ENST ID: ENST00000543758
  CDS Start-End: 614-2827
aatgcttgcaggtggcccgttcttcctctttgtccttcgctgccacgtgagaggggagtgtacgcgtgtgcgcgcgtgcgagtgtgcgcgtgtgcagtccccgactcgtcccggcccgttcggagccgcccgggagcgcacaaaggccgacggtttgggcgcgtgcgcgggacacgggggacgggcggtgtcacgtgatcgcgaggccgcgggcgcgcgggcgcgactcggcggcggcgtcttttagacctaggcttccactgttccattttactatattctgtttccctgagagtgctgtttcagttatatagcaagcgtacctctggccttagatgatcgtgaattccaagttcctagcaagagagaaagagatttcatgtgcaatgtgaatataccagttgaagtacatttctcccgaagtccacagatcctggtccctacaaataagcctgctcatgtgagataagaaaggagttcctggaaccaggaattcattctcagtgtagaagacctagctgagacctcactccacagttttggggcagaagcagaagagacgcacagtagaaccgatctcagccttgctgatcatctcgtacagcagcagaaaatgaccatgttacaggagtcattctcatttgacgatttatctgtggacttcacccaaaaggagtggcagctactggatccctctcagaagaatttatacaaggatgtgatgttggagaactatagcagcctagtgtcactggggtatgaagttatgaaaccagatgtcatcttcaaattggagcaaggagaagagccgtgggtaggagatggagaaattccaagttcagattctccagtctggaaagtagatggtaacatgatgtggcaccaggataaccaagacaagcttaaaattataaaaagaggtcatgaatgtgatgcatttggaaaaaatttcaatctgaacatgaactttgttcctttaaggaaatcaaacagtgaaggtgacttagatggattgattttaaaacatcatttagatttgcttattccaaaaggagattatggaaaagcagaatcagatgactttaatgtgtttgataatttttttctccattccaagcctgaggatactgatacctggttaaaatactatgactgtgataaatataaagagagctataaaaagtcacagattatcatatatcatagaaatcgtttaggggagaaactctatgaatgcagtgaatgtaggaagcgcttcagtaagaaaccaagtctcattaaacatcagagcagacatataagagacatagcctttggctgtggtaattgtggcaaaacctttccccagaagtctcagtttattacacatcacagaactcatacaggagaaaaaccttataattgtagccagtgtgggaaagccttctcccaaaagtcacagctcacatcccatcagcggacacatacaggagagaaaccttatgagtgtggtgaatgtgggaaagccttctcccggaagtcacatctcatatcgcattggagaacacacacaggagagaaaccctatggatgcaatgaatgtgggagggcctttagtgaaaagtccaatctcattaaccatcagagaattcataccggtgagaagccttttgaatgcagggaatgtgggaaagccttcagcaggaagtcacaactcgttacacatcacagaactcacacaggaacaaaaccctttggatgtagtgattgtagaaaagcattctttgagaagtcagagcttattagacatcagacaattcatactggagagaaaccctatgaatgcagcgagtgtaggaaagcatttagagagaggtcgagtctcattaatcatcagagaacacatacaggagagaaacctcatggatgcattcagtgtgggaaggccttctcccagaagtcacatctcatatcacatcagatgacacacacaggagaaaaaccctttatatgcagtaaatgtgggaaagccttcagcaggaaatcacagctcgttagacatcagagaactcatacgggagaaaaaccgtatgaatgcagtgagtgtgggaaagctttcagtgaaaaattaagtctcactaatcatcaaagaattcatacaggagaaaaaccatatgtatgcagtgaatgtgggaaagccttttgtcagaagtcacatctcatatcacatcagaggacacatacaggggagaaaccctatgaatgcagtgaatgtgggaaggcctttggtgagaagtcaagtcttgcaactcatcagagaactcatactggagaaaaaccgtatgaatgcagggactgtgaaaaagctttctcccagaaatcacagctaaatacccatcagagaattcacactggagagaaaccctatgaatgcagtctttgtaggaaagctttttttgagaagtcggagctaattagacatctgagaactcatacaggagaaaaaccttatgaatgcaatgaatgtagaaaagccttcagggagaagtcaagtctcatcaatcatcagagaatacatacaggagagaagccttttgaatgcagtgagtgtggcaaagctttctctcggaagtcacaccttataccacatcaaaggacacatacgggtgagaaaccctatggatgcagtgaatgtaggaaggccttctctcagaagtcacagctggttaatcatcagagaattcatacaggagagaagccttatcgatgcattgaatgtgggaaagctttctcacagaagtcacagctcatcaatcatcagagaactcatacagtaaaaaaatcctaggaatacagttaatagtagtctttgacagatcatcttggacttcaggaaatgcaattatgataacgtttgtagacagtcacgtcatgttaggtgtttgtactccatgaggatgagaactctaaatgaggtggtgtatggaaagccgatcataattcatagagtagagtgaacctatgactgcagtggatctcaaaaacttttaaaaccatagacaagccttatagagtagaacattcacagcaaagaagaatcctgtgaatgtccaaaagccttccagaagtcaagtctcttaagctattagaaatattcccactggggatgagggaaaaccccatgaatgcgggaaatgaggcaatatttttaagaaatgacagttcattgtacataagaaaatgctcttaggaatgaagttctatgaaagtactaaatatgggacagtgcaacaagtaacgagactattttgtattttggagaattcatattatggagaacctaacaatttaaagacactgggaacacttgcccctcagtatagtactgtcaagggaagccatacactttttgtagacatgggtaccaaaaatacccaattctaagtggttgacagatgttcactttgaagtgtgaagttttaaaaatacgtgaataaattggttattgaaacatctaagaca

SEQ ID NO: 203996 - DNA, 562 bp, Homo sapiens
  Payload ID: 20232
  Gene Name: zinc finger protein 84
  ENST ID: ENST00000543310
  CDS Start-End: 329-562
aaataaggttattgacctggaaagatgttcttcacataatgggaaaaaaacaaaaacagcttttaaatatgaccatatgcttccattgtatgaaaaatatcacaatagtttccatcatcctaagaatggttacctgtgtccacagatcctggtccctacaaataagcctgctcatgtgagataagaaaggagttcctggaaccaggaattcattctcagtgtagaagacctagctgagacctcactccacagttttggggcagaagcagaagagacgcacagtagaaccgatctcagccttgctgatcatctcgtacagcagcagaaaatgaccatgttacaggagtcattctcatttgacgatttatctgtggacttcacccaaaaggagtggcagctactggatccctctcagaagaatttatacaaggatgtgatgttggagaactatagcagcctagtgtcactggggtatgaagttatgaaaccagatgtcatcttcaaattggagcaaggagaagagccgtgggtaggagatggagaaattccaagttcagattct

SEQ ID NO: 203997 - DNA, 647 bp, Homo sapiens
  Payload ID: 20232
  Gene Name: zinc finger protein 84
  ENST ID: ENST00000535439
  CDS Start-End: 184-621
atcctggtccctacaaataagcctgctcatgtgagataagaaaggagttcctggaaccaggaattcattctcagtgtagaagacctagctgagacctcactccacagttttggggcagaagcagaagagacgcacagtagaaccgatctcagccttgctgatcatctcgtacagcagcagaaaatgaccatgttacaggagtcattctcatttgacgatttatctgtggacttcacccaaaaggagtggcagctactggatccctctcagaagaatttatacaaggatgtgatgttggagaactatagcagcctagtgtcactggggtatgaagttatgaaaccagatgtcatcttcaaattggagcaaggagaagagccgtgggtaggagatggagaaattccaagttcagattctccagtgagtggctgttttctgccacatggagaaacatggtctgcagtgagagagaagaatgaagccatgatgaaagcaaaatcaagaaagagtcccgattgtgttccagtacctggttcttctggtcttcatgttcaggtccacctctgcccttttcatgtcttgattgttgaattcttctgtgagatactccaaatatcctaataaattctcatgtttgcttcatctgg

SEQ ID NO: 203998 - DNA, 540 bp, Homo sapiens
  Payload ID: 20232
  Gene Name: zinc finger protein 84
  ENST ID: ENST00000542874
  CDS Start-End: 191-445
tccacagatcctggtccctacaaataagcctgctcatgtgagataagaaaggagttcctggaaccaggaattcattctcagtgtagaagacctagctgagacctcactccacagttttggggcagaagcagaagagacgcacagtagaaccgatctcagccttgctgatcatctcgtacagcagcagaaaatgaccatgttacaggagtcattctcatttgacgatttatctgtggacttcacccaaaaggagtggcagctactggatccctctcagaagaatttatacaaggatgtgatgttggagaactatagcagcctagtgtcactggggtatgaagttatgaaaccagatgtcatcttcaaattggagcaaggagaagagccgtgggtaggagatggagaaattccaagttcagattctccagggacctccatagtatgacactactgctgcctgttcagttatttcttcctatctcccattcatgaagtctggaaagtagatggtaacatgatgtggcaccaggataaccaaga

SEQ ID NO: 203999 - DNA, 3237 bp, Homo sapiens
  Payload ID: 20232
  Gene Name: zinc finger protein 84
  Uniprot ID: P51523
  ENST ID: ENST00000539354
  CDS Start-End: 347-2563
gtgtgcagtccccgactcgtcccggcccgttcggagccgcccgggagcgcacaaaggccgacggtttgggcgcgtgcgcgggacacgggggacgggcggtgtcacgtgatcgcgaggccgcgggcgcgcgggcgcgactcggcggcggcgtctttttccacagatcctggtccctacaaataagcctgctcatgtgagataagaaaggagttcctggaaccaggaattcattctcagtgtagaagacctagctgagacctcactccacagttttggggcagaagcagaagagacgcacagtagaaccgatctcagccttgctgatcatctcgtacagcagcagaaaatgaccatgttacaggagtcattctcatttgacgatttatctgtggacttcacccaaaaggagtggcagctactggatccctctcagaagaatttatacaaggatgtgatgttggagaactatagcagcctagtgtcactggggtatgaagttatgaaaccagatgtcatcttcaaattggagcaaggagaagagccgtgggtaggagatggagaaattccaagttcagattctccagaagtctggaaagtagatggtaacatgatgtggcaccaggataaccaagacaagcttaaaattataaaaagaggtcatgaatgtgatgcatttggaaaaaatttcaatctgaacatgaactttgttcctttaaggaaatcaaacagtgaaggtgacttagatggattgattttaaaacatcatttagatttgcttattccaaaaggagattatggaaaagcagaatcagatgactttaatgtgtttgataatttttttctccattccaagcctgaggatactgatacctggttaaaatactatgactgtgataaatataaagagagctataaaaagtcacagattatcatatatcatagaaatcgtttaggggagaaactctatgaatgcagtgaatgtaggaagcgcttcagtaagaaaccaagtctcattaaacatcagagcagacatataagagacatagcctttggctgtggtaattgtggcaaaacctttccccagaagtctcagtttattacacatcacagaactcatacaggagaaaaaccttataattgtagccagtgtgggaaagccttctcccaaaagtcacagctcacatcccatcagcggacacatacaggagagaaaccttatgagtgtggtgaatgtgggaaagccttctcccggaagtcacatctcatatcgcattggagaacacacacaggagagaaaccctatggatgcaatgaatgtgggagggcctttagtgaaaagtccaatctcattaaccatcagagaattcataccggtgagaagccttttgaatgcagggaatgtgggaaagccttcagcaggaagtcacaactcgttacacatcacagaactcacacaggaacaaaaccctttggatgtagtgattgtagaaaagcattctttgagaagtcagagcttattagacatcagacaattcatactggagagaaaccctatgaatgcagcgagtgtaggaaagcatttagagagaggtcgagtctcattaatcatcagagaacacatacaggagagaaacctcatggatgcattcagtgtgggaaggccttctcccagaagtcacatctcatatcacatcagatgacacacacaggagaaaaaccctttatatgcagtaaatgtgggaaagccttcagcaggaaatcacagctcgttagacatcagagaactcatacgggagaaaaaccgtatgaatgcagtgagtgtgggaaagctttcagtgaaaaattaagtctcactaatcatcaaagaattcatacaggagaaaaaccatatgtatgcagtgaatgtgggaaagccttttgtcagaagtcacatctcatatcacatcagaggacacatacaggggagaaaccctatgaatgcagtgaatgtgggaaggcctttggtgagaagtcaagtcttgcaactcatcagagaactcatactggagaaaaaccgtatgaatgcagggactgtgaaaaagctttctcccagaaatcacagctaaatacccatcagagaattcacactggagagaaaccctatgaatgcagtctttgtaggaaagctttttttgagaagtcggagctaattagacatctgagaactcatacaggagaaaaaccttatgaatgcaatgaatgtagaaaagccttcagggagaagtcaagtctcatcaatcatcagagaatacatacaggagagaagccttttgaatgcagtgagtgtggcaaagctttctctcggaagtcacaccttataccacatcaaaggacacatacgggtgagaaaccctatggatgcagtgaatgtaggaaggccttctctcagaagtcacagctggttaatcatcagagaattcatacaggagagaagccttatcgatgcattgaatgtgggaaagctttctcacagaagtcacagctcatcaatcatcagagaactcatacagtaaaaaaatcctaggaatacagttaatagtagtctttgacagatcatcttggacttcaggaaatgcaattatgataacgtttgtagacagtcacgtcatgttaggtgtttgtactccatgaggatgagaactctaaatgaggtggtgtatggaaagccgatcataattcatagagtagagtgaacctatgactgcagtggatctcaaaaacttttaaaaccatagacaagccttatagagtagaacattcacagcaaagaagaatcctgtgaatgtccaaaagccttccagaagtcaagtctcttaagctattagaaatattcccactggggatgagggaaaaccccatgaatgcgggaaatgaggcaatatttttaagaaatgacagttcattgtacataagaaaatgctcttaggaatgaagttctatgaaagtactaaatatgggacagtgcaacaagtaacgagactattttgtattttggagaattcatattatggagaacctaacaatttaaagacactgggaacacttgcccctcagtatagtactgtcaagggaagccatacactttttgtagacatgggtaccaaaaatacccaattctaagtggttgacagatgttcactttgaagtgtgaagttttaaaaatacgtgaataaattggttattgaaacatctaagaca

SEQ ID NO: 204000 - DNA, 960 bp, Homo sapiens
  Payload ID: 20232
  Gene Name: zinc finger protein 84
  ENST ID: ENST00000540031
  CDS Start-End: 251-960
ggacgggcggtgtcacgtgatcgcgaggccgcgggcgcgcgggcgcgactcggcggcggcgtcttttatcctggtccctacaaataagcctgctcatgtgagataagaaaggagttcctggaaccaggaattcattctcagtgtagaagacctagctgagacctcactccacagttttggggcagaagcagaagagacgcacagtagaaccgatctcagccttgctgatcatctcgtacagcagcagaaaatgaccatgttacaggagtcattctcatttgacgatttatctgtggacttcacccaaaaggagtggcagctactggatccctctcagaagaatttatacaaggatgtgatgttggagaactatagcagcctagtgtcactggggtatgaagttatgaaaccagatgtcatcttcaaattggagcaaggagaagagccgtgggtaggagatggagaaattccaagttcagattctccagaagtctggaaagtagatggtaacatgatgtggcaccaggataaccaagacaagcttaaaattataaaaagaggtcatgaatgtgatgcatttggaaaaaatttcaatctgaacatgaactttgttcctttaaggaaatcaaacagtgaaggtgacttagatggattgattttaaaacatcatttagatttgcttattccaaaaggagattatggaaaagcagaatcagatgactttaatgtgtttgataatttttttctccattccaagcctgaggatactgatacctggttaaaatactatgactgtgataaatataaagagagctataaaaagtcacagattatcatatatcatagaaatcgtttaggggagaaactctatgaatgcagtgaatgtaggaagcgcttcagtaagaaaccaagtctcattaaacatcagagcagacatataagagacatagcctttggctg

SEQ ID NO: 204001 - DNA, 558 bp, Homo sapiens
  Payload ID: 20232
  Gene Name: zinc finger protein 84
  ENST ID: ENST00000536123
  CDS Start-End: 394-558
ggcggcggcgtcttttgtgagttcaagacctaggcttccactgttccattttactatattctgtttccctgagagtgctgtttcagttatatagcaagcgtacctctggccttagatgatcgtgaattccaagttcctagcaagagagaaagagatttcatgtgcaatgtgaatataccagttgaagtacatttctcccgaagtccacagatcctggtccctacaaataagcctgctcatgtgagataagaaaggagttcctggaaccaggaattcattctcagtgtagaagacctagctgagacctcactccacagttttggggcagaagcagaagagacgcacagtagaaccgatctcagccttgctgatcatctcgtacagcagcagaaaatgaccatgttacaggagtcattctcatttgacgatttatctgtggacttcacccaaaaggagtggcagctactggatccctctcagaagaatttatacaaggatgtgatgttggagaactatagcagcctagtgtcactggggtatgaagttatgaaaccagat

SEQ ID NO: 204002 - DNA, 3503 bp, Homo sapiens
  Payload ID: 20233
  Gene Name: zinc finger protein 841
  Uniprot ID: Q6ZN19
  ENST ID: ENST00000389534
  CDS Start-End: 88-2862
tgactttcagatttgacttttaaagaattaattatattgactgagagagaggcccaggagagaaagaagaaagaaaaggagccagggatggctcttcctcagggatctttgacattcagggatgtggctgtagaattctctcaggaggagtggaaatgcctggaccctgttcagaaagctttgtacagggacgtgatgttggagaactacaggaacctcggcttcctgggactctgtcttcctgacctgaatattatctccatgttggagcaagggaaagagccctggactgtggtgagccaagtgaaaatagcgaggaacccaaactgtggggaatgcatgaaaggcgtgatcaccggtatctctcctaaatgtgtgatcaaggaattaccaccaatacagaacagtaacacaggagaaaaattccaagcagtgatgttggaaggacatgaaagctatgacactgaaaatttttacttcagggaaatccggaaaaatctacaggaagttgactttcaatggaaagatggtgaaataaattataaagaagggccgatgacccataaaaacaatcttactggtcaaagagttcgacatagtcaaggggacgtagaaaacaagcatatggaaaatcagcttatattaaggtttcagtccggtctgggtgaattgcagaaatttcaaactgcagagaaaatttatggatgtaatcaaattgagaggacagttaataattgttttttagcttcaccacttcaaagaatttttcctggtgtccaaaccaacatttctaggaaatatgggaatgattttttgcaactttcgttacctacacaagacgagaaaacacatattagggaaaaaccttacataggtaatgagtgtggcaaagccttcagagtgtcttcaagtcttattaatcatcagatgatacatactacagagaaaccttacagatgcaatgagtctggtaaagcctttcatcggggctcactactaacagtacatcagatagtccatacaagagggaaaccataccaatgtgatgtatgtggcaggatcttcagacaaaattcagatcttgtaaatcaccggagaagtcacactggagacaaaccctacatatgtaatgaatgtggcaagtcctttagtaaaagttcccaccttgcagttcatcagagaattcatactggagagaaaccttacaaatgtaatcgatgtgggaagtgctttagtcaaagttcctctcttgcaactcatcagacagttcatactggagacaaaccctacaaatgtaatgaatgtggcaaaacctttaaacggaactcaagcctcactgcacatcatataatccatgcaggaaagaaaccatatacatgtgatgtatgtggcaaggtcttttatcagaattcacaacttgtaaggcaccagataattcatactggagagacaccttacaaatgtaatgaatgtggcaaggtcttctttcaacgttcacgtcttgcagggcaccggagaattcatactggagagaaaccctacaaatgtaatgaatgtggcaaggtcttcagtcaacattcacatcttgcagtgcatcagagagttcatactggagagaaaccttacaaatgtaatgaatgtggcaaagcctttaattggggctcattactaactgtacatcagagaattcataccggagagaaaccttacaaatgtaatgtgtgtggcaaggtctttaattacggtggatacctttcggttcatatgagatgtcatactggagagaaacctctccattgtaataaatgtggcatggtcttcacttactattcatgcctagcacgtcatcaaagaatgcataccggagagaaaccttacaaatgtaatgtgtgtggcaaggtcttcattgacagtggaaacctttcaattcataggcgaagtcataccggagagaaacctttccagtgtaacgaatgcggcaaggtcttcagttactactcatgcctagcacgtcatcggaaaattcataccggagagaaaccttataaatgtaatgattgtggcaaagcctatactcagcgttcaagcctcactaaacatctggtaattcatactggagagaacccttaccactgtaatgaatttggtgaggcttttatccaaagttcaaaacttgcaagatatcacagaaatcctactggggagaaaccacacaaatgtagtgaatgtggtagaacttttagtcataaaacaagtctggtgtaccatcagagaagacatactggagagatgccatacaaatgtattgaatgtgggaaagtctttaactccactacaaccctggcaaggcatcggagaattcatactggagagaaaccttacaaatgtaatgaatgtggcaaggtcttccgttatcgctcaggcctcgcacgtcattggagtattcatactggagagaaaccttacaaatgtaatgagtgtggcaaagcctttagagtacgttcaattctgcttaatcatcagatgatgcatactggagagaaaccttataaatgtaatgaatgtggtaaagcttttatcgaaaggtcaaacttggtttaccatcagagaaaccatactggagagaagccatacaaatgtatggaatgtggcaaggcgtttgggcggcggtcttgcctcactaaacaccaacgaattcattctagtgaaaaaccttataaatgtaatgagtgtggcaaatcttacattagtcgctcaggcctcactaaacatcagataaaacatgctggagagaaccttacaactaaactcaatgtggaaaggccgttagatgttgtcctaacctctgggatccccaaataatttatacttactcatatagcttgtatatttgtcctttccctttgaagtctcatgtggaattgtagtaatctccagtattggaggtggagcctagtgggaggtgattggatgatgggggtggctttctcaagaaagttttagtaccatccccttgttgctgtccttgtgatagttctcatgaggtctggctcatgcctgtaatcccagcactttgggaggctgaggtgggcggatcacttgaggtcaggagttcaagagcagcctggccaacatggtgaaaccctgtttctgccaaaaatacaaaaattagctgggcttcgtggcgggtactggtagtaccagctactcgagaggctgagtcaggagaattgcttgaaccctggaggcggaggttgcagtgagccgagatcgcgccactgcactctagcctgggtgacagagtgagactccatcacgcacacgcacgcacgaaagtgaatggcacctccctcttgtttgttcttctggccatgtgacatgcccttcacctcccaccatcattttaaccttcctcaggtttcccgagagggtgaacagacgtcagcgccatgtttcctataaagcctgcaaaattgtgagtcaattaaacctctttatacatt

SEQ ID NO: 204003 - DNA, 3620 bp, Homo sapiens
  Payload ID: 20233
  Gene Name: zinc finger protein 841
  Uniprot ID: Q6ZN19
  ENST ID: ENST00000426391
  CDS Start-End: 553-2979
acacccggaagcagatcgcgctggggaaaggccacgtcgctatgagtgtgtttcagtctacctggattaaacgtttgcttctcttcgtctaccttgattaaacgtgcacttcgcagtcctcggttctccatacccgtgacctggggatcgctacggaccttaaaatacccgcaacagccccttcgtcccaagctggagagcagtggcatgatctcggctcactgcagcttctacttcctggcctcaagcagtctttccacctcagcctctcaacgcactggaattacagatgtgagccaccacactaggcctacaagtggtccttacaccagattaatttatcttgaaatggcgggcaactgaatcgcacacctcaatctatgatttgacttttaaagaattaattatattgactgagagagaggcccaggagagaaagaagaaagaaaaggagccagggatggctcttcctcaggtatctctcctaaatgtgtgatcaaggaattaccaccaatacagaacagtaacacaggagaaaaattccaagcagtgatgttggaaggacatgaaagctatgacactgaaaatttttacttcagggaaatccggaaaaatctacaggaagttgactttcaatggaaagatggtgaaataaattataaagaagggccgatgacccataaaaacaatcttactggtcaaagagttcgacatagtcaaggggacgtagaaaacaagcatatggaaaatcagcttatattaaggtttcagtccggtctgggtgaattgcagaaatttcaaactgcagagaaaatttatggatgtaatcaaattgagaggacagttaataattgttttttagcttcaccacttcaaagaatttttcctggtgtccaaaccaacatttctaggaaatatgggaatgattttttgcaactttcgttacctacacaagacgagaaaacacatattagggaaaaaccttacataggtaatgagtgtggcaaagccttcagagtgtcttcaagtcttattaatcatcagatgatacatactacagagaaaccttacagatgcaatgagtctggtaaagcctttcatcggggctcactactaacagtacatcagatagtccatacaagagggaaaccataccaatgtgatgtatgtggcaggatcttcagacaaaattcagatcttgtaaatcaccggagaagtcacactggagacaaaccctacatatgtaatgaatgtggcaagtcctttagtaaaagttcccaccttgcagttcatcagagaattcatactggagagaaaccttacaaatgtaatcgatgtgggaagtgctttagtcaaagttcctctcttgcaactcatcagacagttcatactggagacaaaccctacaaatgtaatgaatgtggcaaaacctttaaacggaactcaagcctcactgcacatcatataatccatgcaggaaagaaaccatatacatgtgatgtatgtggcaaggtcttttatcagaattcacaacttgtaaggcaccagataattcatactggagagacaccttacaaatgtaatgaatgtggcaaggtcttctttcaacgttcacgtcttgcagggcaccggagaattcatactggagagaaaccctacaaatgtaatgaatgtggcaaggtcttcagtcaacattcacatcttgcagtgcatcagagagttcatactggagagaaaccttacaaatgtaatgaatgtggcaaagcctttaattggggctcattactaactgtacatcagagaattcataccggagagaaaccttacaaatgtaatgtgtgtggcaaggtctttaattacggtggatacctttcggttcatatgagatgtcatactggagagaaacctctccattgtaataaatgtggcatggtcttcacttactattcatgcctagcacgtcatcaaagaatgcataccggagagaaaccttacaaatgtaatgtgtgtggcaaggtcttcattgacagtggaaacctttcaattcataggcgaagtcataccggagagaaacctttccagtgtaacgaatgcggcaaggtcttcagttactactcatgcctagcacgtcatcggaaaattcataccggagagaaaccttataaatgtaatgattgtggcaaagcctatactcagcgttcaagcctcactaaacatctggtaattcatactggagagaacccttaccactgtaatgaatttggtgaggcttttatccaaagttcaaaacttgcaagatatcacagaaatcctactggggagaaaccacacaaatgtagtgaatgtggtagaacttttagtcataaaacaagtctggtgtaccatcagagaagacatactggagagatgccatacaaatgtattgaatgtgggaaagtctttaactccactacaaccctggcaaggcatcggagaattcatactggagagaaaccttacaaatgtaatgaatgtggcaaggtcttccgttatcgctcaggcctcgcacgtcattggagtattcatactggagagaaaccttacaaatgtaatgagtgtggcaaagcctttagagtacgttcaattctgcttaatcatcagatgatgcatactggagagaaaccttataaatgtaatgaatgtggtaaagcttttatcgaaaggtcaaacttggtttaccatcagagaaaccatactggagagaagccatacaaatgtatggaatgtggcaaggcgtttgggcggcggtcttgcctcactaaacaccaacgaattcattctagtgaaaaaccttataaatgtaatgagtgtggcaaatcttacattagtcgctcaggcctcactaaacatcagataaaacatgctggagagaaccttacaactaaactcaatgtggaaaggccgttagatgttgtcctaacctctgggatccccaaataatttatacttactcatatagcttgtatatttgtcctttccctttgaagtctcatgtggaattgtagtaatctccagtattggaggtggagcctagtgggaggtgattggatgatgggggtggctttctcaagaaagttttagtaccatccccttgttgctgtccttgtgatagttctcatgaggtctggctcatgcctgtaatcccagcactttgggaggctgaggtgggcggatcacttgaggtcaggagttcaagagcagcctggccaacatggtgaaaccctgtttctgccaaaaatacaaaaattagctgggcttcgtggcgggtactggtagtaccagctactcgagaggctgagtcaggagaattgcttgaaccctggaggcggaggttgcagtgagccgagatcgcgccactgcactctagcctgggtgacagagtgagactccatcacgcacacgcacgcacgaaagtgaatggcacctccctcttgtttgttcttctggccatgtgacatgcccttcacctcccaccatcattttaaccttcctcaggtttcccgagagggtgaacagacgtcagcgccatgtttcctataaagcctgcaaaattgtgagtcaattaaacctctttatacatt

SEQ ID NO: 204004 - DNA, 721 bp, Homo sapiens
  Payload ID: 20233
  Gene Name: zinc finger protein 841
  ENST ID: ENST00000594440
  CDS Start-End: 451-721
gcagatcgcgctggggaaaggccacgtcgctatgagtgtgtttcagtctacctggattaaacgtttgcttctcttcgtctaccttgattaaacgtgcacttcgcagtcctcggttctccatacccgtgacctggggatcgctacggaccttaaaatacccgcaacagccccttcgtcccaagctggagagcagtggcatgatctcggctcactgcagcttctacttcctggcctcaagcagtctttccacctcagcctctcaacgcactggaattacagatgtgagccaccacactaggcctacaagtggtccttacaccagattaatttatcttgaaatggcgggcaactgaatcgcacacctcaatctatgatttgacttttaaagaattaattatattgactgagagagaggcccaggagagaaagaagaaagaaaaggagccagggatggctcttcctcagggatctttgacattcagggatgtggctgtagaattctctcaggaggagtggaaatgcctggaccctgttcagaaagctttgtacagggacgtgatgttggagaactacaggaacctcggcttcctgggactctgtcttcctgacctgaatattatctccatgttggagcaagggaaagagccctggactgtggtgagccaagtgaaaatagcgaggaacccaaactgtggggaatgcatgaaaggcgtgatcaccg

SEQ ID NO: 204005 - DNA, 3819 bp, Homo sapiens
  Payload ID: 20233
  Gene Name: zinc finger protein 841
  Uniprot ID: Q6ZN19
  ENST ID: ENST00000594295
  CDS Start-End: 404-3178
ggagtagagcataaaggaggggagaaatggggcaagaaatgactgactgtcactacaagatatgtctttggtgttttttttggctttgttctgttttgttttggggggggacatggtctctctctgccgcctaggctggagagcagtggcatgatctcggctcactgcagcttctacttcctggcctcaagcagtctttccacctcagcctctcaacgcactggaattacagatgtgagccaccacactaggcctacaagtggtccttacaccagattaatttatcttgaaatggcgggcaactgaatcgcacacctcaatctatgatttgacttttaaagaattaattatattgactgagagagaggcccaggagagaaagaagaaagaaaaggagccagggatggctcttcctcagggatctttgacattcagggatgtggctgtagaattctctcaggaggagtggaaatgcctggaccctgttcagaaagctttgtacagggacgtgatgttggagaactacaggaacctcggcttcctgggactctgtcttcctgacctgaatattatctccatgttggagcaagggaaagagccctggactgtggtgagccaagtgaaaatagcgaggaacccaaactgtggggaatgcatgaaaggcgtgatcaccggtatctctcctaaatgtgtgatcaaggaattaccaccaatacagaacagtaacacaggagaaaaattccaagcagtgatgttggaaggacatgaaagctatgacactgaaaatttttacttcagggaaatccggaaaaatctacaggaagttgactttcaatggaaagatggtgaaataaattataaagaagggccgatgacccataaaaacaatcttactggtcaaagagttcgacatagtcaaggggacgtagaaaacaagcatatggaaaatcagcttatattaaggtttcagtccggtctgggtgaattgcagaaatttcaaactgcagagaaaatttatggatgtaatcaaattgagaggacagttaataattgttttttagcttcaccacttcaaagaatttttcctggtgtccaaaccaacatttctaggaaatatgggaatgattttttgcaactttcgttacctacacaagacgagaaaacacatattagggaaaaaccttacataggtaatgagtgtggcaaagccttcagagtgtcttcaagtcttattaatcatcagatgatacatactacagagaaaccttacagatgcaatgagtctggtaaagcctttcatcggggctcactactaacagtacatcagatagtccatacaagagggaaaccataccaatgtgatgtatgtggcaggatcttcagacaaaattcagatcttgtaaatcaccggagaagtcacactggagacaaaccctacatatgtaatgaatgtggcaagtcctttagtaaaagttcccaccttgcagttcatcagagaattcatactggagagaaaccttacaaatgtaatcgatgtgggaagtgctttagtcaaagttcctctcttgcaactcatcagacagttcatactggagacaaaccctacaaatgtaatgaatgtggcaaaacctttaaacggaactcaagcctcactgcacatcatataatccatgcaggaaagaaaccatatacatgtgatgtatgtggcaaggtcttttatcagaattcacaacttgtaaggcaccagataattcatactggagagacaccttacaaatgtaatgaatgtggcaaggtcttctttcaacgttcacgtcttgcagggcaccggagaattcatactggagagaaaccctacaaatgtaatgaatgtggcaaggtcttcagtcaacattcacatcttgcagtgcatcagagagttcatactggagagaaaccttacaaatgtaatgaatgtggcaaagcctttaattggggctcattactaactgtacatcagagaattcataccggagagaaaccttacaaatgtaatgtgtgtggcaaggtctttaattacggtggatacctttcggttcatatgagatgtcatactggagagaaacctctccattgtaataaatgtggcatggtcttcacttactattcatgcctagcacgtcatcaaagaatgcataccggagagaaaccttacaaatgtaatgtgtgtggcaaggtcttcattgacagtggaaacctttcaattcataggcgaagtcataccggagagaaacctttccagtgtaacgaatgcggcaaggtcttcagttactactcatgcctagcacgtcatcggaaaattcataccggagagaaaccttataaatgtaatgattgtggcaaagcctatactcagcgttcaagcctcactaaacatctggtaattcatactggagagaacccttaccactgtaatgaatttggtgaggcttttatccaaagttcaaaacttgcaagatatcacagaaatcctactggggagaaaccacacaaatgtagtgaatgtggtagaacttttagtcataaaacaagtctggtgtaccatcagagaagacatactggagagatgccatacaaatgtattgaatgtgggaaagtctttaactccactacaaccctggcaaggcatcggagaattcatactggagagaaaccttacaaatgtaatgaatgtggcaaggtcttccgttatcgctcaggcctcgcacgtcattggagtattcatactggagagaaaccttacaaatgtaatgagtgtggcaaagcctttagagtacgttcaattctgcttaatcatcagatgatgcatactggagagaaaccttataaatgtaatgaatgtggtaaagcttttatcgaaaggtcaaacttggtttaccatcagagaaaccatactggagagaagccatacaaatgtatggaatgtggcaaggcgtttgggcggcggtcttgcctcactaaacaccaacgaattcattctagtgaaaaaccttataaatgtaatgagtgtggcaaatcttacattagtcgctcaggcctcactaaacatcagataaaacatgctggagagaaccttacaactaaactcaatgtggaaaggccgttagatgttgtcctaacctctgggatccccaaataatttatacttactcatatagcttgtatatttgtcctttccctttgaagtctcatgtggaattgtagtaatctccagtattggaggtggagcctagtgggaggtgattggatgatgggggtggctttctcaagaaagttttagtaccatccccttgttgctgtccttgtgatagttctcatgaggtctggctcatgcctgtaatcccagcactttgggaggctgaggtgggcggatcacttgaggtcaggagttcaagagcagcctggccaacatggtgaaaccctgtttctgccaaaaatacaaaaattagctgggcttcgtggcgggtactggtagtaccagctactcgagaggctgagtcaggagaattgcttgaaccctggaggcggaggttgcagtgagccgagatcgcgccactgcactctagcctgggtgacagagtgagactccatcacgcacacgcacgcacgaaagtgaatggcacctccctcttgtttgttcttctggccatgtgacatgcccttcacctcccaccatcattttaaccttcctcaggtttcccgagagggtgaacagacgtcagcgccatgtttcctataaagcctgcaaaattgtgagtcaattaaacctctttatacatt

SEQ ID NO: 204006 - DNA, 2027 bp, Homo sapiens
  Payload ID: 20233
  Gene Name: zinc finger protein 841
  ENST ID: ENST00000601738
  CDS Start-End: 1-1538
agaacagtaacacaggagaaaaattccaagcagtgatgttggaaggacatgaaagctatgacactgaaaatttttacttcagggaaatccggaaaaatctacaggaagttgactttcaatggaaagatggtgaaataaattataaagaagggccgatgacccataaaaacaatcttactggtcaaagagttcgacatagtcaaggggacgtagaaaacaagcatatggaaaatcagcttatattaaggtttcagtccggtctgggtgaattgcagaaatttcaaactgcagagaaaatttatggatgtaatcaaattgagaggacagttaataattgttttttagcttcaccacttcaaagaatttttcctggtgtccaaaccaacatttctaggaaatatgggaatgattttttgcaactttcgttacctacacaagacgagaaaacacatattagggaaaaaccttacataggtaatgagtgtggcaaagccttcagagtgtcttcaagtcttattaatcatcagatgatacatactacagagaaaccttacagatgcaatgagtctggtaaagcctttcatcggggctcactactaacagtacatcagatagtccatacaagagggaaaccataccaatgtgatgtatgtggcaggatcttcagacaaaattcagatcttgtaaatcaccggagaagtcacactggagacaaaccctacatatgtaatgaatgtggcaagtcctttagtaaaagttcccaccttgcagttcatcagagaattcatactggagagaaaccttacaaatgtaatcgatgtgggaagtgctttagtcaaagttcctctcttgcaactcatcagacagttcatactggagacaaaccctacaaatgtaatgaatgtggcaaaacctttaaacggaactcaagcctcactgcacatcatataatccatgcaggaaagaaaccatatacatgtgatgtatgtggcaaggtcttttatcagaattcacaacttgtaaggcaccagataattcatactggagagacaccttacaaatgtaatgaatgtggcaaggtcttccgttatcgctcaggcctcgcacgtcattggagtattcatactggagagaaaccttacaaatgtaatgagtgtggcaaagcctttagagtacgttcaattctgcttaatcatcagatgatgcatactggagagaaaccttataaatgtaatgaatgtggtaaagcttttatcgaaaggtcaaacttggtttaccatcagagaaaccatactggagagaagccatacaaatgtatggaatgtggcaaggcgtttgggcggcggtcttgcctcactaaacaccaacgaattcattctagtgaaaaaccttataaatgtaatgagtgtggcaaatcttacattagtcgctcaggcctcactaaacatcagataaaacatgctggagagaaccttacaactaaactcaatgtggaaaggccgttagatgttgtcctaacctctgggatccccaaataatttatacttactcatatagcttgtatatttgtcctttccctttgaagtctcatgtggaattgtagtaatctccagtattggaggtggagcctagtgggaggtgattggatgatgggggtggctttctcaagaaagttttagtaccatccccttgttgctgtccttgtgatagttctcatgaggtctggctcatgcctgtaatcccagcactttgggaggctgaggtgggcggatcacttgaggtcaggagttcaagagcagcctggccaacatggtgaaaccctgtttctgccaaaaatacaaaaattagctgggcttcgtggcgggtactggtagtaccagctactcgagaggctgagtcaggagaattgcttgaaccctggaggcggaggttgcagtgagccgagatcgcgccactgcactctagcctgggtgacagagtgagactccatcacgcacacgcacgcacgaaagtgaatggcacctccc

SEQ ID NO: 204007 - DNA, 2137 bp, Homo sapiens
  Payload ID: 20234
  Gene Name: zinc finger protein 843
  Uniprot ID: Q8N446
  ENST ID: ENST00000315678
  CDS Start-End: 726-1772
tcgtttctccctgtcttggtgagggccaggggacaggtcggggcagtatttgggggaagcgagaggcaagcagggcgggctggatacggagcgccctatgactgaggttagggaggacgcccgagacccccggcatcctagtcctgggccgtgggctccggacgccgggccaggacgcctccagctcccagggtcccttgcggggaccatgtttccccacaggccccgcggctgccgggtcctcgccacgtccccttcccggagctacgcgcccggctgggttccgatccgccgtgtctctcgggggcggctcgcggggcaggggcgctcccggctcggccgcacgcccaagtgtcatgcgggaggtacgcgggcacgggacctcaccggagagaatgatggctctgggatctgaaatctttccttccgcaggaactggacacggcagtgaggaccagcgtatccaagaggatggacttagtgatggggaacacccagggacatgcccgagagcctcaagaaacaccttcagatgacattgcccagcgtcttacattagagaactctccagacagcccccgaggcctggggccgggtgctgctcccagactgtgagctcgtggccacgggaagcctgagtgcggcagaggccccacagctgcgccaagtgcggcaaagcctcccgtacagttactccctgagcggtcatctccgaagccctgctcatgagaagcctcccctttgccctgactgtggaaagcgtttcagccagagctcctacctgctgcagcaccggcagattcacccagggccgtcagccctgcaagtgcaaggcctgcgggaggggttttactcagagcgcatccctcctccagcactggcgggtccacagcgactggcgagagaccttgtcgctgtccccagtgcggcaagacctgctgtggccgctccaacctcatcaagcaccagcgagtccactcgggagaagccattcgtctgcgggagtgcggcaagggtttagcggccagctctgctgctggctcaccaaggagcacacactggccgaagccctgcgtctgtccccagtaccagcaggtttttggggaccggtggaagctgatcggccaccagcgaattcacacaggagagtgtgtcccttctgctgctgcagctgcggtgacagtgtcaatgagaagacctccctctcccagcgcgtccttccgcacccaggggagaagacctgcaggggtgggagcgtggagagcgtcagcctcgcacccagctcagtcgccccggacagcacctctgggctccggccctgtgggagccccgggtccttccttcaacatctgcccccatccacactcctgccccgacctcccttcctttatcctggccccccactcagtctccagcctctggttccatccggccttcccgcagtgcctgcagtgcctctgggaggcctggaagttgcccaggttccgccagccacccagccggcagctcagcaggagggggcgatggggcccagaagctgtgcgagcgcgggacgggactcgcgggaggcggttcaggccccaggctaccctgagccagcccggaaggcctcgcagcacagagcggccggaccgctcggcgaggccagggccaggcttcagcgacagtgccgagctcctccaccgccctcgaacccacactggagaggagccctaccagtgtttccggtgtggaaggcctccagccggaggtccaacctggcccgacactgaagaaccagcgtgctgcagccctgggtggaattgttgcagccgccggtggactgtggatctgagatgcagtcccctccctccacacagacccgctcaggacggcttttctgtatggcagatctttctcagaagtgctgggggctattttgtttgttttttttcccctgaattctcgctcctttcccttatacattaagggatttaggcaggtgcggctgcgggcggtgactcacacctgtaatcccagcgctttaagagaccgaggtgggaggatcgcgtgagcccgaagaatttgagactagcctgggcagcctagcgagaccgcatctctgtgaaataaaaataaaacgagctggtgtggtggc

SEQ ID NO: 204008 - DNA, 3816 bp, Homo sapiens
  Payload ID: 20234
  Gene Name: zinc finger protein 843
  ENST ID: ENST00000564218
  CDS Start-End: 726-1607
tcgtttctccctgtcttggtgagggccaggggacaggtcggggcagtatttgggggaagcgagaggcaagcagggcgggctggatacggagcgccctatgactgaggttagggaggacgcccgagacccccggcatcctagtcctgggccgtgggctccggacgccgggccaggacgcctccagctcccagggtcccttgcggggaccatgtttccccacaggccccgcggctgccgggtcctcgccacgtccccttcccggagctacgcgcccggctgggttccgatccgccgtgtctctcgggggcggctcgcggggcaggggcgctcccggctcggccgcacgcccaagtgtcatgcgggaggtacgcgggcacgggacctcaccggagagaatgatggctctgggatctgaaatctttccttccgcaggaactggacacggcagtgaggaccagcgtatccaagaggatggacttagtgatggggaacacccagggacatgcccgagagcctcaagaaacaccttcagatgacattgcccagcgtcttacattagagaactctccagacagcccccgaggcctggggccgggtgctgctcccagactgtgagctcgtggccacgggaagcctgagtgcggcagaggccccacagctgcgccaagtgcggcaaagcctcccgtacagttactccctgagcggtcatctccgaagccctgctcatgagaagcctcccctttgccctgactgtggaaagcgtttcagccagagctcctacctgctgcagcaccggcagattcacccagggccgtcagccctgcaagtgcaaggcctgcgggaggggttttactcagagcgcatccctcctccagcactggcgggtccacagcgactggcgagagaccttgtcgctgtccccagtgcggcaagacctgctgtggccgctccaacctcatcaagcaccagcgagtccactcgggagaagccattcgtctgcgggagtgcggcaagggtttagcggccagctctgctgctggctcaccaaggagcacacactggccgaagccctgcgtctgtccccagtaccagcaggtttttggggaccggtggaagctgatcggccaccagcgaattcacacaggagagtgtgtcccttctgctgctgcagctgcggtgacagtgtcaatgagaagacctccctctcccagcgcgtccttccgcacccaggggagaagacctgcaggggtgggagcgtggagagcgtcagcctcgcacccagctcagtcgccccggacagcacctctgggctccggccctgtgggagccccgggtccttccttcaacatctgcccccatccacactcctgccccgacctcccttcctttatcctggccccccactcactgggattacaggcgcccaccaccacgcccagctaatttttgtatttttagtagagagggggtttgaccatgctggccaggctggtctcgaactcctgacctcaggtgatccgcccacctcagcctcccaaagtggtgggattataggcatgagccaccgcacccagcctctcttgtgctttttagataagtatttttaaaagtgtttgttagttgtcggctgggcgtggtggctcacgcctgtaatcccagcactttgggaggcagaggagggcggatcacgaggtcaggagatcgagaccagcctggctaacacggtgaaaccccgtctctactaaaaaaaatacaaaaaaattagccgggcatggtggcgggctcctgtagtcccagccaagctggaggctgaggcgggagaatggcgaatggcgtgaacccgggaggcggagcttgcagtgagccgagatcgcgccactgcactccagcctgggcgacagcgagactccgaatcaaaaaaaaaaaaaaaaaaaaagtgtttgttggtttgttggttgtcttaatgatgtgctattagagtgaggaagaaaagttaccctatgagaatttaaactgcatgaaagtctgtggtagcattactggttcagttccaagcttgctacctcagtccttgatgcctctttctcccaatccaagtagtatcaggcactgccgtctacttgttgtacctcagaagagtttttcgacagcaccccgtgccctctgtggcctgtgctctctcacaggtgcaagtcctgtcatcatgagcctggactgttgcagaagactcctagccaatctcccctgcttcccgcctctgcattctggttcagcatccatagaacctaccagttattatagattcctccctcagactccagactccaacactaaatctgatgtcagtctcctgcctgaaaggatctcctgcctgccactcccacccctccaccccctccgctgaccccagcagggcctacagaacagggttcaaatgctttagcgtggcatgcatgcttctccattgggcttcgcctgacctctgtgcctttgctggccagggcctcctgcacctctgtgtctttgcacttgatttatttctttccactgcccaaaatgacctttccccttttctgtctcccagacttgccctactcattcatatgagccccacttccacttagagactgccccacctctcgtgtcacacctgacgtggtgagtgctccagtggcattaagaacatagggcatgtctgtctggtaacctatctccccagcagactgagctccacgagagcagagaccctggtgcagggcctggctcacagtgggtgctcaattaatattacttatgtgaaggaaccacttccagctgctcaagtattctatgctaaaacttgggtttctttcatccttgttgtcctcccaagatacaatgtgtacataattggaaagttagccaaggtgactatgaaggtgaccccacccaatcaatctatgtcttcctggttactgtgcctgtcattcgatgattccacggttatgtctatagtgataacagaaaaaagcaactgaaaacaatattatttactcgggtctcgtgcatctcctccacacatttgtagaaatgagattaccacaaattgccaagatggttacatcaaattttcagcagcatcagtcataggacaaaaaggcctttgagtgtatttttaataatcagcatttactggtggcaaaatactggtttagaaaatatctgagattatggtcaggcacggtagctcacgctggtaatcccaacattttgggaggctgaggcaggtggatcacctgaagtcaggagttcaagaccagtctggccataatttcagatggtgagattatagtgaaaccccatctctactaaaaatgcaaaaattagctgggcgtgatggcacacatctacaattccagctactcaggaggctgaggctgcagtgagctgagatcgcaccactgcactctagcctgggcaacacagtgagactccatctaaaaaaaaatctgagattaataggttgccattttaggcgctctttatagaccagctggcctagtggtcctggttctgtaatatgtgaagtaaaggtctcgcaggggagcaccagtttcaaactctgtcctagtttgcagccttggctggagtgaccccagtcatgaggcaaactgagcacaagtgtgcaagtgtcatggattcagccagaacatcagtgttcccagcatcagacacagattcgggagaaatcaagtcacagtgtagagatgtattgtgatgtgtcactacactattatgaaatggaagaaaataaaattacaagcctcaacctttaaa

SEQ ID NO: 204009 - DNA, 1765 bp, Homo sapiens
  Payload ID: 20234
  Gene Name: zinc finger protein 843
  Uniprot ID: Q8N446
  ENST ID: ENST00000618063
  CDS Start-End: 354-1400
gggcgagacgcgcaaaagagagaatgatggctctgggatctgaaatctttccttccgcaggaactggacacggcagtgaggaccagcgtatccaagaggatggacttagtgatggggaacacccagggacatgcccgagagcctcaagaaacaccttcagatgacattgcccagcgtcttacattagagaactctccagacagcccccgaggcctggggccgggtgctgctcccagactgtgagctcgtggccacgggaagcctgagtgcggcagaggccccacagctgcgccaagtgcggcaaagcctcccgtacagttactccctgagcggtcatctccgaagccctgctcatgagaagcctcccctttgccctgactgtggaaagcgtttcagccagagctcctacctgctgcagcaccggcagattcacccagggccgtcagccctgcaagtgcaaggcctgcgggaggggttttactcagagcgcatccctcctccagcactggcgggtccacagcgactggcgagagaccttgtcgctgtccccagtgcggcaagacctgctgtggccgctccaacctcatcaagcaccagcgagtccactcgggagaagccattcgtctgcgggagtgcggcaagggtttagcggccagctctgctgctggctcaccaaggagcacacactggccgaagccctgcgtctgtccccagtaccagcaggtttttggggaccggtggaagctgatcggccaccagcgaattcacacaggagagtgtgtcccttctgctgctgcagctgcggtgacagtgtcaatgagaagacctccctctcccagcgcgtccttccgcacccaggggagaagacctgcaggggtgggagcgtggagagcgtcagcctcgcacccagctcagtcgccccggacagcacctctgggctccggccctgtgggagccccgggtccttccttcaacatctgcccccatccacactcctgccccgacctcccttcctttatcctggccccccactcagtctccagcctctggttccatccggccttcccgcagtgcctgcagtgcctctgggaggcctggaagttgcccaggttccgccagccacccagccggcagctcagcaggagggggcgatggggcccagaagctgtgcgagcgcgggacgggactcgcgggaggcggttcaggccccaggctaccctgagccagcccggaaggcctcgcagcacagagcggccggaccgctcggcgaggccagggccaggcttcagcgacagtgccgagctcctccaccgccctcgaacccacactggagaggagccctaccagtgtttccggtgtggaaggcctccagccggaggtccaacctggcccgacactgaagaaccagcgtgctgcagccctgggtggaattgttgcagccgccggtggactgtggatctgagatgcagtcccctccctccacacagacccgctcaggacggcttttctgtatggcagatctttctcagaagtgctgggggctattttgtttgttttttttcccctgaattctcgctcctttcccttatacattaagggatttaggcaggtgcggctgcgggcggtgactcacacctgtaatcccagcgctttaagagaccgaggtgggaggatcgcgtgagcccgaagaatttgagactagcctgggcagcctagcgagaccgcatctctgtgaaataaaaataaaacgagctggtgtggtggc

SEQ ID NO: 204010 - DNA, 6620 bp, Homo sapiens
  Payload ID: 20235
  Gene Name: zinc finger protein 844
  Uniprot ID: Q08AG5
  ENST ID: ENST00000439326
  CDS Start-End: 176-2176
gtttatccgcgggtcacattgccgttcgcctcagtctttggcccctcccgccgggtgaggttggcaccccgtttttcctgctctgagagggaccggttgccaccgccatacttctgtcgccctgtcgtctgtgttgtgactgctttggacgtgggagtcacctgaaagccaggaaatggacttggtggctttcgaggatgtggctgtgaacttcacccaggaggagtggtctttgctggatccttcccagaagaatctctacagagaagtgatgcaggaaaccttgaggaatctggcctccataggagaaaaatggaaagaccagaacattgaagatcagtacaaaaatcccaggaataatctaagaagtcttctgggagagagagttgatgaaaatacagaagaaaatcattgtggagaaacttctagccagattccagatgacacactgaacaaaaaaacttctcctggagtaaaatcatgtgaaagcagtgtgtgtggagaagtcttcgtgggtcattcttcccttaataggcacattagagctgacactgcacacaagccgtctgagtatcaggaatatggacaggagccatataagtgtcaacaacgtaagaaagccttcagatgtcacccctcctttcaaatgcaagaaaaggctcacactggagaaaaactctatgattgtaaagaatgtggaaaaaccttcatatcccattcaagcattcaaagacacatgataatgcacaatggagatggaacttataaatgtaagttttgtgggaaagcctgcccttgtctcagcatatatcttatacatgaacgagttcacactggagagaaaccatataaatgtaaacaatgtggtaaagcctttagttattcaacttcccttcaaatacatgaaagaactcacactggagagaagccttatgaatgtaaggaatgtgggaaagcattcggtagtcccaattccctttatgaacatagaagaactcacactggagagaagccatatgaatgcaaacaatgtggaaaagccttcagatggttccattcctttcaaatacatgaaagaactcacagtgaggagaaggcttatgaatgtaccaaatgtgggaaagcattcaagtgtcccagttatctttgtagacatgaagtgacccactctgggaaaaagccctgtgaatgtaaacaatgtgggaaagcattatcttatcttaactttcaaagacacatgaaaatgcacactagaatgagaccttataaatgtaagactgtggaaaagcctttgattctcccagttcgttttgaagacatgaaagaactcacactggagagaaaccttatgaatgcaagcactgtggtaaagccttcaatcgttccagttcctttcactatcatgaaaggactcacactggagagaaaccctatgaatgtaagcagtgtagtaaagccttcatttcttccacttcctttcgatatcatgaaaggactcacactggagagaaaccgtatgagtgtaagcaatgtgggaaagccttcagatctgcctcacaccttcaaatgcatggaaggactcacactcaagagaaaccctatgaatgtaagcagtgtggtaaagccttcattttttccacttcctttcgatatcatgaaaggactcacactggagagaaaccctatgagtgtaagcaatgtgggaaagccttcacatctgcctcacaccttcaaatgcatgaaaggactcacactggaaagcaactgtatgaatctaaacaatgtgaaaaaacctttggatctgtcagaaaccttcaaattcatgaaaagacacaccctggagagaaaccctataaggaatatggaaaagcattcaacaatttctcttcctttcaaatacatgcaacaatgcacagaggacagaatgcctatgaatgtaaagagtgtgacaaagcattcatatctgccaagatccttcgagtacatgcaagaacacaccctggagagaaaccctatgaatgtaaggaatgcggaaaagcgttcaattatttttcttctttgcgtatacacaaaaggatgcacactggagagaaaccatattaatgtaaggattgtgggaaagcattcagtttgcctggttcctttcgtagacataaaagggctcacactggagtgaaaccgtatgaatgcaaggaatgtggcaaagccttcacttcttctggttcctttcagtgtcataaaaggattcacactggagagaaaccctatgagtgtaagcagtgtggtaaagccttcatttcttccactgccattcgtagacatgaaaggactcacactggagagaaaccctatgagtgtaagcaatgtggaaaagcctttatttctttcagttccattcagtaccatgaaaggactcacactggagagaaacagtatgagtgtaagcagtgtggtaaagccttcatgtcttctactgcatttcagtatcatgaaaagacccacaccagagagaaacactatgaatgtaagcagtgtgggaaagccttcatttcttccggtagccttcgatatcatgaaaggactcacactggagagaaaccctatgaatgtaagcagtgtggtaaagccttcagatctgccactcaacttcagatgcatagaaagattcacactggcgagaaaccctatgaatgtaagcaatgtgggaaagcctacagatctgtctcacaacttctggtgcatgaaaggactcacactgtagagcaaccctatgaatataagcaatatgggaaagccttcagatttgctaagaaccttcaaatacagacaatgaatgtaaacaattaaatgtttatagcagctgcatactaacatgttattctgtattttttttttctttttgagacagagtctcgctctgtcacccaggctggagtgcagtggcgtgatctcagctcactgcaagctccacctcctgggttcacgccattctcctgcctcagtctcctgagtagctgggactacaggtgcctgccaccacacccggctgattttttgtattttttagtagagacggagtttcatcgtgttagccaggatggtctcaatctcctgacctcgtgatctgcccgcctcagtctcccaaagtgctgggattacaggtatgagccaccgtgcccggccgttattctctattttttgttgttgtttgagatgagtcttgttctgttgcccaggctggagtgcagtggcatgatctcgcctccgggttcaagcaattctcctgcctcaggctcctgaggaaaaagattcctaggattacaggtgtgcaccaccacacttggctaatttttatatttttagtagagatgaggtctcaccctattggccacactggtcttgaactcctgacctgaagtgatccacctgccttagcctcccaaagtgctgggatgacaggcatgagccactgcacccagctgttattctctatttaattaattgagaagccataataaaatatctcagtgccatcatgcattagatcaagtttatgttaccacattattttttggacattgtgagtcaatattaccaagtggacaaaatcccaggcatctttttcctcatgtaaattttaattttcatgcttatatacttagaacatttatcttggtcctaattttttgttcattcataataccaaaagttatctcatgttcttcagagtgactttgtgccatatcccacagtggcatacctgtcttcaaagagggtataattcacaaaaggacttacactagaggaaaaccctatgaatgtaagctgcgtgggaaagcattttctgatctgagtggcattgaaacccacatggtattgcacatgacagataggcctctctccccgttcatttctttttttttgagacggagtcttgctctgtcgctgaggctgagaacagtggttccatctctgttcactgccacctccacctcctgggttcaagtgattctcctgccccagcctcccaagtagctgggattacaggtgaccgccaccacgcccagctaatttttgtatttttagtagagacggggcttcactatgttggccaggttcgtctcgaactcctgacctcaggtgatccacctgcctcagcctcccaaagtgctgtgcatacaggcatgagccactgcacccggccttctccccattcattttcaaagacataaaaggatgcacaataaagagagaccctctgaatgcaagcaatatggaaaagcattccattgtatcagatccttttgtagccatgaaagaactcgctgaagagaaaccctgtaaatgaagggaatgtgaaaagccttcattcctgaaatgaagcaattcatactattaatatatgagagaaatcctattataagaaattgattgctgtgcacggtagcttacctgtaattccagcacttccagaggctaaggcaggtggatcacttgaggtcaggagttcaataccagcctgggcaacatagtgaaaccctgtctctaccaaaaatacaaaaattagccaggcatggtggcgcgtgcctgtagtcccagctactcaggaggctgaggcaggagaatcacttgaacccaggagctggatgttgcagtgacccgagattacgccactgtaccccagcagagtgagactccatctgaaaaaaaaagcaaggggccggcacggtggttcacgcctgtaatcccagcactttgggagaccaaggcaggcagatcacctgaggtcaggagttcgagaccagcctggctaacatggcaaaaccccatcgctactaaaaatacaaaaaattagatgggcatggtggcacatgcctgtaatcccagctacatgggagactgaggcaggagaattgcttgaacctgggaggcggaggttgcagtgagccaagatcacagcattgcacttcagcctgggcaacaagagtgaaactccatctcaaaaaaaaaaaaaaaaaaaattgaggaagcattcagttgtcccacttcctttcaaacaggaagagacactagagagaaaccctctgagataactgactgttgaattaagaagagaggcctggccggacacagtggctcacgcctgtaatcccagcactttgggaggctgaggtgggcggatcacgaggtcaggagatcaagaccatcctggctgacacggtgaaaccccgtctctactaaaaaatacaaaaaaactagctgggcgtggtggtgggcgcctgtagtcccagctactcgggaggctgaagcaggagaatggcgtgaatccaggaggcagagcttgcagtgaaccgagatcgcgccactgcactccagcggcgacagagcaagactccgtctcaaaaaaaaaaaaaaaaaaaagagaagtctgacaggacaataaaatttagaaatggagttggaggatgtcataatacaattcaccagtgtcctatcttacatgcaatttcaaaggcagacaagaggaagtcatcagtcacattttagaggcaccaaacaggtgccacatccatacaggctgactccctgctcccagcccattttttcctgaatctttggcttgccaatcaagaatgtcctcaaaatttgctcagaggtgtgggcctttgggtaaaggtgtcttcagaagctccacattaaagatccatcagtggttaagggcaaattgaagagaaataaagactaagatatttttttaaaagactgaaagaatagaacaatgaaaaagccccatctgtaatacagtttttctttttctttttttttgagacaaggtctctctctgtcacccaggctggagtagagtggcattatcctggctcattgcaatctgggcctcctggtttcaagtgattctggtgtctcagccacctgagtagtcaggattacaggtgcacaccaccacgcatggctaaatttttgtatttttagtagagatggggtttcaccatgttgagcaagctggtcttaaactcctgacctcaagtgatccgtctgtcttggcctttcaaaatgctgggattataggcgtgatccactgtgcctggcctggtgtttctttaggtataatgtctttaccagagagctaatgcagactgtcatgggtgagattgttctctgatgttcaattcccctactttgtatattgagtcagtatgagatgcgatttgtttggcaagcacctttgttcctgctgttactgacccttatcttgtagcctcacagctactatgcttttgtccagtccaactagataggagcttcttcctctgctgcagtgactggtctcacccagggctttcaggaaggtgagaataagcaccttcctcctcccaggaagttttgagtttcctgtgtttcatttctgaatgtaatgtctccatttattttcaattatgtttgattatatttgattaaaaacaataatttttttggcaaccaagatttctgtacatgtgtcatagaaatagttgaacttttccacaactgtatactgacaaacattattctttcttaattaattcagtagctatattaaaatatgtattagatcaagttca

SEQ ID NO: 204011 - DNA, 2036 bp, Homo sapiens
  Payload ID: 20235
  Gene Name: zinc finger protein 844
  ENST ID: ENST00000441304
  CDS Start-End: 65-280
ttctgtcgccctgtcgtctgtgttgtgactgctttggacgtgggagtcacctgaaagccaggaaatggacttggtggctttcgaggatgtggctgtgaacttcacccaggaggagtggtctttgctggatccttcccagaagaatctctacagagaagtgatgcaggaaaccttgaggaatctggcctccatagaagtcttctgggagagagagttgatgaaaatacagaagaaaatcattgtggagaaacttctagccagattccagatgacacactgaacaaaaaaacttctcctggagtaaaatcatgtgaaagcagtgtgtgtggagaagtcttcgtgggtcattcttcccttaataggcacattagagctgacactgcacacaagccgtctgagtatcaggaatatggacaggagccatataagtgtcaacaacgtaagaaagccttcagatgtcacccctcctttcaaatgcaagaaaaggctcacactggagaaaaactctatgattgtaaagaatgtggaaaaaccttcatatcccattcaagcattcaaagacacatgataatgcacaatggagatggaacttataaatgtaagttttgtgggaaagcctgcccttgtctcagcatatatcttatacatgaacgagttcacactggagagaaaccatataaatgtaaacaatgtggtaaagcctttagttattcaacttcccttcaaatacatgaaagaactcacactggagagaagccttatgaatgtaaggaatgtgggaaagcattcggtagtcccaattccctttatgaacatagaagaactcacactggagagaagccatatgaatgcaaacaatgtggaaaagccttcagatggttccattcctttcaaatacatgaaagaactcacagtgaggagaaggcttatgaatgtaccaaatgtgggaaagcattcaagtgtcccagttatctttgtagacatgaagtgacccactctgggaaaaagccctgtgaatgtaaacaatgtgggaaagcattatcttatcttaactttcaaagacacatgaaaatgcacactagaatgagaccttataaatgtaagactgtggaaaagcctttgattctcccagttcgttttgaagacatgaaagaactcacactggagagaaaccttatgaatgcaagcactgtggtaaagccttcaatcgttccagttcctttcactatcatgaaaggactcacactggagagaaaccctatgaatgtaagcagtgtagtaaagccttcatttcttccacttcctttcgatatcatgaaaggactcacactggagagaaaccgtatgagtgtaagcaatgtgggaaagccttcagatctgcctcacaccttcaaatgcatggaaggactcacactcaagagaaaccctatgaatgtaagcagtgtggtaaagccttcattttttccacttcctttcgatatcatgaaaggactcacactggagagaaaccctatgagtgtaagcaatgtgggaaagccttcacatctgcctcacaccttcaaatgcatgaaaggactcacactggaaagcaactgtatgaatctaaacaatgtgaaaaaacctttggatctgtcagaaaccttcaaattcatgaaaagacacaccctggagagaaaccctataaggaatatggaaaagcattcaacaatttctcttcctttcaaatacatgcaacaatgcacagaggacagaatgcctatgaatgtaaagagtgtgacaaagcattcatatctgccaagatccttcgagtacatgcaagaacacaccctggagagaaaccctatgaatgtaaggaatgcggaaaagcgttcaattatttttcttctttgcgtatacacaaaaggatgcacactggagagaaaccatattaatgtaaggattgtgggaaagcattcagtttgcctggttcctttcgtagacataaaagggctcacactggagtgaaaccgtatgaatgcaaggaatgtggcaaagcc

SEQ ID NO: 204012 - DNA, 716 bp, Homo sapiens
  Payload ID: 20235
  Gene Name: zinc finger protein 844
  ENST ID: ENST00000550826
  CDS Start-End: 427-716
agtctttggcccctcccgccgggtgaggttggcaccccgtttttcctgctctgagagggaccggttgccaccgccatacttctgtcgccctgtcgtctgtgttgtgactgctttggacgtgggagtcacctgaaagccaggaaatgaagtcttctgggagagagagttgatgaaaatacagaagaaaatcattgtggagaaacttctagccagattccagatgacacactgaacaaaaaaacttctcctggagtaaaatcatgtgaaagcagtgtgtgtggagaagtcttcgtgggtcattcttcccttaataggcacattagagctgacactgcacacaagccgtctgagtatcaggaatatggacaggagccatataagtgtcaacaacgtaagaaagccttcagatgtcacccctcctttcaaatgcaagaaaaggctcacactggagaaaaactctatgattgtaaagaatgtggaaaaaccttcatatcccattcaagcattcaaagacacatgataatgcacaatggagatggaacttataaatgtaagttttgtgggaaagcctgcccttgtctcagcatatatcttatacatgaacgagttcacactggagagaaaccatataaatgtaaacaatgtggtaaagcctttagttattcaacttcccttcaaatacatgaaagaactcacactggagagaagccttatga

SEQ ID NO: 204013 - DNA, 4311 bp, Homo sapiens
  Payload ID: 20236
  Gene Name: zinc finger protein 845
  Uniprot ID: Q96IR2
  ENST ID: ENST00000458035
  CDS Start-End: 118-3030
aaacccggaagcggatcgcatggagtgatggtcccaccgcagcggattgacttctaaagactcttggtacgtgaggaagaaacccggaagaggaagaggaaagcaaaggagtcagggatggctctttctcagggtctattgacattcagggatgtggccatagaattctctcaggaagagtggaagtgcctggaccctgctcagaggactctatacagggacgtgatgctggagaattataggaacctggtctccctggatatctcttccaaatgcatgatgaaggagttctcatcaacagcacaaggcaatacagaagtgatccacacagggacattgcaaagacatgaacgtcatcacattggagatttttgcttccaggaaatggagaaagatattcatgattttgagtttcagtggaaagaagatgaaagaaatagccatgaagcacccatgacagaaatcaaacagttgacgggtagtacaaaccgacatgatcaaaggcatgctggaaacaagcctattaaagatcagcttggatcaagctttcattcgcatctgcctgaactccacatgtttcagaccgaagggaaaattggtaatcaagttgagaagtctatcaacagtgcttcgttggtttcaacatcccaaagaatttcttgtaggcctaaaacccacatttctaagaactatgggaataatttcctgaattcttcattactcacacaaaagcaggaagtacacatgagagaaaaatctttccaatgtaatgagagtggcaaagcctttaattatagctcagtcttaaggaaacatcagataatccatttaggagcgaaacaatataaatgtgatgtgtgtggcaaggtctttaatcaaaagcgatatcttgcatgtcatcgtagatgtcacactggcaagaaaccttacaagtgtaatgattgtggcaagaccttcagtcaggagttaacccttacatgccatcatagacttcatactggagagaaacattacaagtgcagtgagtgtggcaagaccttcagtcgaaattcagcccttgtaattcataaggcaattcatactggagagaaatcttacaagtgtaatgaatgtggcaagaccttcagtcaaacgtcataccttgtgtaccatcgtagacttcatactggagagaaaccttacaaatgtgaagaatgtgacaaagctttcagtttcaaatcaaaccttgaaagacataggaaaattcatactggagagaaaccttacaagtgtaatgaatgcagcaggacctttagtcggaagtcatcccttacacgccatcgtagacttcatactggagagaaaccttataagtgtaatgattgtggcaagaccttcagtcagatgtcatcccttgtataccatcgtagacttcatactggagagaaaccttacaaatgtgaagaatgtgatgaagctttcagtttcaaatcgaaccttgaaagacataggagaattcatactggagagaaaccttacaagtgtaatgattgtggcaagaccttcagtcagacatcatcccttgtataccatcgtagacttcatactggagagaaaccttacaaatgtgaagaatgtgatgaagctttcagtttcaaatcaaaccttgaaagacataggataattcatactggagagaaactttacaagtgtaatgaatgtggcaagacctttagtcggaagtcatcccttacacgccattgtagacttcatactggagagaaaccttaccagtgtaatgagtgtggcaaagcctttcgtgggcagtcagcacttatttaccatcaagcaatccatggtatagggaaactttacaaatgtaatgattgtcaccaagtctttagtaatgctacaaccattgcaaatcattggagaatccataatgaagagagatcgtacaagtgtaatagatgtggcaaatttttcagacatcgttcataccttgcagttcattggcgaactcatagtggagagaaaccttacaaatgtgaagaatgtgatgaagctttcagtttcaaatcaaaccttcaaagacataggagaattcatactggagagaaaccttacaggtgtaatgaatgtggcaagacctttagtcggaagtcataccttacatgccatcgtagacttcatactggagagaaaccttacaagtgtaatgagtgtggcaagaccttcggtcgaaattcagcccttataattcacaaggcaattcatactggagagaaaccttacaagtgtaatgagtgtggcaaggccttcagtcagaagtcatcccttacatgccatcttagacttcatactggagagaaaccttacaaatgtgaagaatgtgacaaagttttcagtcgcaaatcaagccttgaaaaacacaggagaattcatactggagagaaaccatacaaatgtaaggtttgtgacaaagcttttgggcgtgattcacacctggcacaacatactagaattcacactggagagaaaccttacaagtgtaatgaatgtggcaagaacttccgtcacaattcagcccttgtaattcataaggcaattcatagtggagagaaaccttacaagtgtaatgagtgtggcaagaccttccgtcacaattcagcccttgaaattcataaggcaattcatactggagaaaaaccttacaagtgtagtgaatgtggcaaggtttttaatagaaaagcaaacctttcacgtcatcatagacttcatactggagagaaaccttacaagtgtaataaatgtggtaaggtttttaatcaacaagcacaccttgcatgtcatcatagaattcatactggagagaaaccttacaagtgtaatgagtgtggcaaaaccttccgtcacaattcagtccttgtaattcataagacaattcatactggagagaaaccttacaagtgtaatgaatgtggcaaggtttttaatcgaaaagcaaaacttgcacgtcatcatagaattcatactggaaagaaacattagaaatatgaagaatgtgacaaagtttacagttgtaaatcaagtcttgaaagacaggagaattcatactggagagaaagcttacaaatgtaagagtttgtgacaagaatcttgggcgtgattcacacctggcccaacaaactagaagtcacactggagagaaaccttacaagtgtactgagtgtggcaaagcctttagtgggcagtcaacacttattcaccatcaggcaatccatggtatagggaaactttactaatgtaatgattatcacaaagtcttcagtaacactacaaccgtttcaaatcattggagaatccataatgagagattttgaaagtgtaataaatgtggcaaatttttcagacattgttcataccttgcagttcatcggtgaactcatgctggagagaaaccttacaaatgtcatgattgtggcaaggtcttcagtctagcttcatcttatgcaaaacaggagacttcatacaggagacaaacttcacaagtatgatgattgcagcaaagcctttacttcacgttcacacctaattagacatcagagaatccatactggacagaaatcttacaaatgtcatcagtgtggcaaggtcttcagtctgagatcaccccttaaggaacatcagaaaattcatttttgagatgattgttccaaatgcaatgagtatagcaaaccatcaagcattaattggcattagagtcaattcagcattgacttgagtttgaattgacttaacattgagttcaagcattaattgacattaaagtgtttatgttaagaagattgggccaggcggggtggctcacgcctgtaatcccagcactttgggaggccaagaccaatagatcacttgaggtcaggagtttgagaccagactggccaacagacatgagtcacttttcccaccctgtattttgtttctttaataaaaactgttacgggtttttatgggtatctgttgaatctaaatcacatttgtttgtataatcattcaacaatattaagacttccaatccatcaatatgggttgtatgtctatttagtttttttgatcaatgtagatttcaaggtacaagcttctcacctccttaattcagtttatttgtaagtattaagtttcatagcaaattgaagtgtgttcataagtttctttaaacattatttattgttaatgtaaggaaattcaactaattttgggtgctgattttgtattctgcaaatacattgagtgggtttattagtatcagtaaaatcttggttgattctt

SEQ ID NO: 204014 - DNA, 4090 bp, Homo sapiens
  Payload ID: 20236
  Gene Name: zinc finger protein 845
  Uniprot ID: Q96IR2
  ENST ID: ENST00000595091
  CDS Start-End: 220-3132
aaacccggaagcggatcgcatggagtgatggtcccaccgcagcgccatgcaggcgtctttcctgttcctgggccgaggttgctcctgcctcaaggcgttcatgtgggctgtccctctgctggaactcgctggcccctcagctgcaggattgacttctaaagactcttggtacgtgaggaagaaacccggaagaggaagaggaaagcaaaggagtcagggatggctctttctcagggtctattgacattcagggatgtggccatagaattctctcaggaagagtggaagtgcctggaccctgctcagaggactctatacagggacgtgatgctggagaattataggaacctggtctccctggatatctcttccaaatgcatgatgaaggagttctcatcaacagcacaaggcaatacagaagtgatccacacagggacattgcaaagacatgaacgtcatcacattggagatttttgcttccaggaaatggagaaagatattcatgattttgagtttcagtggaaagaagatgaaagaaatagccatgaagcacccatgacagaaatcaaacagttgacgggtagtacaaaccgacatgatcaaaggcatgctggaaacaagcctattaaagatcagcttggatcaagctttcattcgcatctgcctgaactccacatgtttcagaccgaagggaaaattggtaatcaagttgagaagtctatcaacagtgcttcgttggtttcaacatcccaaagaatttcttgtaggcctaaaacccacatttctaagaactatgggaataatttcctgaattcttcattactcacacaaaagcaggaagtacacatgagagaaaaatctttccaatgtaatgagagtggcaaagcctttaattatagctcagtcttaaggaaacatcagataatccatttaggagcgaaacaatataaatgtgatgtgtgtggcaaggtctttaatcaaaagcgatatcttgcatgtcatcgtagatgtcacactggcaagaaaccttacaagtgtaatgattgtggcaagaccttcagtcaggagttaacccttacatgccatcatagacttcatactggagagaaacattacaagtgcagtgagtgtggcaagaccttcagtcgaaattcagcccttgtaattcataaggcaattcatactggagagaaatcttacaagtgtaatgaatgtggcaagaccttcagtcaaacgtcataccttgtgtaccatcgtagacttcatactggagagaaaccttacaaatgtgaagaatgtgacaaagctttcagtttcaaatcaaaccttgaaagacataggaaaattcatactggagagaaaccttacaagtgtaatgaatgcagcaggacctttagtcggaagtcatcccttacacgccatcgtagacttcatactggagagaaaccttataagtgtaatgattgtggcaagaccttcagtcagatgtcatcccttgtataccatcgtagacttcatactggagagaaaccttacaaatgtgaagaatgtgatgaagctttcagtttcaaatcgaaccttgaaagacataggagaattcatactggagagaaaccttacaagtgtaatgattgtggcaagaccttcagtcagacatcatcccttgtataccatcgtagacttcatactggagagaaaccttacaaatgtgaagaatgtgatgaagctttcagtttcaaatcaaaccttgaaagacataggataattcatactggagagaaactttacaagtgtaatgaatgtggcaagacctttagtcggaagtcatcccttacacgccattgtagacttcatactggagagaaaccttaccagtgtaatgagtgtggcaaagcctttcgtgggcagtcagcacttatttaccatcaagcaatccatggtatagggaaactttacaaatgtaatgattgtcaccaagtctttagtaatgctacaaccattgcaaatcattggagaatccataatgaagagagatcgtacaagtgtaatagatgtggcaaatttttcagacatcgttcataccttgcagttcattggcgaactcatagtggagagaaaccttacaaatgtgaagaatgtgatgaagctttcagtttcaaatcaaaccttcaaagacataggagaattcatactggagagaaaccttacaggtgtaatgaatgtggcaagacctttagtcggaagtcataccttacatgccatcgtagacttcatactggagagaaaccttacaagtgtaatgagtgtggcaagaccttcggtcgaaattcagcccttataattcacaaggcaattcatactggagagaaaccttacaagtgtaatgagtgtggcaaggccttcagtcagaagtcatcccttacatgccatcttagacttcatactggagagaaaccttacaaatgtgaagaatgtgacaaagttttcagtcgcaaatcaagccttgaaaaacacaggagaattcatactggagagaaaccatacaaatgtaaggtttgtgacaaagcttttgggcgtgattcacacctggcacaacatactagaattcacactggagagaaaccttacaagtgtaatgaatgtggcaagaacttccgtcacaattcagcccttgtaattcataaggcaattcatagtggagagaaaccttacaagtgtaatgagtgtggcaagaccttccgtcacaattcagcccttgaaattcataaggcaattcatactggagaaaaaccttacaagtgtagtgaatgtggcaaggtttttaatagaaaagcaaacctttcacgtcatcatagacttcatactggagagaaaccttacaagtgtaataaatgtggtaaggtttttaatcaacaagcacaccttgcatgtcatcatagaattcatactggagagaaaccttacaagtgtaatgagtgtggcaaaaccttccgtcacaattcagtccttgtaattcataagacaattcatactggagagaaaccttacaagtgtaatgaatgtggcaaggtttttaatcgaaaagcaaaacttgcacgtcatcatagaattcatactggaaagaaacattagaaatatgaagaatgtgacaaagtttacagttgtaaatcaagtcttgaaagacaggagaattcatactggagagaaagcttacaaatgtaagagtttgtgacaagaatcttgggcgtgattcacacctggcccaacaaactagaagtcacactggagagaaaccttacaagtgtactgagtgtggcaaagcctttagtgggcagtcaacacttattcaccatcaggcaatccatggtatagggaaactttactaatgtaatgattatcacaaagtcttcagtaacactacaaccgtttcaaatcattggagaatccataatgagagattttgaaagtgtaataaatgtggcaaatttttcagacattgttcataccttgcagttcatcggtgaactcatgctggagagaaaccttacaaatgtcatgattgtggcaaggtcttcagtctagcttcatcttatgcaaaacaggagacttcatacaggagacaaacttcacaagtatgatgattgcagcaaagcctttacttcacgttcacacctaattagacatcagagaatccatactggacagaaatcttacaaatgtcatcagtgtggcaaggtcttcagtctgagatcaccccttaaggaacatcagaaaattcatttttgagatgattgttccaaatgcaatgagtatagcaaaccatcaagcattaattggcattagagtcaattcagcattgacttgagtttgaattgacttaacattgagttcaagcattaattgacattaaagtgtttatgttaagaagattgggccaggcggggtggctcacgcctgtaatcccagcactttgggaggccaagaccaatagatcacttgaggtcaggagtttgagaccagactggccaacagacatgagtcacttttcccaccctgtattttgtttctttaataaaaactgttacgggtt

SEQ ID NO: 204015 - DNA, 526 bp, Homo sapiens
  Payload ID: 20236
  Gene Name: zinc finger protein 845
  ENST ID: ENST00000601857
  CDS Start-End: 118-526
aaacccggaagcggatcgcatggagtgatggtcccaccgcagcggattgacttctaaagactcttggtacgtgaggaagaaacccggaagaggaagaggaaagcaaaggagtcagggatggctctttctcagggtctattgacattcagggatgtggccatagaattctctcaggaagagtggaagtgcctggaccctgctcagaggactctatacagggacgtgatgctggagaattataggaacctggtctccctggatatctcttccaaatgcatgatgaaggagttctcatcaacagcacaaggcaatacagaagtgatccacacagggacattgcaaagacatgaacgtcatcacattggagatttttgcttccaggaaatggagaaagatattcatgattttgagtttcagtggaaagaagatgaaagaaatagccatgaagcacccatgacagaaatcaaacagttgacgggtagtacaaaccgacatgatcaaaggcatgctggaaacaagcctatta

SEQ ID NO: 204016 - DNA, 2016 bp, Homo sapiens
  Payload ID: 20237
  Gene Name: zinc finger protein 846
  Uniprot ID: Q147U1
  ENST ID: ENST00000397902
  CDS Start-End: 415-2016
gtgacgctccggacttctgctaggtctgagacgcgccggcctcccgctgctgctccggagaagcggcgcctcctccccgccaggaccccgaggcggggggttcccgccttctcttctgagcgcctcttcccgctgcgcccgcatcagtctgggcctggcccagggtccccggtggagacgtgtttttttctccaaccaccgtgcccctctgtttaaaagcagccagtcaacctttgtgtcctttctccagaaggaaaagcatctcagctgttgtggaaaagggccccagcgtcctcttgtcaccgacagggcgattgcagtgcgttccggtcattttttccaggacactttctgtcttcatgacaggaacatcgagaagccaaggctagtggctgggttactgatggattactgatggattcttctcagcacttagtgacctttgaggatgtggctgtggactttacccaggaggagtggactttgttggatcaagcccagagagatctctacagagatgtgatgttggagaactacaagaatctcattatactagcagggtctgaattattcaaacgtagtctcatgtctggattggaacaaatggaagagctgaggacaggagtgacaggagttctgcaggaattggatttgcaactcaaaaccaaaggctccccactgctgcaagatatttctgcagaaagatcaccaaatggagtacaattggagagaagcaatactgcagagaaactgtatgactctaaccattctggaaaagtcttcaatgaacacccatttcttatgactcacatgataactcacattggagagaaaacttctgaggataatcagagtggaaaagccttaagaaagaactttcctcatagtttttacaagaaaagtcatgctgaggggaaaatgcctaagtgtgttaaacatgaaaaagccttcaaccagtttccaaatcttactaggcagaataaaactcacacacaagagaaattgtgtgaatgcaaagactgttggagaacttttcttaatcagtcatcccttaagttacatataagatctcacaatggagacaaacactatgtatgtaaggaatgtgggaaagccttcagtaattcctcacaccttataggacatggaagaattcacagtggagagaagccctatgtctgtaaagaatgtggtaaagctttcactcaatccacaggacttaaattacacatcagaactcacagtggagaaaaaccatataaatgtaaagagtgtgggaaagccttcacccattcttcataccttactgatcatacaagaatccacagtggaaagaagccctatgtatgtatggaatgtggaaaagccttcactagatccacaggacttattttacacatgcgaattcacactggagaaaagccatatgaatgtaaggagtgtggaaaagcttttattcattcctcataccttacaaaacatgtaaggattcacagtggagagaagctgtatttatgtaaggcatgtgggaaagcttttactcgttcctcaggacttgttttacacatgagaacacatactggagaaaagccctatgaatgtaaagaatgtgggaaagcctttaataattcctcaatgcttagtcaacatgtaaggattcacactggagagaagccatatgaatgcaaagaatgtgggaaagctttcactcaatcctcgggccttagtacccatttaagaactcacactggagaaaaggcctgtgaatgtaaggaatgcggtaaagcatttgctcgttccacaaatcttaatatgcacatgcgaacgcacacaggagaaaagccttatgcatgtaaagaatgtgggaaagccttcaggtattccacataccttaacgttcacacacgaactcacactggagcaaaaccatatgaatgtaagaaatgtgggaaaaacttcactcaatcttcagcacttgctaaacatctaagaactaaggcatgtgaaaaaacctga

SEQ ID NO: 204017 - DNA, 1943 bp, Homo sapiens
  Payload ID: 20237
  Gene Name: zinc finger protein 846
  Uniprot ID: Q147U1
  ENST ID: ENST00000588267
  CDS Start-End: 1012-1644
gtattccccgctctccagcagcttcctagctgggttttcacctcagccagcgctcatgctcaacctaggcagggcggggcaggagggcctagcgggaggcggagcgagggtcggagggtgacgctccggacttctgctaggtctgagacgcgccggcctcccgctgctgctccggagaagcggcgcctcctccccgccaggaccccgaggcggggggttcccgccttctcttctgagcgcctcttcccgctgcgcccgcatcagtctgggcctggcccagggtccccggtggagacgtgtttttttctccaaccaccgtgcccctctgtttaaaagcagccagtcaacctttgtgtcctttctccagaaggaaaagcatctcagctgttgtggaaaagggccccagcgtcctcttgtcaccgacagggcgattgcagtgcgttccggtcattttttccaggacactttctgtcttcatgacaggaacatcgagaagccaaggctagtggctgggttactgatggattactgatggattcttctcaggcaagtggaaagcagacctaacttcaaaatgttatgcttgtagccatcatcggtagccttaccttgttatcgtgtattcaagcatcttaaagaaatgatggtcctgctcaggaaataactccccagaacatcaaaggagatggtacttagctgaagctggcatgtatttaatggtttagcacttagtgacctttgaggatgtggctgtggactttacccaggaggagtggactttgttggatcaagcccagagagatctctacagagatgtgatgttggagaactacaagaatctcattatactagggtctgaattattcaaacgtagtctcatgtctggattggaacaaatggaagagctgaggacaggagtgacaggagttctgcagggagagaagcaatactgcagagaaactgtatgactctaaccattctggaaaagtcttcaatgaacacccatttcttatgactcacatgataactcacattggagagaaaacttctgaggataatcagagtggaaaagccttaagaaagaactttcctcatagtttttacaagaaaagtcatgctgaggggaaaatgcctaagtgtgttaaacatgaaaaagccttcaaccagtttccaaatcttactaggcagaataaaactcacacacaagagaaattgtgtgaatgcaaagactgttggagaacttttcttaatcagtcatcccttaagttacatataagatctcacaatggagacaaacactatgtatgtaaggaatgtgggaaagccttcagtaattcctcacaccttataggacatggaagaattcacagtggagagaagccctatgtctgtaaagaatgtggtaaagctttcactcaatccacaggacttaaattacacatcagaactcacagtggagaaaaaccatataaatgtaaagagtgtgggaaagccttcacccattcttcataccttactgatcatacaagaatccacagtggaaagaagccctatgtatgtatggaatgtggaaaagccttcactagatccacaggacttattttacacatgcgaattcacactggagaaaagccatatgaatagacgaagtttcatcatgttgtccaggctggtgtcaaactcctgacttcaggtgatccacccaccttggcctcccaaagtgctgggattatggacgtgagccaccacacccgcccttgaaatactgtttctaaaaggtatatggaagaacaataggcaaggataatcaagacccagctgataaaaaaggtggaagaacttgccctaatgaatatcaagattaaaactatagtaattaagatgctgttgcattgtacacagacaactagactattggtacaaaatagtctggaaatagtcac

SEQ ID NO: 204018 - DNA, 548 bp, Homo sapiens
  Payload ID: 20237
  Gene Name: zinc finger protein 846
  ENST ID: ENST00000592587
  CDS Start-End: 250-548
gccgaccctcccaccgcctcacgcctcggagaccgggtccagagccctcagccgcttccgagccccgagaggggaatcagaagtgcgcgtgatcagagcggcacccccttcccaggaaccgcagctgaaccaacggtttcccctgcaccagcctttgcgaccaggtcattttttccaggacactttctgtcttcatgacaggaacatcgagaagccaaggctagtggctgggttactgatggattactgatggattcttctcagcacttagtgacctttgaggatgtggctgtggactttacccaggaggagtggactttgttggatcaagcccagagagatctctacagagatgtgatgttggagaactacaagaatctcattatactagcagggtctgaattattcaaacgtagtctcatgtctggattggaacaaatggaagagctgaggacaggagtgacaggagttctgcaggaattggatttgcaactcaaaaccaaaggctccccactgctgcaagatatttctgcagaaagatcaccaaa

SEQ ID NO: 204019 - DNA, 1621 bp, Homo sapiens
  Payload ID: 20237
  Gene Name: zinc finger protein 846
  ENST ID: ENST00000586293
  CDS Start-End: 103-363
gattgcagtgcgttccggtcattttttccaggacactttctgtcttcatgacaggaacatcgagaagccaaggctagtggctgggttactgatggattactgatggattcttctcagcacttagtgacctttgaggatgtggctgtggactttacccaggaggagtggactttgttggatcaagcccagagagatctctacagagatgtgatgttggagaactacaagaatctcattatactagcagggtctgaattattcaaacgtagtctcatgtctggattggaacaaatggaagagctgaggacaggagtgacaggagttctgcagggagagaagcaatactgcagagaaactgtatgactctaaccattctggaaaagtcttcaatgaacacccatttcttatgactcacatgataactcacattggagagaaaacttctgaggataatcagagtggaaaagccttaagaaagaactttcctcatagtttttacaagaaaagtcatgctgaggggaaaatgcctaagtgtgttaaacatgaaaaagccttcaaccagtttccaaatcttactaggcagaataaaactcacacacaagagaaattgtgtgaatgcaaagactgttggagaacttttcttaatcagtcatcccttaagttacatataagatctcacaatggagacaaacactatgtatgtaaggaatgtgggaaagccttcagtaattcctcacaccttataggacatggaagaattcacagtggagagaagccctatgtctgtaaagaatgtggtaaagctttcactcaatccacaggacttaaattacacatcagaactcacagtggagaaaaaccatataaatgtaaagagtgtgggaaagccttcacccattcttcataccttactgatcatacaagaatccacagtggaaagaagccctatgtatgtatggaatgtggaaaagccttcactagatccacaggacttattttacacatgcgaattcacactggagaaaagccatatgaatgtaaggagtgtggaaaagcttttattcattcctcataccttacaaaacatgtaaggattcacagtggagagaagctgtatttatgtaaggcatgtgggaaagcttttactcgttcctcaggacttgttttacacatgagaacacatactggagaaaagccctatgaatgtaaagaatgtgggaaagcctttaataattcctcaatgcttagtcaacatgtaaggattcacactggagagaagccatatgaatgcaaagaatgtgggaaagctttcactcaatcctcgggccttagtacccatttaagaactcacactggagaaaaggcctgtgaatgtaaggaatgcggtaaagcatttgctcgttccacaaatcttaatatgcacatgcgaacgcacacaggagaaaagccttatgcatgtaaagaatgtgggaaagccttcaggtattccacataccttaacgttcacacacgaactcacactggagcaaaaccatatgaatgtaagaaatgtgggaaaaacttcactcaatcttcagcacttgctaaacatctaagaactaaggcatgtgaaaaaacctga

SEQ ID NO: 204020 - DNA, 683 bp, Homo sapiens
  Payload ID: 20237
  Gene Name: zinc finger protein 846
  ENST ID: ENST00000589412
  CDS Start-End: 157-683
tcctgccctttagccgccgctggcccaacggtttccccagcagtagcctctgcgaccaggtgcggcttcaggtcattttttccaggacactttctgtcttcatgacaggaacatcgagaagccaaggctagtggctgggttactgatggattactgatggattcttctcagcacttagtgacctttgaggatgtggctgtggactttacccaggaggagtggactttgttggatcaagcccagagagatctctacagagatgtgatgttggagaactacaagaatctcattatactagggtctgaattattcaaacgtagtctcatgtctggattggaacaaatggaagagctgaggacaggagtgacaggagttctgcaggaattggatttgcaactcaaaaccaaaggctccccactgctgcaagatatttctgcagaaagatcaccaaatggagtacaattggagagaagcaatactgcagagaaactgtatgactctaaccattctggaaaagtcttcaatgaacacccatttcttatgactcacatgataactcacattggagagaaaacttctgaggataatcagagtggaaaagccttaagaaagaactttcctcatagtttttacaagaaaagtcatgctgaggggaaaatgcctaagtgtgttaaacatgaaaa

SEQ ID NO: 204021 - DNA, 482 bp, Homo sapiens
  Payload ID: 20237
  Gene Name: zinc finger protein 846
  ENST ID: ENST00000586814
  CDS Start-End: 238-482
aactcctcaggcctccgaggccgggtccagagccctcagttccttctgaaaccctggagcggaatcagaagtgcgcgtggccacagcggcgcctcctgccctttagccgccgctggcccaacggtttccccagcagtagcctctgcgaccaggtcattttttccaggacactttctgtcttcatgacaggaacatcgagaagccaaggctagtggctgggttactgatggattactgatggattcttctcagcacttagtgacctttgaggatgtggctgtggactttacccaggaggagtggactttgttggatcaagcccagagagatctctacagagatgtgatgttggagaactacaagaatctcattatactagcagggtctgaattattcaaacgtagtctcatgtctggattggaacaaatggaagagctgaggacaggagtgacaggagttctgcagggagagaagcaatactg

SEQ ID NO: 204022 - DNA, 1580 bp, Homo sapiens
  Payload ID: 20237
  Gene Name: zinc finger protein 846
  ENST ID: ENST00000589453
  CDS Start-End: 415-675
gtgacgctccggacttctgctaggtctgagacgcgccggcctcccgctgctgctccggagaagcggcgcctcctccccgccaggaccccgaggcggggggttcccgccttctcttctgagcgcctcttcccgctgcgcccgcatcagtctgggcctggcccagggtccccggtggagacgtgtttttttctccaaccaccgtgcccctctgtttaaaagcagccagtcaacctttgtgtcctttctccagaaggaaaagcatctcagctgttgtggaaaagggccccagcgtcctcttgtcaccgacagggcgattgcagtgcgttccggtcattttttccaggacactttctgtcttcatgacaggaacatcgagaagccaaggctagtggctgggttactgatggattactgatggattcttctcagcacttagtgacctttgaggatgtggctgtggactttacccaggaggagtggactttgttggatcaagcccagagagatctctacagagatgtgatgttggagaactacaagaatctcattatactagcagggtctgaattattcaaacgtagtctcatgtctggattggaacaaatggaagagctgaggacaggagtgacaggagttctgcagggagagaagcaatactgcagagaaactgtatgactctaaccattctggaaaagtcttcaatgaacacccatttcttatgactcacatgataactcacattggagagaaaacttctgaggataatcagagtggaaaagccttaagaaagaactttcctcatagtttttacaagaaaagtcatgctgaggggaaaatgcctaagtgtgttaaacatgaaaaagccttcaaccagtttccaaatcttactaggcagaataaaactcacacacaagagaaattgtgtgaatgcaaagactgttggagaacttttcttaatcagtcatcccttaagttacatataagatctcacaatggagacaaacactatgtatgtaaggaatgtgggaaagccttcagtaattcctcacaccttataggacatggaagaattcacagtggagagaagccctatgtctgtaaagaatgtggtaaagctttcactcaatccacaggacttaaattacacatcagaactcacagtggagaaaaaccatataaatgtaaagagtgtgggaaagccttcacccattcttcataccttactgatcatacaagaatccacagtggaaagaagccctatgtatgtatggaatgtggaaaagccttcactagatccacaggacttattttacacatgcgaattcacactggagaaaagccatatgaattagagacggggtttcaccgttttagccgggatggtctcgatctcctgaccttgtgatccgcccgcttcggcctcccaaagtgctgggattacaggcgtgagccaccgcgcccggcctgagacgaagtttcatcatgttgtccaggctggtgtcaaactcctgacttcaggtgatccacccacctcggcctccgaagtgctgggattacaggcatgagccactgcaccccgc

SEQ ID NO: 204023 - DNA, 1206 bp, Homo sapiens
  Payload ID: 20237
  Gene Name: zinc finger protein 846
  Uniprot ID: Q147U1
  ENST ID: ENST00000592859
  CDS Start-End: 520-1152
attccccgctctccagcagcttcctagctgggttttcacctcagccagcgctcatgctcaacctaggcagggcggggcaggagggcctagcgggaggcggagcgagggtcggagggtgacgctccggacttctgctaggtctgagacgcgccggcctcccgctgctgctccggagaagcggcgcctcctccccgccaggaccccgaggcggggggttcccgccttctcttctgagcgcctcttcccgctgcgcccgcatcagtctgggcctggcccagggtccccggtggagacgtgtttttttctccaaccaccgtgcccctctgtttaaaagcagccagtcaacctttgtgtcctttctccagaaggaaaagcatctcagctgttgtggaaaagggccccagcgtcctcttgtcaccgacagggcgattgcagtgcgttccggagagaagcaatactgcagagaaactgtatgactctaaccattctggaaaagtcttcaatgaacacccatttcttatgactcacatgataactcacattggagagaaaacttctgaggataatcagagtggaaaagccttaagaaagaactttcctcatagtttttacaagaaaagtcatgctgaggggaaaatgcctaagtgtgttaaacatgaaaaagccttcaaccagtttccaaatcttactaggcagaataaaactcacacacaagagaaattgtgtgaatgcaaagactgttggagaacttttcttaatcagtcatcccttaagttacatataagatctcacaatggagacaaacactatgtatgtaaggaatgtgggaaagccttcagtaattcctcacaccttataggacatggaagaattcacagtggagagaagccctatgtctgtaaagaatgtggtaaagctttcactcaatccacaggacttaaattacacatcagaactcacagtggagaaaaaccatataaatgtaaagagtgtgggaaagccttcacccattcttcataccttactgatcatacaagaatccacagtggaaagaagccctatgtatgtatggaatgtggaaaagccttcactagatccacaggacttattttacacatgcgaattcacactggagaaaagccatatgaatagacgaagtttcatcatgttgtccaggctggtgtcaaactcctgacttcaggtgat

SEQ ID NO: 204024 - DNA, 1531 bp, Homo sapiens
  Payload ID: 20238
  Gene Name: zinc finger protein 85
  Uniprot ID: Q03923
  ENST ID: ENST00000300540
  CDS Start-End: 126-389
gctctaggtcttgttttccctgctttgtgttttctgctcgtggacgcccagcctctgtggccctgtggcctgcaggtattgggagatccacagctaagacgccgggaccccctggaagcctagaaatgggaccattgacatttagggatgtggccatagaattctctctgaaggagtggcaatgcctggacactgcacagcggaatttatatagaaatgtgatgttagagaactacagaaacctggtcttcctgggtattactgtttctaagccagacctgatcacttgtctggagcaagggaaagaggcctggagtatgaagagacatgagatcatggtggccaaacccacagaatcttactctgtcacccagtctggaatgcagtagcaagattttggcccactgcagcctcaaccttctggggtcaagtgattgttccacctcagcctcccgagtagcttggactacagacatgcagtactatgcctggctaattttttgattatttgtagagacagagtctcactttgttgcccagtctagtctcaaacttctggctccaaatgatcctcctaccttggtctcccaaagtgttgggattataggtatgagcctgttcacccagccagtattcttaaatttaataagatttgttatgtgtcctaacagaatacacaaggtgcaaataagaatgttgtgtattctcttgcttttgactgaaaagttttgtacatgtctgttaatcctagttggtctgtgatgtggtttagatgttcgtgttcttcaaatcttatgctgcaatgtaatcctcactgttggatgtggaacctggtgggagatgtttagatcatggggcaaatttctcatgaatggctttgtactatcctcttggtaatcaaaaagtttacactctgttaattcagatgagagctgcctcattaaaagaacctggccccttcacctcacatttggttctgtcttttactatgtgatatgtccagttactgttggccttccaccattgtggaagcttactgaaaccttccaccagaggcagatgccggcacacacttcttgtacagtctgcccaacgatgaaccaaacaagcctttttatttataaattatccactctcaggtattcctctatgtgcaaaataatatattctgtaacgttgtctaagttttctgttttcttattgatcttttgtctgaattttctatttattattaaaaatggggtcttgatgtctacaattattatgttgctatgtatttcttgtttcacttttgtcaatatttgctttacgtattttggagccctaatgttgtatatacatatacacataaataaataggcataatagttttagattcctggtaaattgatccattttactattgtataatatcagtctttgtctcatgctagtacttgacttaaagcatataatgtctaatataattatgagtgtcttactcaattgtggttatatttgcatgtaataaaaagtttttccattctgttac

SEQ ID NO: 204025 - DNA, 2296 bp, Homo sapiens
  Payload ID: 20238
  Gene Name: zinc finger protein 85
  Uniprot ID: Q03923
  ENST ID: ENST00000328178
  CDS Start-End: 114-1901
gttttccctgctttgtgttttctgctcgtggacgcccagcctctgtggccctgtggcctgcaggtattgggagatccacagctaagacgccgggaccccctggaagcctagaaatgggaccattgacatttagggatgtggccatagaattctctctgaaggagtggcaatgcctggacactgcacagcggaatttatatagaaatgtgatgttagagaactacagaaacctggtcttcctgggtattactgtttctaagccagacctgatcacttgtctggagcaagggaaagaggcctggagtatgaagagacatgagatcatggtggccaaacccacagttatgtgttctcattttgcccaagacctttggccggagcagaatataaaagattctttccaaaaagtgacactgaaaagatatggaaaatgtagacatgaaaatttaccattaagaaaaggctgtgaaagtatggatgagtgtaagatgcacaaaggaggttgtaatggacttaaccaatgtctcacagctacccagagcaaaatatttcaatgtgataaatatgtaaaagtcgctcataaattttcaaattcaaacagacatgagataagacatactaaaaagaaacctttcaaatgtacaaaatgtggcaaatcatttggcatgatttcatgcctaactgaacatagcagaattcatactagagtaaatttctacaaatgtgaagaatgtggaaaagcctttaactggtcctcaacccttactaaacataagagaattcatacgggagagaaaccttacaaatgtgaagaatgtggtaaagcctttaaccagtcctcaaaccttattaaacataagaaaattcatactggagagaaaccctacaaatgtgaagaatgtggcaaaacttttaaccgattctcaactcttactacccataagataattcatactggagagaaaccctacaaatgtaaagaatgtggtaaagcttttaaccgatcttcaacccttactacccatagaaaaattcatactggagagaaaccttacaaatgtgaagaatgtggcaaagcctttaagcagtcctcaaaccttactacacataagataattcatactggagagaaaccctacaaatgtaaaaaatgtggaaaagcctttaaccagtctgcacaccttaccacacatgaggtaattcatactggagagaaaccctacaaatgtgaaaaatgtggaaaagcctttaatcatttctcacaccttactacacataagataattcatactggagagaaaccttacaaatgtaaagaatgtggtaaagcttttaaacactcttcaacccttactaaacataagataattcatactggagagaagccttacaaatgtaaagaatgtgaaaaagcttttaaccaatcctcaaaacttactgaacataagaaaattcatactggagagaaaccctatgaatgtgaaaaatgtggcaaagcttttaaccagtcctcaaatcttactagacataagaaaagtcatacagaagagaaaccttacaaatgtgaagaatgtggcaaaggttttaaatggccctcaacccttactatccataagataattcatactggagagaaaccatacaaatgtgaagaatgtggcaaagcttttaaccaatcctcaaaacttaccaaacataagaaaattcatactggagagaaaccctacacatgtgaagaatgtggcaaagcctttaaccagtcctcaaaccttactaaacataagagaattcatactggagaaaaaccttacaaatgtgaagaatgtgacaaagcttttaaatggtcctcagtccttactaaacataagataattcataccggagaaaaattacaaatatgaaaattatggcaaagctttaatcaatttacaagtcttactaaacataagaaaatttatactggagagaaactactaacctgaaagatgtgacaataattttgacaacacctcagacttataaaagtaatcatactggtgagaaattctaaaaatgtgaagactatggcaaagtctttaaatggttgtcacactttaggtaagataattcatattggaacaaactacaagtgcaaacaatgtggcaaaacttaatttatgctcacaccttactgcacagaaaagaatttttagttgagaaaaagtatacaaatataaagaatgtggaaaagccgttaatatctgctcacatcttactcagcatcagaaagtacttaataaaagcattataaatggaa

SEQ ID NO: 204026 - DNA, 1689 bp, Homo sapiens
  Payload ID: 20238
  Gene Name: zinc finger protein 85
  Uniprot ID: Q03923
  ENST ID: ENST00000345030
  CDS Start-End: 1-1689
atgggaccattgacatttagggatgtggccatagaattctctctgaaggagtggcaatgcctggacactgcacagcggaatttatatagaaatgtgatgttagagaactacagaaacctggtcttcctggttatgtgttctcattttgcccaagacctttggccggagcagaatataaaagattctttccaaaaagtgacactgaaaagatatggaaaatgtagacatgaaaatttaccattaagaaaaggctgtgaaagtatggatgagtgtaagatgcacaaaggaggttgtaatggacttaaccaatgtctcacagctacccagagcaaaatatttcaatgtgataaatatgtaaaagtcgctcataaattttcaaattcaaacagacatgagataagacatactaaaaagaaacctttcaaatgtacaaaatgtggcaaatcatttggcatgatttcatgcctaactgaacatagcagaattcatactagagtaaatttctacaaatgtgaagaatgtggaaaagcctttaactggtcctcaacccttactaaacataagagaattcatacgggagagaaaccttacaaatgtgaagaatgtggtaaagcctttaaccagtcctcaaaccttattaaacataagaaaattcatactggagagaaaccctacaaatgtgaagaatgtggcaaaacttttaaccgattctcaactcttactacccataagataattcatactggagagaaaccctacaaatgtaaagaatgtggtaaagcttttaaccgatcttcaacccttactacccatagaaaaattcatactggagagaaaccttacaaatgtgaagaatgtggcaaagcctttaagcagtcctcaaaccttactacacataagataattcatactggagagaaaccctacaaatgtaaaaaatgtggaaaagcctttaaccagtctgcacaccttaccacacatgaggtaattcatactggagagaaaccctacaaatgtgaaaaatgtggaaaagcctttaatcatttctcacaccttactacacataagataattcatactggagagaaaccttacaaatgtaaagaatgtggtaaagcttttaaacactcttcaacccttactaaacataagataattcatactggagagaagccttacaaatgtaaagaatgtgaaaaagcttttaaccaatcctcaaaacttactgaacataagaaaattcatactggagagaaaccctatgaatgtgaaaaatgtggcaaagcttttaaccagtcctcaaatcttactagacataagaaaagtcatacagaagagaaaccttacaaatgtgaagaatgtggcaaaggttttaaatggccctcaacccttactatccataagataattcatactggagagaaaccatacaaatgtgaagaatgtggcaaagcttttaaccaatcctcaaaacttaccaaacataagaaaattcatactggagagaaaccctacacatgtgaagaatgtggcaaagcctttaaccagtcctcaaaccttactaaacataagagaattcatactggagaaaaaccttacaaatgtgaagaatgtgacaaagcttttaaatggtcctcagtccttactaaacataagataattcataccggagaaaaattacaaatatga

SEQ ID NO: 204027 - DNA, 556 bp, Homo sapiens
  Payload ID: 20238
  Gene Name: zinc finger protein 85
  ENST ID: ENST00000595854
  CDS Start-End: 117-556
cttgttttccctgctttgtgttttctgctcgtggacgcccagcctctgtggccctgtggcctgcaggtattgggagatccacagctaagacgccgggaccccctggaagcctagaaatgggaccattgacatttagggatgtggccatagaattctctctgaaggagtggcaatgcctggacactgcacagcggaatttatatagaaatgtgatgttagagaactacagaaacctggtcttcctgggtattactgtttctaagccagacctgatcacttgtctggagcaagggaaagaggcctggagtatgaagagacatgagatcatggtggccaaacccacaggtgaagtttcacgctgtcgcccaggctggagtacagagtgcaatggcgcgatctcggctcactgcagcctccgcctcctgggttcaagcaattctcctgcctcagcctctcaagtagctgagattacaggcatgcgccaccatgcccggctcatttttgtatttttagtggaggtggggtttcaccatgttggacacgctggtctcgaact

SEQ ID NO: 204028 - DNA, 1259 bp, Homo sapiens
  Payload ID: 20238
  Gene Name: zinc finger protein 85
  ENST ID: ENST00000596476
  CDS Start-End: 201-368
tgctcgtggacgcccagcctctgtggccctgtggcctgcaggtattgggagatccacagctaagacgccgggaccccctggaagcctagaaatggtgagagtgccagggaccattgacatttagggatgtggccatagaattctctctgaaggagtggcaatgcctggacactgcacagcggaatttatatagaaatgtgatgttagagaactacagaaacctggtcttcctgggtattactgtttctaagccagacctgatcacttgtctggagcaagggaaagaggcctggagtatgaagagacatgagatcatggtggccaaacccacagaatcttactctgtcacccagtctggaatgcagtagcaagattttggcccactgcagcctcaaccttctggggtcaagtgattgttccacctcagcctcccgagtagcttggactacagacatgcagtactatgcctggctaattttttgattatttgtagagacagagtctcactttgttgcccagtctagtctcaaacttctggctccaaatgatcctcctaccttggtctcccaaagtgttgggattataggtatgagcctgttcacccagccagtattcttaaatttaataagatttgttatgtgtcctaacagaatacacaaggtgcaaataagaatgttgtgtattctcttgcttttgactgaaaagttttgtacatgtctgttaatcctagttggtctgtgatgtggtttagatgttcgtgttcttcaaatcttatgctgcaatgtaatcctcactgttggatgtggaacctggtgggagatgtttagatcatggggcaaatttctcatgaatggctttgtactatcctcttggtaatcaaaaagtttacactctgttaattcagatgagagctgcctcattaaaagaacctggccccttcacctcacatttggttctgtcttttactatgtgatatgtccagttactgttggccttccaccattgtggaagcttactgaaaccttccaccagaggcagatgccggcacacacttcttgtacagtctgcccaacgatgaaccaaacaagcctttttatttataaattatccactctcaggtattcctctatgtgcaaaataatatattctgtaacgttgtctaagttttctgttttcttattgatcttttgtctgaattttctatttattattaaaaatggggtcttgatgtctacaattattatgttgctatgtatttc

SEQ ID NO: 204029 - DNA, 773 bp, Homo sapiens
  Payload ID: 20238
  Gene Name: zinc finger protein 85
  ENST ID: ENST00000595742
  CDS Start-End: 80-773
aaaagaggcaaaggcagaggagaacaaaggaaggagggagcaacttgtggatgctgagaaaggttgtctatcaaaaagaatgtcgtatgagctattgagaaaggtgtatatcctgatgttactgaggagtgttctctatgcctctgttagaattatgtgttctcattttgcccaagacctttggccggagcagaatataaaagattctttccaaaaagtgacactgaaaagatatggaaaatgtagacatgaaaatttaccattaagaaaaggctgtgaaagtatggatgagtgtaagatgcacaaaggaggttgtaatggacttaaccaatgtctcacagctacccagagcaaaatatttcaatgtgataaatatgtaaaagtcgctcataaattttcaaattcaaacagacatgagataagacatactaaaaagaaacctttcaaatgtacaaaatgtggcaaatcatttggcatgatttcatgcctaactgaacatagcagaattcatactagagtaaatttctacaaatgtgaagaatgtggaaaagcctttaactggtcctcaacccttactaaacataagagaattcatacgggagagaaaccttacaaatgtgaagaatgtggtaaagcctttaaccagtcctcaaaccttattaaacataagaaaattcatactggagagaaaccctacaaatgtgaagaatgtggcaaaacttttaaccgattctcaactcttactacccataagataattcatactggagaga

SEQ ID NO: 204030 - DNA, 483 bp, Homo sapiens
  Payload ID: 20238
  Gene Name: zinc finger protein 85
  ENST ID: ENST00000601284
  CDS Start-End: 117-483
cttgttttccctgctttgtgttttctgctcgtggacgcccagcctctgtggccctgtggcctgcaggtattgggagatccacagctaagacgccgggaccccctggaagcctagaaatgggaccattgacatttagggatgtggccatagaattctctctgaaggagtggcaatgcctggacactgcacagcggaatttatatagaaatgtgatgttagagaactacagaaacctggtcttcctgggtattactgtttctaagccagacctgatcacttgtctggagcaagggaaagaggcctggagtatgaagagacatgagatcatggtggccaaacccacaggttgtctatcaaaaagaatgtcgtatgagctattgagaaaggtgtatatcctgatgttactgaggagtgttctctatgcctctgttagaattatgtgttctcattttgcccaagacctttggccggagcagaatataa

SEQ ID NO: 204031 - DNA, 549 bp, Homo sapiens
  Payload ID: 20238
  Gene Name: zinc finger protein 85
  ENST ID: ENST00000599885
  CDS Start-End: 163-549
gttttctgctcgtggacgcccagcctctgtggccctgtggcctgcaggtattgggagatccacagctaagacgccgggaccccctggaagcctagaaatggtattactgtttctaagccagacctgatcacttgtctggagcaagggaaagaggcctggagtatgaagagacatgagatcatggtggccaaacccacagttatgtgttctcattttgcccaagacctttggccggagcagaatataaaagattctttccaaaaagtgacactgaaaagatatggaaaatgtagacatgaaaatttaccattaagaaaaggctgtgaaagtatggatgagtgtaagatgcacaaaggaggttgtaatggacttaaccaatgtctcacagctacccagagcaaaatatttcaatgtgataaatatgtaaaagtcgctcataaattttcaaattcaaacagacatgagataagacatactaaaaagaaacctttcaaatgtacaaaatgtggcaaatcatttggcatgatttcatgcctaactgaacatagc

SEQ ID NO: 204032 - DNA, 506 bp, Homo sapiens
  Payload ID: 20238
  Gene Name: zinc finger protein 85
  ENST ID: ENST00000601924
  CDS Start-End: 149-506
ctttgtctctcgctgcagcctgagctctaggtcttgttttccctgctttgtgttttctgctcgtggacgcccagcctctgtggccctgtggcctgcaggtattgggagatccacagctaagacgccgggaccccctggaagcctagaaatgggaccattgacatttagggatgtggccatagaattctctctgaaggagtggcaatgcctggacactgcacagcggaatttatatagaaatgtgatgttagagaactacagaaacctggtcttcctggacctgatcacttgtctggagcaagggaaagaggcctggagtatgaagagacatgagatcatggtggccaaacccacagttatgtgttctcattttgcccaagacctttggccggagcagaatataaaagattctttccaaaaagtgacactgaaaagatatggaaaatgtagacatgaaaatttaccattaagaaaaggctgtgaaagtatggatgagtgtaagatgc

SEQ ID NO: 204033 - DNA, 563 bp, Homo sapiens
  Payload ID: 20238
  Gene Name: zinc finger protein 85
  ENST ID: ENST00000597314
  CDS Start-End: 180-368
ggatagggcggcttccgggatgtggcggggcctttgtctctcgctgcagcctgagctctaggtcttgttttccctgctttgtgttttctgctcgtggacgcccagcctctgtggccctgtggcctgcaggtattgggagatccacagctaagacgccgggaccccctggaagcctagaaatgggaccattgacatttagggatgtggccatagaattctctctgaaggagtggcaatgcctggacactgcacagcggaatttatatagaaatgtgatgttagagaactacagaaacctggtcttcctggccagacctgatcacttgtctggagcaagggaaagaggcctggagtatgaagagacatgagatcatggtggccaaacccacagttatgtgttctcattttgcccaagacctttggccggagcagaatataaaagattctttccaaaaagtgacactgaaaagatatggaaaatgtagacatgaaaatttaccattaagaaaaggctgtgaaagtatggatgagtgtaagatgcacaaaggaggttgtaatggact

SEQ ID NO: 204034 - DNA, 782 bp, Homo sapiens
  Payload ID: 20238
  Gene Name: zinc finger protein 85
  ENST ID: ENST00000599064
  CDS Start-End: 79-782
acttagaactttctaaaagaggcaaaggcagaggagaacaaaggaaggagggagcaacttgtggatgctgagaaagttatgtgttctcattttgcccaagacctttggccggagcagaatataaaagattctttccaaaaagtgacactgaaaagatatggaaaatgtagacatgaaaatttaccattaagaaaaggctgtgaaagtatggatgagtgtaagatgcacaaaggaggttgtaatggacttaaccaatgtctcacagctacccagagcaaaatatttcaatgtgataaatatgtaaaagtcgctcataaattttcaaattcaaacagacatgagataagacatactaaaaagaaacctttcaaatgtacaaaatgtggcaaatcatttggcatgatttcatgcctaactgaacatagcagaattcatactagagtaaatttctacaaatgtgaagaatgtggaaaagcctttaactggtcctcaacccttactaaacataagagaattcatacgggagagaaaccttacaaatgtgaagaatgtggtaaagcctttaaccagtcctcaaaccttattaaacataagaaaattcatactggagagaaaccctacaaatgtgaagaatgtggcaaaacttttaaccgattctcaactcttactacccataagataattcatactggagagaaaccctacaaatgtaaagaatgtggtaaagcttttaaccgatcttcaacccttactacccatagaaaaattcatactggagagaa

SEQ ID NO: 204035 - DNA, 1661 bp, Homo sapiens
  Payload ID: 20238
  Gene Name: zinc finger protein 85
  ENST ID: ENST00000596534
  CDS Start-End: 135-1661
agaactttctaaaagaggcaaaggcagaggagaacaaaggaaggagggagcaacttgtggatgctgagaaagtgtctcactatgttgctcaggctgatcttcaactcctagtctcaagttgtctatcaaaaagaatgtcgtatgagctattgagaaaggtgtatatcctgatgttactgaggagtgttctctatgcctctgttagaattatgtgttctcattttgcccaagacctttggccggagcagaatataaaagattctttccaaaaagtgacactgaaaagatatggaaaatgtagacatgaaaatttaccattaagaaaaggctgtgaaagtatggatgagtgtaagatgcacaaaggaggttgtaatggacttaaccaatgtctcacagctacccagagcaaaatatttcaatgtgataaatatgtaaaagtcgctcataaattttcaaattcaaacagacatgagataagacatactaaaaagaaacctttcaaatgtacaaaatgtggcaaatcatttggcatgatttcatgcctaactgaacatagcagaattcatactagagtaaatttctacaaatgtgaagaatgtggaaaagcctttaactggtcctcaacccttactaaacataagagaattcatacgggagagaaaccttacaaatgtgaagaatgtggtaaagcctttaaccagtcctcaaaccttattaaacataagaaaattcatactggagagaaaccctacaaatgtgaagaatgtggcaaaacttttaaccgattctcaactcttactacccataagataattcatactggagagaaaccctacaaatgtaaagaatgtggtaaagcttttaaccgatcttcaacccttactacccatagaaaaattcatactggagagaaaccttacaaatgtgaagaatgtggcaaagcctttaagcagtcctcaaaccttactacacataagataattcatactggagagaaaccctacaaatgtaaaaaatgtggaaaagcctttaaccagtctgcacaccttaccacacatgaggtaattcatactggagagaaaccctacaaatgtgaaaaatgtggaaaagcctttaatcatttctcacaccttactacacataagataattcatactggagagaaaccttacaaatgtaaagaatgtggtaaagcttttaaacactcttcaacccttactaaacataagataattcatactggagagaagccttacaaatgtaaagaatgtgaaaaagcttttaaccaatcctcaaaacttactgaacataagaaaattcatactggagagaaaccctatgaatgtgaaaaatgtggcaaagcttttaaccagtcctcaaatcttactagacataagaaaagtcatacagaagagaaaccttacaaatgtgaagaatgtggcaaaggttttaaatggccctcaacccttactatccataagataattcatactggagagaaaccatacaaatgtgaagaatgtggcaaagcttttaaccaatcctcaaaacttaccaaacataagaaaattcatactggagagaaaccctacacatgtgaagaatgtggcaaagcctttaaccagtcctcaaaccttactaaacataagagaattcatact

SEQ ID NO: 204036 - DNA, 574 bp, Homo sapiens
  Payload ID: 20238
  Gene Name: zinc finger protein 85
  ENST ID: ENST00000598862
  CDS Start-End: 151-574
aaaagaggcaaaggcagaggagaacaaaggaaggagggagcaacttgtggatgctgagaaagtgtctcactatgttgctcaggctgatcttcaactcctagtctcaagttgtctatcaaaaagaatgtcgtatgagctattgagaaagttatgtgttctcattttgcccaagacctttggccggagcagaatataaaagattctttccaaaaagtgacactgaaaagatatggaaaatgtagacatgaaaatttaccattaagaaaaggctgtgaaagtatggatgagtgtaagatgcacaaaggaggttgtaatggacttaaccaatgtctcacagctacccagagcaaaatatttcaatgtgataaatatgtaaaagtcgctcataaattttcaaattcaaacagacatgagataagacatactaaaaagaaacctttcaaatgtacaaaatgtggcaaatcatttggcatgatttcatgcctaactgaacatagcagaattcatactagagtaaatttctacaaatgtgaagaatgtggaaaagcctttaactggtcctcaacccttacta
